(19) United States
(12) Patent Application Publication
(10) Pub. No.: US 2020/0377945 A1
(43) Pub. Date: Dec. 3, 2020

(54) BIOMARKERS FOR TYPE 2 DIABETES MELLITUS AND USE THEREOF

(71) Applicant: PERFECT (CHINA) CO., LTD, Guangdong (CN)

(72) Inventors: Liping ZHAO, Shanghai (CN); Chenhong ZHANG, Shanghai (CN); Guojun WU, Shanghai (CN); Menghui ZHANG, Shanghai (CN)

(73) Assignee: PERFECT (CHINA) CO., LTD, Guangdong (CN)

(21) Appl. No.: 16/261,037

(22) Filed: Jan. 29, 2019

(30) Foreign Application Priority Data
Jan. 31, 2018 (CN) 201810143729.2

(51) Int. Cl. C12Q 1/6883

(52) U.S. Cl. CPC C12Q 1/6883; C12Q 2600/158; C12Q 2600/106

(57) ABSTRACT

The present invention provides a method for assessing the presence or the risk of development of type 2 diabetes mellitus in a subject based on abundance data of several CAGs. Also provided is a method for evaluating efficacy of diet intervention or disease treatment in a subject having type 2 diabetes mellitus based on abundance data of these CAGs.

[0001] The present application contains a Sequence Listing that has been submitted electronically in ASCII format and is hereby incorporated by reference in its entirety. The ASCII copy, created on Jan. 17, 2020, is named 184627 Substitute Sequence Listing_ST25.txt and is 252,667,892 bytes in size.

### BACKGROUND

[0002] The gut microbiota provides many beneficial functions to the human host. Some of these functions are essential to us as we do not encode them in our own genome. From an ecological perspective, such functions can be considered as “ecosystem services” (1). Function-wise, a “healthy” gut microbiota is one that is able to provide all the ecosystem services that are required. Short-chain fatty acid (SCFA) production is the most notable example of such service provided by the gut bacteria. There is already a large body of literature on how humans may directly benefit from SCFAs, e.g. butyrate is the primary energy substrate for colonocytes and a wide range of SCFAs function as signaling molecules that modulate inflammation and appetite regulation (2). Bacteria that supply SCFAs to humans are therefore the ecosystem service providers (ESPs) and the key members of the gut microbiota for keeping the human host healthy.

[0003] Deficiency of SCFA producers has been linked to dysbiosis-related diseases such as type 2 diabetes mellitus (T2DM) (3-6). Clinical trials using high dietary fibre diets have been shown to alleviate the disease phenotypes of T2DM but with vastly different treatment response across individuals (7-9), potentially due to person-specific profiles of SCFA producers in the gut microbiota (10).

[0004] Identifying ESPs for SCFA production to ameliorate T2DM, however, is no easy task. The capacity for fermenting organic compounds into SCFAs is a genetic trait shared by hundreds of gut bacterial species across many taxa (11). Some SCFA producers may outcompete others due to different tolerance to acidity in the gut lumen (12, 13). This presents the need to make a distinction between a “producer”, which has the genetic capacity for producing SCFAs, and a “provider”, which indeed ferments carbohydrates and supplies SCFAs in the specific gut environment. Our recent studies further demonstrated a strain-specific response in butyrate- and acetate-producing species to a high dietary fibre diet (14, 15). This calls for a strain-level microbiome-wide association approach to identify the ESPs which are the actual suppliers of SCFAs to the human host in response to high dietary fibre intake.

### SUMMARY OF THE INVENTION

[0005] The present application uses shotgun metagenomic sequencing to reveal the changes of gut microbiome in T2D patients in response to high-fibre intervention. As a result, 15 CAGs (co-abundance gene groups), and designated as CAG NO.: 1 to 15, were found to be upregulated and identified as ESPs, while 49, designated as CAG NO.: 16 to 64, were downregulated in T2D patients. These CAGs can be used as the biomarkers for efficient, accurate and patient friendly characterization of T2D.

[0006] In one aspect, the present invention provides a method for assessing the presence or the risk of development of type 2 diabetes mellitus in a subject, comprising the steps of:
[0007] a) collecting a fecal sample from the subject;
[0008] b) analyzing DNA extracted from the fecal sample to determine abundance of each reference CAG selected from the group consisting of CAG Nos.: 1-64,

Aᵢ (abundance of CAG No: i)=number of reads aligned to CAG No.: i/(size of CAG No.: i×number of total reads);
[0009] c) calculating GMM-index of each sample using the calculated abundance data,

GMM-index=log (ρᵢ₌₁¹⁵Aᵢ/Σᵢ₌₁₆⁶⁴Aᵢ); and
[0010] d) determining that the subject suffers from or at a risk of developing type 2 diabetes mellitus if the GMM-index is close to or lower than a predetermined level, wherein, CAG NOs.:1-15 comprise nucleic acid sequences set forth in SEQ ID NOs.: 1-191, 192-326, 327-593, 594-835, 836-885, 886-960, 961-1097, 1098-1264, 1265-1433, 1434-1684, 1685-1833, 1834-1979, 1980-2163, 2164-2447, and 2448-2783, respectively, and CAG NOs.:16-64 comprise nucleic acid sequences set forth in SEQ ID NOs.: 2784-2961, 2962-3130, 3131-3525, 3526-3747, 3748-3863, 3864-4068, 4069-4212, 4213-4393, 4394-4532, 4533-4891, 4892-4979, 4980-5116, 5117-5320, 5321-5464, 5465-5781, 5782-6279, 6280-6646, 6647-6954, 6955-7178, 7179-7613, 7614-7758, 7759-8046, 8047-8491, 8492-8546, 8547-9971, 9972-10099, 10100-10392, 10393-10502, 10503-10694, 10695-10986, 10987-11089, 11090-11262, 11263-11466, 11467-11704, 11705-12034, 12035-12113, 12114-12341, 12342-12454, 12455-12664, 12665-12825, 12826-13042, 13403-13500, 13501-13726, 13727-13949, 13950-14014, 14015-14290, 14291-14403, 14404-14686, and 14687-14850, respectively.

[0011] In some embodiments, analysis of DNA in step b) comprises the steps of obtaining the DNA sequences and aligning the obtained DNA sequences with the nucleic acid sequences set forth in SEQ ID Nos.: 1-14850.

[0012] In some embodiments, obtaining of DNA sequences comprises the steps of obtaining raw sequence reads in the sample and processing the raw sequence reads to obtain qualified sequence reads.

[0013] In some embodiments, the raw sequence reads are obtained by a PCR-based high-throughput sequencing technique. In some embodiments, the raw sequence reads are obtained by Illumina sequencing.

[0014] In some embodiments, the processing of the raw sequence reads comprises removal of adapters, trimming of sequences at 3′ end until reaching the first nucleotide with a quality threshold higher than 20, removal of short sequences, and removal of sequences aligned to human genome. In some embodiments, the short sequences are 59 bp or less in length.

[0015] In some embodiments, the alignment of DNA sequences uses seed-and-extend strategy. In some embodiments, the sequences with no mismatch in seed sequence are used to determine the abundance of each reference CAG in step b). In some embodiments, the length of the seed sequence is 4 bp or more, 5 bp or more, 6 bp or more, 7 bp or more, 8 bp or more, 9 bp or more, 10 bp or more, 11 bp or more, 12 bp or more, 13 bp or more, 14 bp or more, 15 bp or more, 16 bp or more, 17 bp or more, 18 bp or more, or 19 bp or more. In some embodiments, the length of the seed sequence is 31 bp or less, 30 bp or less, 29 bp or less, 28 bp or less, 27 bp or less, 26 bp or less, 25 bp or less, 24 bp or less, 23 bp or less, 22 bp or less, or 21 bp or less. In some embodiments, the seed sequence is 20 bp in length.

[0016] In some embodiments, the predetermined level is approximately −1.028883.

[0017] In a second aspect, the instant invention provides a method for evaluating efficacy of diet intervention or disease treatment in a subject having type 2 diabetes mellitus, comprising the steps of
[0018] a) collecting a fecal sample from the subject before and during the diet intervention or disease treatment;
[0019] b) analyzing DNA extracted from the fecal sample to determine abundance of each reference CAG selected from the group consisting of CAG Nos.: 1-64,

Aᵢ (abundance of CAG No: i)=number of reads aligned to CAG No.: i/(size of CAG No.: i×number of total reads);
[0020] c) calculating GMM-index of each sample using the calculated abundance data,

GMM-index=log (ρᵢ₌₁¹⁵Aᵢ/Σᵢ₌₁₆⁶⁴ Aᵢ); and
[0021] e) determining that the subject responds positively to the diet intervention or disease treatment if the GMM-index is increased in the sample collected during the diet intervention or disease treatment,
   wherein, CAG NOs.:1-15 comprise nucleic acid sequences set forth in SEQ ID NOs.: 1-191, 192-326, 327-593, 594-835, 836-885, 886-960, 961-1097, 1098-1264, 1265-1433, 1434-1684, 1685-1833, 1834-1979, 1980-2163, 2164-2447, and 2448-2783, respectively, and CAG NOs.:16-64 comprise nucleic acid sequences set forth in SEQ ID NOs.: 2784-2961, 2962-3130, 3131-3525, 3526-3747, 3748-3863, 3864-4068, 4069-4212, 4213-4393, 4394-4532, 4533-4891, 4892-4979, 4980-5116, 5117-5320, 5321-5464, 5465-5781, 5782-6279, 6280-6646, 6647-6954, 6955-7178, 7179-7613, 7614-7758, 7759-8046, 8047-8491, 8492-8546, 8547-9971, 9972-10099, 10100-10392, 10393-10502, 10503-10694, 10695-10986, 10987-11089, 11090-11262, 11263-11466, 11467-11704, 11705-12034, 12035-12113, 12114-12341, 12342-12454, 12455-12664, 12665-12825, 12826-13042, 13403-13500, 13501-13726, 13727-13949, 13950-14014, 14015-14290, 14291-14403, 14404-14686, and 14687-14850, respectively.

[0022] In some embodiments, analysis of DNA in step b) comprises the steps of obtaining the DNA sequences and aligning the obtained DNA sequences with the nucleic acid sequences set forth in SEQ ID Nos.: 1-14850.

[0023] In some embodiments, obtaining of DNA sequences comprises the steps of obtaining raw sequence reads in the sample and processing the raw sequence reads to obtain qualified sequence reads.

[0024] In some embodiments, the raw sequence reads are obtained by a PCR-based high-throughput sequencing technique. In some embodiments, the raw sequence reads are obtained by Illumina sequencing.

[0025] In some embodiments, the processing of the raw sequence reads comprises removal of adapters, trimming of sequences at 3′ end until reaching the first nucleotide with a quality threshold higher than 20, removal of short sequences, and removal of sequences aligned to human genome. In some embodiments, the short sequences are 59 bp or less in length.

[0026] In some embodiments, the alignment of DNA sequences uses seed-and-extend strategy. In some embodiments, the sequences with no mismatch in seed sequence are used to determine the abundance of each reference CAG in step b). In some embodiments, the length of the seed sequence is 4 bp or more, 5 bp or more, 6 bp or more, 7 bp or more, 8 bp or more, 9 bp or more, 10 bp or more, 11 bp or more, 12 bp or more, 13 bp or more, 14 bp or more, 15 bp or more, 16 bp or more, 17 bp or more, 18 bp or more, or 19 bp or more. In some embodiments, the length of the seed sequence is 31 bp or less, 30 bp or less, 29 bp or less, 28 bp or less, 27 bp or less, 26 bp or less, 25 bp or less, 24 bp or less, 23 bp or less, 22 bp or less, or 21 bp or less. In some embodiments, the seed sequence is 20 bp in length.

[0027] In one embodiment, during the diet intervention or disease treatment, the fecal sample is collected one week, two weeks, three weeks, and/or four weeks after the diet intervention or disease treatment begins.

[0028] In some embodiments, the subject is determined to respond positively to the diet intervention or disease treatment when the GMM-index becomes close to or higher than a predetermined level during the diet intervention or disease treatment. In some embodiments, the predetermined level is −1.028883.

[0029] In a third aspect, the present invention provides a method for assessing the presence or the risk of development of type 2 diabetes mellitus in a subject, comprising the steps of:
[0030] a) collecting a fecal sample from the subject;
[0031] b) analyzing DNA extracted from the fecal sample to determine abundance of each reference CAG selected from the group consisting of CAG ID Nos.: 1-15,

Aᵢ (abundance of CAG No.: i)=number of reads aligned to the CAG No.: i/(size of CAG No.: i×number of total reads);
[0032] c) calculating ESP-index of each sample using the calculated abundance data,

ESP-Index=In(Help×10¹⁰×Σᵢ₌₁¹⁵Aᵢ), wherein Heip=(e^{H}−1)/14, H=−ρᵢ₌₁¹⁵ AᵢInAᵢ; and
[0033] d) determining that the subject suffers from or at a risk of developing type 2 diabetes mellitus if the ESP-index is close to or lower than a predetermined level,
   wherein, CAG NOs.:1-15 comprise nucleic acid sequences set forth in SEQ ID NOs.: 1-191, 192-326, 327-593, 594-835, 836-885, 886-960, 961-1097, 1098-1264, 1265-1433, 1434-1684, 1685-1833, 1834-1979, 1980-2163, 2164-2447, and 2448-2783, respectively.

[0034] In some embodiments, analysis of DNA in step b) comprises the steps of obtaining the DNA sequences and aligning the obtained DNA sequences with the nucleic acid sequences set forth in SEQ ID Nos.: 1-2783.

[0035] In some embodiments, obtaining of DNA sequences comprises the steps of obtaining raw sequence reads in the sample and processing the raw sequence reads to obtain qualified sequence reads.

[0036] In some embodiments, the raw sequence reads are obtained by a PCR-based high-throughput sequencing technique. In some embodiments, the raw sequence reads are obtained by Illumina sequencing.

[0037] In some embodiments, the processing of the raw sequence reads comprises removal of adapters, trimming of sequences at 3′end until reaching the first nucleotide with a quality threshold higher than 20, removal of short sequences, and removal of sequences aligned to human genome. In some embodiments, the short sequences are 59 bp or less in length.

[0038] In some embodiments, the alignment of DNA sequences uses seed-and-extend strategy. In some embodiments, the sequences with no mismatch in seed sequence are used to determine the abundance of each reference CAG in step b). In some embodiments, the length of the seed sequence is 4 bp or more, 5 bp or more, 6 bp or more, 7 bp or more, 8 bp or more, 9 bp or more, 10 bp or more, 11 bp or more, 12 bp or more, 13 bp or more, 14 bp or more, 15 bp or more, 16 bp or more, 17 bp or more, 18 bp or more, or 19 bp or more. In some embodiments, the length of the seed sequence is 31 bp or less, 30 bp or less, 29 bp or less, 28 bp or less, 27 bp or less, 26 bp or less, 25 bp or less, 24 bp or less, 23 bp or less, 22 bp or less, or 21 bp or less. In some embodiments, the seed sequence is 20 bp in length.

[0039] In some embodiments, the predetermined level is approximately 4.4.

[0040] In a fourth aspect, the instant invention provides a method for evaluating efficacy of diet intervention or disease treatment in a subject having type 2 diabetes mellitus, comprising the steps of
[0041] a) collecting a fecal sample from the subject before and during the diet intervention or disease treatment;
[0042] b) analyzing DNA extracted from the fecal sample to determine abundance of each reference CAG selected from the group consisting of CAG ID Nos.: 1-15,

Aᵢ (abundance of CAG No.: i)=number of reads aligned to CAG No.: i/(size of CAG No.: i×number of total reads);
[0043] c) calculating ESP-index of each sample using the calculated abundance data,

ESP-Index=In(Heip×10¹⁰×Σᵢ₌₁¹⁵Aᵢ), wherein Heip=(e^{H}−1)/14, H=−Σᵢ₌₁¹⁵AᵢInAᵢ; and
[0044] e) determining that the subject responds positively to the diet intervention or disease treatment if the ESP-index is increased in the sample collected during the diet intervention or disease treatment,
   wherein, CAG NOs.:1-15 comprise nucleic acid sequences set forth in SEQ ID NOs.: 1-191, 192-326, 327-593, 594-835, 836-885, 886-960, 961-1097, 1098-1264, 1265-1433, 1434-1684, 1685-1833, 1834-1979, 1980-2163, 2164-2447, and 2448-2783, respectively.

[0045] In some embodiments, analysis of DNA in step b) comprises the steps of obtaining the DNA sequences and aligning the obtained DNA sequences with the nucleic acid sequences set forth in SEQ ID Nos.: 1-2783.

[0046] In some embodiments, obtaining of DNA sequences comprises the steps of obtaining raw sequence reads in the sample and processing the raw sequence reads to obtain qualified sequence reads.

[0047] In some embodiments, the raw sequence reads are obtained by a PCR-based high-throughput sequencing technique. In some embodiments, the raw sequence reads are obtained by Illumina sequencing.

[0048] In some embodiments, the processing of the raw sequence reads comprises removal of adapters, trimming of sequences at 3′end until reaching the first nucleotide with a quality threshold higher than 20, removal of short sequences, and removal of sequences aligned to human genome. In some embodiments, the short sequences are 59 bp or less in length.

[0049] In some embodiments, the alignment of DNA sequences uses seed-and-extend strategy. In some embodiments, the sequences with no mismatch in seed sequence are used to determine the abundaned of each reference CAG in step b). In some embodiments, the length of the seed sequence is 4 bp or more, 5 bp or more, 6 bp or more, 7 bp or more, 8 bp or more, 9 bp or more, 10 bp or more, 11 bp or more, 12 bp or more, 13 bp or more, 14 bp or more, 15 bp or more, 16 bp or more, 17 bp or more, 18 bp or more, or 19 bp or more. In some embodiments, the length of the seed sequence is 31 bp or less, 30 bp or less, 29 bp or less, 28 bp or less, 27 bp or less, 26 bp or less, 25 bp or less, 24 bp or less, 23 bp or less, 22 bp or less, or 21 bp or less. In some embodiments, the seed sequence is 20 bp in length.

[0050] In one embodiment, during the diet intervention or disease treatment, the fecal sample is collected one week, two weeks, three weeks, and/or four weeks after the diet intervention or disease treatment begins.

[0051] In some embodiments, the subject is determined to respond positively to the diet intervention or disease treatment when the ESP-index becomes close to or higher than a predetermined level during the diet intervention or disease treatment. In some embodiments, the predetermined level is 4.4.

[0052] In a fifth aspect, the instant application provides a microbe, comprising one or more of a bacteria corresponding-CAG NO.1-15, wherein CAG NO.1-15 comprises nucleic acids set forth in SEQ ID NO.: 1-191, 192-326, 327-593, 594-835, 836-885, 886-960, 961-1097, 1098-1264, 1265-1433, 1434-1684, 1685-1833, 1834-1979, 1980-2163, 2164-2447, and 2448-2783 respectively.

[0053] Other features and advantages of the instant disclosure will be apparent from the following detailed description and examples, which should not be construed as limiting. The contents of all references, Genbank entries, patents and published patent applications cited throughout this application are expressly incorporated herein by reference.

### BRIEF DESCRIPTION OF THE DRAWINGS

[0054] FIG. 1 shows the profile of the clinical trial in the Example.

[0055] FIGS. 2A, 2B, and 2C show that a high dietary fibre diet alters the gut microbiota and improves glucose homeostasis in patients with type 2 diabetes. (A) Changes in the circulating parameters of glucose homeostasis (HbAlc, fasting blood glucose, glucose and insulin area-under-curve (AUC) in meal tolerance test (MTT)). Data were presented as percentage changes from Day 0 (±standard errors). Two-way repeated measures analysis of variance with a Tukey's post-hoc test was used for intra- and inter-group comparisons. *P <0.05, **P <0.01 and ***P <0.001 vs Day 0 of the same group; #P <0.05, ##P <0.01 and ###P <0.001 vs U group at the same time point. N=27 for W and n=16 for U group for all analyses except n=15 in the U group for MTT. (B) Changes in the overall gut microbial structure. Principal coordinate analysis was performed based on the Bray-Curtis distance for 422 bacterial co-abundance gene groups. (C) Changes in the gut microbiota diversity (gene richness). The change in gene counts was adjusted to 31 million mapped reads per sample. Data were shown as the mean±S.E.M. Boxes showed the medians and the interquartile ranges, the whiskers denoted the lowest and highest values that are within 1.5 times the IQR from the first and third quartiles, and outliers were shown as individual points. Wilcoxon matched-pair signed-rank tests (two-tailed) were used to analyse each pair-wise comparison within each group. Mann-Whitney test was used to analyse differences between the W and U groups at the same time point. *P <0.05, **P <0.01 and ***P <0.001 (Adjusted by Benjamini & Hochberg, 1995). W=acarbose plus WTP diet; U=acarbose plus usual care (control).

[0056] FIGS. 3A, 3B, 3C, and 3D show that transplantation of dietary fibre-supplemented gut microbiota improves glucose tolerance in mice. (A) Body weight, (B) fasting blood glucose (FBG), (C) oral glucose tolerance test (2 weeks after transplantation) and (D) fasting circulating insulin of germ-free mice receiving faecal microbiota transplantation. The transplant material was derived from representative donors, one from W and one from U group, both before (“Pre”; Day 0) and after (“Post”; Day 84) the intervention. Mice receiving transplant: n=5 for W-Pre, W-Post, U-Pre and n=4 for U-Post. *P <0.05, **P <0.01 and ***P <0.001 using one-way ANOVA with a Tukey's post-hoc test for intra- and inter-group comparisons. W=acarbose plus WTP diet; U=acarbose plus usual care (control).

[0057] FIGS. 4A and 4B show heat maps indicating the abundance (log-transformed) of intervention-responsive bacteria within the (A) W or (B) U group (Wilcoxon matched-pair signed-rank tests were used to compare the data on Day 0 and Day 28. P <0.05, Adjusted by Benjamini & Hochberg, 1995). The bacteria were clustered with a Spearman correlation coefficient and ward linkage. For W, n=27; for U, n=16.

[0058] FIGS. 5A, 5B, 5C, 5D, and 5E show potential ecosystem service providers (ESPs) and the co-excluded detrimental bacteria. The distribution networks of genes involved in production of short-chain fatty acids (SCFAs), H₂S and indole in 154 high quality draft genomes are shown for genomes that (A) decreased or (B) increased in abundance following intervention in the W group, or that (C) decreased or (D) increased in abundance following intervention in the U group. The histograms next to each grey circle (high quality draft genome identified as a bacterial strain) represent the mean abundance (log-transformed) at Day 0 and Day 28. Changes in bacterial abundance were determined according to those in FIG. 4. Lines connecting the grey circles to other shapes indicate genes involved in specific activities. Brown triangles indicate genes involved in H₂5 production; purple parallelograms indicate genes involved in indole production; green and blue shapes indicate genes involved in SCFA production. Acetic acid synthesis: formate-tetrahydrofolate ligase. Butyric acid synthesis: butyryl-CoA:acetate CoA transferase (But); butyryl-CoA:acetoacetate CoA transferase (Ato; consisting of alpha (AtoA) and beta (AtoD) subunits); butyrate kinase (Buk); butyryl-CoA: 4-hydroxybutyrate CoA transferase (4Hbt). Propanoic acid synthesis: propionateCoA-transferase/propionyl-CoA: succinate-CoA transferase (PCoAt). (E) Changes of the abundance of ecosystem service providers. The size and colour of the circles indicated the average abundance and coefficient of variance of the abundance of the strain respectively. W=acarbose plus WTP diet; U=acarbose plus usual care (control).

[0059] FIGS. 6A, 6B, and 6C show that high fibre diet reduces endotoxin load and inflammation. (A) Lipopolysaccharide binding protein. (B) White blood cell count. (C) TNF-a. A two-way repeated measures analysis of variance with the Tukey post-hoc test was used for intra- and inter-group comparisons. * P <0.05, ** P <0.01, *** P <0.001 vs Day 0 of the same group; #P <0.05, ##P <0.01, ###P <0.001 vs U group at the same time point. N=27 for W and n=16 for U group. W=acarbose plus WTP diet; U=acarbose plus usual care (control).

[0060] FIGS. 7A, 7B, 7C, and 7D show correlation between abundance of the bacterial CAGs and alleviation of phenotypes of type 2 diabetes mellitus. (A-B) Heat maps calculated from Spearman correlation coefficients between abundance of bacterial CAGs and levels of clinical variables in the W (A) and U groups (B) *=P <0.05, **=P <0.01 (Adjusted by Benjamini & Hochberg, 1995). The bacteria were clustered with a Spearman correlation coefficient and ward linkage based on their amounts. (C) In GUT2DM project, the post-intervention level of HbAlc was negatively correlated (Spearman correlation coefficient (SCC)=−0.4901, P=1.0253e⁻¹¹) with the Gut Microbiota Modulation (GMM) index of the 15 EPSs that increased divided by the abundance of the 49 that decreased in the training dataset (27 patients in the W group and 16 in the U group). (D) In the testing QIDONG clinical trial, the post-intervention level of HbAlc was also negatively correlated (SCC=−0.4006, P=4.53e⁻⁷) with the Gut Microbiota Modulation (GMM) index of the 15 EPSs and their 49 co-excluding bacteria in a testing data set of 74 patients who all received a high-fibre diet without acarbose for 3 months.

[0061] FIGS. 8A, 8B, 8C, 8D, and 8E show that abundance and diversity of the ecosystem service providers (ESPs) correlate with alleviation of disease phenotypes in patients with type 2 diabetes. (A) Heat maps for correlation between abundance of individual ESP and clinical variables. *P <0.05 and **P <0.01. (B) Changes in the ESP-Index (ln(Heip×10¹⁰×Σ_{i32 1}¹⁵ Aᵢ), where Aᵢ is the abundance of ESPᵢ). (C) Correlation between the ESP-index (Day 0 and Day 84) and HbAlc (Day 0 and Day 84) in the GUT2D study. N=43. (D) Correlation between the ESP-index (Day 0 and Day 28) and HbAlc (Day 0 and Day 84) in the GUT2D study. N=43. (E) Correlation between the ESP-index (Day 0 and Day 84) and HbAlc (Day 0 and Day 84) in the QIDONG study. N=71. All correlation coefficients were calculated using the method described by Bland and Altman (16). W=acarbose plus WTP diet; U=acarbose plus usual care (control).

### DETAILED DESCRIPTION OF THE INVENTION

[0062] In order that the present disclosure may be more readily understood, certain terms are defined here. Additional definitions are set forth throughout the detailed description.

[0063] The term “co-abundance gene group” or “CAG” refers to groups of genes that correlate in terms of abundance to randomly picked seed genes. Segregating a metagenome into groups of genes that have similar abundance allows the identification of biological entities like prokaryotes and phages, as well as small genetic entities representing co-inherited clonal heterogeneity.

[0064] The term “size of CAG No.: i” used herein refers to the length of CAG No.: i, i.e., the number of nucleotides of CAG No.: i.

[0065] The term “biomarker” refers to a measurable indicator of some biological state or condition. The biomarker used herein is the CAG, the abundance data of which may be indicative of T2D.

[0066] The term “Receiver operating characteristic curve” or “ROC curve” used herein refers to a graphical plot that illustrates the diagnostic ability of a binary classifier system as its discrimination threshold is varied. The ROC curve is created by plotting the true positive rate against the false positive rate at various threshold settings. The true-positive rate is also known as sensitivity, recall or probability of detection. The false-positive rate is also known as the fall-out or probability of false alarm and can be calculated as (1-specificity). The ROC curve is thus the sensitivity as a function of fall-out.

[0067] The term “Youden's index” refers to the difference between the true positive rate and the false positive rate. Maximizing this index allows to find, from the ROC curve, an optimal cut-off point independently from the prevalence. The index is represented graphically as the height above the chance line.

[0068] The term “area under the ROC curve” or “AUC” used herein is used to indicate the accuracy of a test which separates a group being tested into those with and without the disease in question.

[0069] In the present invention, with the scanning of whole gut microbiome, several CAGs have been found to be prevalently distributed in samples from the T2D patients that are responsive to high fibre diet intervention. Among these CAGs, 15 are upregulated while 49 are downregulated. The GMM-index and the ESP-index calculated based on the abundances of these or some of these CAGs in a fecal sample may be used to assess the presence or the risk of development of T2D in a subject. Alternatively, the abundance changes of these or some of these CAGs may be used to monitor response to disease treatment or diet intervention in a patient having T2D. Both methods can be performed in an efficient, accurate and patient friendly manner.

[0070] The present invention provides a method for assessing the presence or the risk of development of type 2 diabetes mellitus in a subject, comprising the steps of:
[0071] a) collecting a fecal sample from the subject;
[0072] b) analyzing DNA extracted from the fecal sample to determine abundance of each reference CAG selected from the group consisting of CAG ID Nos.: 1-64,

Aᵢ (abundance of CAG No: i)=number of reads aligned to CAG No.: i/(size of CAG No.: i×number of total reads);
[0073] c) calculating GMM-index of each sample using the calculated abundance data,

GMM-index=log (Σᵢ₌₁¹⁴Aᵢ/Σᵢ₌₁₆⁶⁴Aᵢ); and
[0074] d) determining that the subject suffers from or at a risk of developing type 2 diabetes mellitus if the GMM-index is close to or lower than a predetermined level.

[0075] The instant invention provides a method for evaluating efficacy of diet intervention or disease treatment in a subject having type 2 diabetes mellitus, comprising the steps of
[0076] a) collecting a fecal sample from the subject before and during the diet intervention or disease treatment;
[0077] b) analyzing DNA extracted from the fecal sample to determine abundance of each reference CAG selected from the group consisting of CAG ID Nos.: 1-64,

Aᵢ (abundance of CAG No: i)=number of reads aligned to CAG No.: i/(size of CAG No.: i×number of total reads);
[0078] c) calculating GMM-index of each sample using the calculated abundance data,

GMM-index=log (Σᵢ₌₁¹⁵Aᵢ/Σᵢ₌₁₆⁶⁴Aᵢ); and
[0079] e) determining that the subject responds positively to the diet intervention or disease treatment if the GMM-index is increased in the sample collected during the diet intervention or disease treatment.

[0080] For the ESP-index aspect, the the present invention provides a method for assessing the presence or the risk of development of type 2 diabetes mellitus in a subject, comprising the steps of:
[0081] a) collecting a fecal sample from the subject;
[0082] b) analyzing DNA extracted from the fecal sample to determine abundance of each reference CAG selected from the group consisting of CAG ID Nos.: 1-15,

Aᵢ (abundance of CAG No.: i)=number of reads aligned to CAG No.: i/(size of CAG No.: i×number of total reads);
[0083] c) calculating ESP-index of each sample using the calculated abundance data,

ESP-Index=ln(Heip×10¹⁰×Σᵢ₌₁¹⁵Aᵢ), wherein Heip=(e^{H}−1)/14, H=−Σᵢ₌₁¹⁵AᵢlnAᵢ and
[0084] d) determining that the subject suffers from or at a risk of developing type 2 diabetes mellitus if the ESP-index is close to or lower than a predetermined level,

[0085] The instant invention further provides a method for evaluating efficacy of diet intervention or disease treatment in a subject having type 2 diabetes mellitus, comprising the steps of
[0086] a) collecting a fecal sample from the subject before and during the diet intervention or disease treatment;
[0087] b) analyzing DNA extracted from the fecal sample to determine abundance of each reference CAG selected from the group consisting of CAG ID Nos.: 1-15,

Aᵢ (abundance of CAG No.: i)=number of reads aligned to CAG No.: i/(size of CAG No.: i×number of total reads);
[0088] c) calculating ESP-index of each sample using the calculated abundance data,

ESP-Index=ln(Heip×10¹⁰×Σᵢ₌₁¹⁵Aᵢ), wherein Heip=(e^{H}−1)/14, H=−Σᵢ₌₁¹⁵AᵢlnAᵢ and
[0089] e) determining that the subject responds positively to the diet intervention or disease treatment if the ESP-index is increased in the sample collected during the diet intervention or disease treatment.

[0090] In the present invention, CAG NOs.:1-15 comprise nucleic acid sequences set forth in SEQ ID NOs.: 1-191, 192-326, 327-593, 594-835, 836-885, 886-960, 961-1097, 1098-1264, 1265-1433, 1434-1684, 1685-1833, 1834-1979, 1980-2163, 2164-2447, and 2448-2783, respectively, and CAG NOs.:16-64 comprise nucleic acid sequences set forth in SEQ ID NOs.: 2784-2961, 2962-3130, 3131-3525, 3526-3747, 3748-3863, 3864-4068, 4069-4212, 4213-4393, 4394-4532, 4533-4891, 4892-4979, 4980-5116, 5117-5320, 5321-5464, 5465-5781, 5782-6279, 6280-6646, 6647-6954, 6955-7178, 7179-7613, 7614-7758, 7759-8046, 8047-8491, 8492-8546, 8547-9971, 9972-10099, 10100-10392, 10393-10502, 10503-10694, 10695-10986, 10987-11089, 11090-11262, 11263-11466, 11467-11704, 11705-12034, 12035-12113, 12114-12341, 12342-12454, 12455-12664, 12665-12825, 12826-13042, 13403-13500, 13501-13726, 13727-13949, 13950-14014, 14015-14290, 14291-14403, 14404-14686, and 14687-14850, respectively.

[0091] To determine abundance of each reference CAG of the present invention, any method well known in the art can be used. In some embodiments, DNA sequences are obtained from the fecal samples and then aligned with the CAG sequences. In some embodiments, seed-and-extend strategy is used in the alignment of DNA sequences, and the sequences with no mismatch in seed sequences are used to determine the abundance of each reference CAG. In some embodiments, the seed sequence is 20 bp in length.

[0092] The obtaining of DNA sequences comprises obtaining raw sequence reads in the sample and processing the raw sequence reads to obtain qualified sequence reads. In some embodiments, the raw sequence reads are obtained by a PCR-based high-throughput sequencing technique. In some embodiments, the raw sequence reads are obtained by Illumina sequencing. The processing of the raw sequence reads may be performed as known in the art. In some instances, the processing comprises removal of adapters, trimming of sequences at 3′end until reaching the first nucleotide with a quality threshold higher than 20, removal of short sequences, and removal of sequences aligned to human genome. In some embodiments, the short sequences are 59 bp or less in length.

[0093] In the method for assessing the presence or the risk of development of T2D in a subject, the subject is determined to suffer from or at a risk of developing T2D if the GMM-index or the ESP-index is close to or lower than a predetermined level.

[0094] The predetermined level can be set according to laboratory or clinical data. Even a level is predetermined, the hospital or the doctor may adjust it according to a subject's age, sex, physical conditions and the like.

[0095] In a preferred embodiment of the present invention, the predetermined level is approximately -1.028883 for the GMM-index. In a preferred embodiment of the present invention, the predetermined level is approximately 4.4 for the ESP-index. These specific levels are determined based on the Receiver operating characteristic curves, which have been created using data described hereinafter in the Examples. As described above, the Receiver operating characteristic curve is a graphical plot that illustrates the diagnostic ability of a binary classifier system as its discrimination threshold is varied. And Youden's index refers to the difference between the true positive rate and the false positive rate. Youden's index is often used in conjunction with Receiver Operating Characteristic (ROC) analysis. The index is defined for all points of an ROC curve, and the maximum value of the index may be used as a criterion for selecting the optimum cut-off point when a diagnostic test gives a numeric rather than a dichotomous result. In the present invention, the binary number is set as 1 when HbAlc>=6.5%. Accordingly, the GMM-index is −1.028883 when Youden's index reaches the maximum; and the ESP-index is 4.4 when Youden's index reaches the maximum. That is, if a subject is determined to have a GMM-index higher than −1.028883, he/she may have an HbAlc level lower than 6.5%, with the accuracy being 90.48%; if a subject is determined to have a GMM-index lower than or equal to −1.028883, he/she may have an HbAlc level higher than 6.5%, with the accuracy being 44.75%. For the ESP-index, if a subject is determined to have an ESP-index higher than 4.4, he/she may have an HbAlc level lower than 6.5%, with the accuracy being 92.11%; if a subject is determined to have an ESP-index lower than or equal to 4.4, he/she may have an HbAlc level higher than 6.5%, with the accuracy being 45.52%.

[0096] For the method of monitoring response to disease treatment or diet intervention in a subject having T2D, the subject is determined to response positively to the disease treatment or diet intervention when the GMM-index or the ESP-index is increased or becomes close to or higher than a predetermined level in some embodiments during the disease treatment or diet intervention. The predetermined level is preferred to be approximately −1.028883 for the GMM-index or approximately 4.4 for the ESP-index, which are determined based on the respective ROC curve and the Younden's index, as described above.

[0097] The instant application also provides a microbe, comprising one or more of a bacteria corresponding-CAG NO.1-15, wherein CAG NO.1-15 comprises nucleic acids set forth in SEQ ID NO.: 1-191, 192-326, 327-593, 594-835, 836-885, 886-960, 961-1097, 1098-1264, 1265-1433, 1434-1684, 1685-1833, 1834-1979, 1980-2163, 2164-2447, and 2448-2783 respectively.

### EXAMPLES

[0098] Patients and Methods

[0099] GUT2D Study

[0100] The randomized, open-label, parallel-group clinical trial for patients with type 2 diabetes mellitus (T2DM) was approved by the Ethics Committee at Shanghai General Hospital, Shanghai Jiao Tong University School of Medicine (No. 2014KY086), and the study was conducted in accordance with the principles of the Declaration of Helsinki. All participants provided written informed consent at the beginning of the trial. The trial was registered in the Chinese Clinical Trial Registry (No. ChiCTR-TRC-14004959). The design and progress of the clinical trial were shown in FIG. 1.

[0101] Recruited participants were 35-70-year-old Chinese Han patients with T2DM (6.5%≤HbAlc≤12.0%). The major exclusion criteria included: type 1 diabetes mellitus; pregnancy; lactation; an intent to become pregnant during the course of the study; severe diabetic complications (diabetic retinopathy, diabetic neuropathy, diabetic nephropathy and diabetic foot); severe hepatic diseases (including chronic persistent hepatitis, liver cirrhosis or the co-occurrence of positive hepatitis B virus surface antigen and abnormal hepatic transaminase (serum concentrations of alanine transaminase or aspartate transaminase >2.5× the upper limit of normal)); continuous antibiotic use for >3 days within 3 months prior to enrolment; continuous weight-loss drug use for >1 month; gastrointestinal surgery (except for appendicitis or hernia surgery); a severe mental illness in last 6 months; receiving drug therapy to treat cholecystitis, peptic ulcers, urinary tract infection, acute pyelonephritis, urocystitis or hyperthyreosis; pituitary dysfunction; severe organic diseases, including cancer, coronary heart disease, myocardial infarction or cerebral apoplexy; infectious diseases, including pulmonary tuberculosis and AIDS; and alcoholism.

[0102] During a 2-week run-in period, all antidiabetic drugs except for insulin secretagogues or insulin glargine were terminated to avoid potential effects of those drugs on the gut microbiota. Before the interventions (Day 0), all participants received health education about T2DM and a baseline evaluation. A meal-based food-frequency questionnaire and a 24-hour dietary record were used to calculate baseline nutrient intake based on China Food Composition 2009 (17). The participants were randomly assigned to receive acarbose plus usual care for T2DM (U group) or acarbose plus a diet formula (the WTP diet) based on whole grains, traditional Chinese medical foods and prebiotics (W group) for 84 days.

[0103] Usual care consisted of standard dietary and exercise advice according to Chinese diabetes guidelines for T2DM (2013 edition). The WTP diet included three ready-to-consume pre-prepared foods, Formula No. 1 (2), Formula No. 2 (2) and Formula No. 8 (manufactured by Perfect (China) Co. Zhongshan, China). For W group, the WTP diet was administered in combination with an appropriate amount of vegetables, fruits and nuts according to the dietician's advice. The intake of macronutrients was balanced according to standard nutritional requirements for age provided by the Chinese Dietary Reference Intakes (DRIs) and recommended by the Chinese Nutrition Society (CNS, 2013). Formula No. 1 was a pre-cooked mixture of 12 component materials from whole grains and traditional Chinese medicine (TCM) food plants that are rich in dietary fiber, including adlay (Coix lachrymal-jobi L.), oat, buckwheat, white bean, yellow corn, red bean, soybean, yam, peanut, lotus seed, and wolfberry, which was prepared in the form of canned gruel (370 g wet weight per can). Each contained 100 g of ingredients (59 g carbohydrate, 15 g protein, 5 g fat, and 6 g fiber) and 336 kcal (70% carbohydrate, 17% protein, 13% fat). Formula No. 2 was a powder preparation for infusion (20 g per bag) containing bitter melon (Momordica charantia) and oligosaccharides, including fructo-oligosaccharides and oligoisomaltoses. The detailed composition of Formula No. 8 is shown in Table 1 below. For each meal, ≥360 g of Formula No. 1 was consumed as the staple food, and Formulas No. 2 and No. 8 were consumed at 10 g and 15 g, respectively. The dietary record for each subject was used to calculate nutrient intake based on the China Food Composition 2009³⁹ (Table 2). Acarbose was administered using an oral dose of 100 mg, three times a day. Participants recorded their treatment regimens for diet, body weight, drug use and adverse events. Furthermore, self-monitored daily fasting blood glucose (FBG) and 2-hour postprandial blood glucose (2 h PBG) were recorded, and doses of background treatments (insulin secretagogues or insulin glargine) were adjusted according to improvements in symptoms and daily two-point glycaemic profiles (Table 3).

TABLE 1
The components of the ready-to-consume Formula No. 8 used in the WTP diet

| | Formula8^{a} | | Formula8^{a} |
|---|---|---|---|
| Ash content (g/100 g) | 0.45 | Inositol (mg/kg) | 90 |
| Water (g/100 g) | 80.5 | linoleic acid (g/100 g) | 0.28 |
| Protein (g/100 g) | 3.63 | α-linolenic acid (g/100 g) | 0.01 |
| Fat (g/100 g) | 1.2 | docosahexenoic acid (g/100 g) | / |
| Carbohydrate | 12.5 | eicosatetraenoic acid (g/100 g) | / |
| Fibre (g/100 g) | 1.7 | Cytidine (mg/100 g) | / |
| Soluble fibre (g/100 g) | 0.2 | Uridine (mg/100 g) | / |
| Insoluble fibre (g/100 g) | 1.6 | Carnine (mg/100 g) | / |
| Vitamin A (mg/kg) | / | Guanosine (mg/100 g) | / |
| Vitamin D (mg/kg) | / | Adenosine (mg/100 g) | / |
| Vitamin E (mg/kg) | 2.80 | Choline (mg/100 g) | 10 |
| Vitamin K1 (μg/100 g) | / | L-carnitine (mg/kg) | / |
| Vitamin B1 (mg/100 g) | / | Taurine (mg/100 g) | 1 |
| Vitamin B2 (mg/100 g) | 0.082 | Molybdenum (mg/kg) | 1 |
| Vitamin B6 (μg/100 g) | / | Cobalt (mg/kg) | 1 |
| Vitamin B12 (μg/100 g) | / | Aspartic acid (g/100 g) | 0.01 |
| Vitamin C (mg/100 g) | <0.3 | Threonine (g/100 g) | / |
| Biotin (μg/100 g) | / | Serine (g/100 g) | 0.01 |
| Niacin (μg/100 g) | 220 | Glutamic acid (g/100 g) | 0.01 |
| VitaminB5 (μg/100 g) | / | Proline (g/100 g) | / |
| Folate (μg/100 g) | 11.1 | Glycine (g/100 g) | 0.01 |
| Sodium (mg/kg) | 67 | Alanine (g/100 g) | 0.01 |
| Potassium (mg/kg) | 18000 | Valine (g/100 g) | 0.01 |
| Copper (mg/kg) | 1 | Cystine (g/100 g) | 0.01 |
| Magnesium (mg/kg) | 337 | Methionine (g/100 g) | 0.01 |
| Iron (mg/kg) | 9 | Isoleucine (g/100 g) | / |
| Zinc (mg/kg) | 5 | Leucine (g/100 g) | / |
| Manganese (mg/kg) | 5 | Tyrosine (g/100 g) | / |
| Calcium (mg/kg) | 158 | Phenylalanine (g/100 g) | / |
| Phosphorus (mg/100 g) | 74.2 | Histidine (g/100 g) | 0.01 |
| Iodine (mg/kg) | 0.12 | Trytophan (g/100 g) | 0.01 |
| Chlorine (mg/100 g) | 32.6 | Lysine (g/100 g) | / |
| Selenium (mg/kg) | 0.016 | Arginine (g/100 g) | / |
| Chromium (mg/kg) | / | Total amino acid | 0.1 |
| | | (g/100 g) | |
| Fluorine (mg/kg) | <0.5 | Energy (kJ/100 g) | 333 |

^{a}Ready-to consume dry powder.

TABLE 2
Daily energy and macronutrient intake before
and during the dietary intervention^{a}

| Group | Daily intake | Day 0 | Day 84 |
|---|---|---|---|
| W | Total Energy | 1924.93 ± 129.67 | 1874.87 ± 71.10 |
| | (kcal) | | |
| (N = | Fat (g) | 63.48 ± 4.57 | 58.32 ± 4.04 |
| 24) | Fat % | 31.03 ± 1.86 | 27.54 ± 1.07 |
| | Protein (g) | 81.52 ± 5.90 | 74.58 ± 3.67 |
| | Protein % | 16.94 ± 0.63 | 15.88 ± 0.49 |
| | Total | 268.77 ± 25.67 | 282.72 ± 9.63 |
| | carbohydrate | | |
| | (g) | | |
| | Total | 52.03 ± 2.16 | 56.58 ± 1.09 |
| | carbohydrate | | |
| | % | | |
| | Total | 12.12 ± 1.24 | 37.10 ± 1.90***^{###} |
| | fibre (g) | | |
| | Soluble | 4.59 ± 0.47 | 14.61 ± 0.69***^{###} |
| | fibre (g) | | |
| U | Total | 2063.54 ± 161.42 | 1954.48 ± 142.80 |
| | Energy | | |
| | (kcal) | | |
| (N = | Fat (g) | 70.44 ± 8.30 | 62.41 ± 5.14 |
| 14) | Fat % | 30.70 ± 2.39 | 29.16 ± 1.57 |
| | Protein (g) | 87.31 ± 9.14 | 79.32 ± 9.00 |
| | Protein % | 16.65 ± 0.88 | 15.76 ± 0.86 |
| | Total | 285.53 ± 24.85 | 284.94 ± 21.45 |
| | carbohydrate | | |
| | (g) | | |
| | Total | 52.65 ± 2.44 | 55.08 ± 1.63 |
| | carbohydrate | | |
| | % | | |
| | Total | 15.43 ± 2.43 | 16.06 ± 1.95 |
| | fibre (g) | | |
| | Soluble | 5.85 ± 0.92 | 6.09 ± 0.74 |
| | fibre (g) | | |

^{a}Data are means ± sem.
***P < 0.001 versus W Day 0;
^{###}P < 0.001 versus U Day 84.
Two-way repeated measures analysis of variance with the Bonferroni post hoc test was used for the intra- and inter-group comparisons.

TABLE 3
Antidiabetic Medication use^{a}

| Group | ID | trial | Drug usage (except acarbose) during the intervention |
|---|---|---|---|
| W | DBH1W001 | Repaglinide, 2 mg, tid | None |
| | DBH1W002 | None | None |
| | DBH1W003 | Glimepiride, 2 mg, qd | None |
| | DBH1W004 | None | None |
| | DBH1W005 | Glimepiride, 1 mg, qd | None |
| | DBH1W006 | None | None |
| | DBH1W007 | Insulin, 16U IH before | Insulin, I6U IH before breakfast, 15U IH before dinner, |
| | | breakfast, 15U IH before | day −14 to day 9; Insulin, 10U IH before breakfast, |
| | | dinner | 8U IH before dinner, day 10 to day 11; Insulin, |
| | | | 6U IH before breakfast, 6U IH before dinner, day 12 to |
| | | | day 15; Insulin, 6U IH before breakfast, day 16 to day 20; |
| | | | None, day 21 to the end of the intervention |
| | DBH2W002 | Insulin, 24U IH before | Insulin, 24U IH before breakfast, 16U IH before dinner, |
| | | breakfast, 16U IH before | day −14 to day 3; Insulin, 24U IH before breakfast, |
| | | dinner | 12U IH before dinner, day 4 to day 5; Insulin, |
| | | | 22U IH before breakfast, 12U IH before dinner, day 6 to |
| | | | day 14; Insulin, 20U IH before breakfast, 12U IH before |
| | | | dinner, day 15 to day 46; Insulin, 18U IH before breakfast, |
| | | | 10U IH before dinner, day 47 to day 51; Insulin, |
| | | | 16U IH before breakfast, 10U IH before dinner, |
| | | | day 47 to the end of the intervention |
| | DBH2W004 | Gliclazide, 80 mg, qd | Gliclazide, 80 mg, qd, day −14 to day 23; None, |
| | | | day 24 to the end of the intervention |
| | DBH2W006 | Gliclazide, 80 mg, qd | Gliclazide, 80 mg, qd day −14 to day 12; None, |
| | | | day 13 to the end of the intervention |
| | DBH2W007 | Gliquidone, 30 mg, qd | None |
| | DBH2W008 | Repaglinide, 2 mg, tid | Repaglinide, 2 mg, bid, day −14 to day 7; |
| | | | Repaglinide, 2 mg, qd, day 8 to day 9; |
| | | | None, day 10 to the end of the intervention |
| | DBH2W009 | Metformin, 500 mg, qd, | None |
| | | Repaglinide, 2 mg, qd | |
| | DBH2W011 | Glimepiride, 2 mg, qd | Glimepiride, 2 mg, qd, day −14 to day 10; |
| | | | None, day 11 to the end of the intervention |
| | DBH2W012 | None | None |
| | DBH2W013 | Metformin, 250 mg, bid; | Glipizide, 5 mg, qd, day −14 to day 17; |
| | | Glipizide, 5 mg, qd | None, day 18 to the end of the intervention |
| | DBH2W015 | Glimepiride, 2 mg, qd; | Glimepiride, 1 mg, qd |
| | DBH2W016 | Gliclazide, 160 mg, qd; | Gliclazide, 80 mg, qd |
| | | Acarbose, 50 mg, qd; | |
| | | Metformin, 500 mg, qd | |
| | DBH2W017 | Metformin, 500 mg, tid; | Glimepiride, 1 mg, bid |
| | | Glimepiride, 1 mg, bid | |
| | DBH2W018 | Glipizide, 5 mg, qd, | Glipizide, 5 mg, qd, day −14 to day 7; |
| | | | None, day 8 to the end of the intervention |
| | DBH2W019 | Metformin, 250 mg, qid; | Gliclazide, 240 mg, qd, day −14 to day 9; |
| | | Gliclazide, 240 mg, qd; | Gliclazide, 160 mg, qd, day 10 to day 15; |
| | | | Gliclazide, 80 mg, qd, day 16 to the end of the |
| | | | intervention |
| | DBH3W001 | Tang Niao Le (a kind of | None |
| | | Chinese patent medicine) | |
| | DBH3W002 | None | None |
| | DBH3W003 | None | None |
| | DBH3W004 | Metformin, 500 mg, tid | None |
| | DBH3W006 | None | None |
| | DBH3W007 | Gliclazide, 160 mg, qd | None |
| U | DBH2U001 | Gliclazide, 80 mg, bid | None |
| | DBH2U002 | Insulin, 16U IH before | Insulin, 12U IH before breakfast, |
| | | breakfast, I4U IH before | 10U IH before dinner |
| | | dinner | |
| | DBH2U003 | Metformin, 500 mg, tid | None |
| | DBH2U004 | Gliclazide, 80 mg, bid | Gliclazide, 80 mg, bid, day −14 to day 6); |
| | | | Gliclazide, 80 mg, qd, day 62 to the end of the |
| | | | intervention |
| | DBH2U006 | Gliclazide, 120 mg, tid | Gliclazide, 80 mg, bid, day −14 to day 30; |
| | | | Gliclazide, 80 mg, qd, day 31 to day 32; |
| | | | None, day 33 to the end of the intervention |
| | DBH2U007 | None | None |
| | DBH2U008 | Metformin, 500 mg, qd; | Gliclazide, 80 mg, qd |
| | | Gliclazide, 80 mg, qd | |
| | DBH2U009 | None | None |
| | DBH2U010 | Insulin, 10U IH before | Insulin, 10U IH before breakfast, |
| | | breakfast, 10U IH before | 10U IH before dinner, day −14 to day 7; |
| | | dinner | Insulin, 8U IH before breakfast, |
| | | | 8U IH before dinner, day 8 |
| | | | to the end of the intervention |
| | DBH2U011 | None | None |
| | DBH2U012 | None | None |
| | DBH2U013 | Repaglinide, 2 mg, qd | None |
| | DBH2U014 | Gliclazide, 160 mg, qd | Gliclazide, 160 mg, qd |
| | DBH2U015 | Insulin, 34U IH before | Insulin, 18U IH before breakfast, |
| | | breakfast, 22U IH before | 14U IH before dinner, day −14 to day 29; |
| | | dinner | Insulin, 20U IH before breakfast, |
| | | | 18U IH before dinner, day 30 |
| | | | to the end of the intervention |
| | DBH2U016 | Insulin, 22U IH before | Insulin, 22U IH before breakfast |
| | | breakfast | |
| | DBH3U001 | Metformin, 500 mg, qd; | Glimepiride, 2 mg, qd, day −14 to day 37; |
| | | Glimepiride, 2 mg, qd | None, day 38 to the end of the intervention |

^{a}The intervention began following a 2-week washout period of the above regular medication. Day −14 indicated the beginning of the washout period.

[0104] Biological samples, anthropometric data and clinical laboratory analysis were obtained at baseline and every 28 days during the intervention. Venous blood samples were collected after 10 h of overnight fasting, and participants then underwent a 3-h oral glucose tolerance test. All participants ingested 75 g of glucose, and blood samples were obtained at 30, 60, 120 and 180 min. Blood samples were centrifuged at 3,000×g for 20 min after standing at room temperature for 30 min, to obtain serum. Faeces and morning urine were collected on the same day. Serum, urine and faecal samples were collected, immediately transferred to dry ice and stored at −80° C. within 5 h for additional analysis.

[0105] Bioclinical parameters were determined at the Shanghai General Hospital, Shanghai Jiao Tong University School of Medicine, Shanghai, China.

[0106] QIDONG study

[0107] This clinical trial, conducted at the Qidong People's Hospital (Jiangsu, China), examined the effect of a high dietary fibre diet in free-living conditions in a cohort of healthy individuals, and those with prediabetes and clinically diagnosed T2DM (QIDONG; Chinese Clinical Trial Registry: ChiCTR-IPC-14005346). The baseline phenotypic characteristics of the T2DM sub-group were largely similar to those in GUT2D. Participants with T2DM were randomised to receive either the WTP diet (without acarbose; n=71) or usual care (n=33) for 84 days. Blood and faecal samples were collected at baseline and at the end of the intervention, in which HbAlc and gut microbial profile were determined respectively.

[0108] Statistical Analysis

[0109] Statistical analyses were conducted using the SPSS Statistics 17.0 Software Package (SPSS Inc., Chicago, USA). A two-way repeated measures analysis of variance with Tukey's post-hoc test (two-tailed) was used for intragroup and intergroup comparisons of the bioclinical parameters and inflammation-related markers, respectively. Pearson Chi-square tests (two-tailed) were used to analyse variations in gender and the proportion of participants whose HbAlc was below 7.0% or 6.5% in the two groups. A Mann-Whitney U test (two-tailed) was used to analyse variations in other characteristics between the two groups at baseline.

[0110] Gut Microbiota Transplantation

[0111] Faecal samples were collected from two female participants (2W009 from the W group and 2U004 from the U group) at Day 0 and Day 84. These two donors were selected systemically—changes in the gut microbial profile after the interventions were determined in all participants, those with non-significant changes were excluded, then one participant from each group was randomly selected as the representative donor. Each faecal sample (0.5 g) was diluted in 25 mL of a sterile Ringer working buffer (9 g/L of sodium chloride, 0.4 g/L of potassium chloride, 0.25 g/L of calcium chloride dihydrate and 0.05% (w/v) L-cysteine hydrochloride) in an anaerobic chamber (80% N2:10% CO2:10% H2). The faecal material was suspended by thorough vortexing (5 min) and settled by gravity for 5 min. The clarified supernatant was transferred to a clean tube, and an equal volume of 20% (w/v) skimmed milk (LP0031, Oxoid, UK) was added. The inoculum was freshly prepared on the day of experiment, with the rest stored at −80° C. until the second inoculation.

[0112] All animal experimental procedures were approved by the Institute of Zoology Institutional Animal Care and Use Committee of the Chinese Academy of Sciences and were conducted according to the committee's guidelines. Weaned, germ-free female C57BL/6J mice (n=30) were maintained in flexible-film plastic isolators under a regular 12-h light cycle (lights on at 06:00). Sampling of faeces, food, water and padding were collected before transplantation. Normal saline was added into the samples with sufficient mixing. The mixtures were then cultured using the spread plate method on: 1) LB agar, Brain Heart Infusion agar and Thioglycolate agar under aerobic condition at 37° C. for aerobic bacteria; 2) on Gifu anaerobic medium (GAM) agar under anaerobic condition at 37° C. for anaerobic bacteria; and 3) on Modified Martin Agar and Tryptone Soya agar under aerobic condition at 25-28° C. for fungi. All cultures were examined under optical microscope after 1, 2, 4, 7 and 14 days.

[0113] Mice were fed ad libitum with a sterile normal chow diet (SLAC, Shanghai China). Surveillance for bacterial contamination was performed by periodic bacteriological examinations of faeces, food and padding. At 6 weeks of age, the germ-free mice were housed in individual cages and randomly divided into four groups (each group was kept in an individual isolator). After 2 weeks of acclimation, the four groups of mice were oral gavaged with 100 μL of one of the following faecal suspension inoculum: 2W009 at Day 0 (W-Pre; n=10), 2W009 at Day 84 (W-Post; n=10), 2U004 at Day 0 (U-Pre; n=5) and 2U004 at Day 84 (U-Post; n=5). Inoculation was repeated on the next day to reinforce the microbiota transplantation. On Day 14, after 8 h of overnight fasting, all mice underwent a 2-h oral glucose tolerance test (OGTT). Following oral gavage of D-glucose (2 g/kg body weight), blood samples were collected from the tail vein at 0, 15, 30, 60, 90 and 120 min with glucose levels determined using a glucometer (Accu-Chek® Performa).

[0114] Gut Microbiota Analysis

[0115] 1. Metagenomic sequencing DNA was extracted from faecal samples as previously described (2), and were sequenced using an Illumina HiSeq 3000 at GENEWIZ Co. (Beijing, China). Cluster generation, template hybridisation, isothermal amplification, linearisation, and blocking denaturing and hybridisation of the sequencing primers were performed according to the workflow specified by the service provider. Libraries were constructed with an insert size of approximately 500 bp followed by high-throughput sequencing to obtain paired-end reads with 150 bp in the forward and reverse directions.

[0116] 2. Data quality control Prinseq (3) was employed to: 1) trim the reads from the 3′ end until reaching the first nucleotide with a quality threshold of 20; 2) remove read pairs when either read was <60 bp or contained “N” bases; and 3) de-duplicate the reads. Reads that could be aligned to the human genome (H. sapiens, UCSC hg19) were removed (aligned with Bowtie2 (4) using —reorder—no-hd—no-contain—dovetail (seed sequence set as 20 bp in length)).

[0117] 3. De novo non-redundant metagenomic gene-catalogue construction and gene-abundance-profile calculations High-quality paired-end reads from each sample were used for de novo assembly with IDBA_UD (5) into contigs of at least 500 bp. Genes were predicted using MetaGeneMark (6). A non-redundant gene catalogue of 4,893,833 microbial genes was constructed with CH-HIT using the parameters “-c 0.95 -aS 0.9”. High quality reads were mapped onto the gene catalogue using SOAPaligner (7). Aligned results were sampled and downsized to 31 million per sample. The soap.coverage.script was used to calculate gene-length normalised base counts in each downsizing step. The sampling procedure was repeated 30 times, and the mean value of the abundance was used in further analyses.

[0118] 4. Co-abundance gene groups (CAGs) A Canopy-based clustering algorithm (8) was used to bin all genes based on their abundance across all samples with default parameters. Raw CAGs were removed in the subsequent analyses: 1) genes that had a Spearman correlation <0.7 with the canopy profile; 2) 90% of the total canopy profile was distributed in no more than three samples; 3) CAGs with less than three genes. Large CAGs with >700 genes were regarded as bacterial CAGs for further analyses. The principal component analyses of the bacterial CAGs based on the Bray-Curtis distance and Procrustes were performed with QIIME (9).

[0119] 5. Assembly and taxonomic assignment of bacterial CAGs De novo assembly for each of the 180 prevalent bacterial CAGs was performed as previously described (2). Briefly, the CAG- and sample-specific reads were achieved by aligning all high-quality reads to the CAG-specific contigs, followed by de novo assembly with Velvet (10). We adopted the six criteria for high-quality draft genome assembly from the Human Microbiome Project (HMP) (http://www.hmpdacc.org/reference_genomes/finishing.php) and checkM (11) to assess the quality of the assemblies: 1) 90% of the genome assembly must be included in contigs >500 bp; 2) 90% of the assembled bases must be at >5x reads coverage; 3) the contig N50 must be >5 kb; 4) scaffold N50 must be >20 kb; 5) average contig length must be >5 kb; and 6) >90% of the core genes must be present in the assembly. We used two methods to identify the phylogenetic taxonomy of the CAGs whose high-quality draft genomes met at least five HMP criteria. First, a phylogenetic tree was constructed with the 154 bacterial CAGs with high quality assemblies, 352 reference gastrointestinal tract genomes from the HMP DACC database and the server's inbuilt database using the CVtree3.0 web server (12), which applies a composition vector to perform phylogenetic analysis. Then we also applied SpecI (13), which is a method to group organisms into species clusters based on 40 universal and single-copy phylogenetic marker genes, to delineate the bacterial CAGs. CAGs of low quality were aligned to the 7,991 reference genomes from the NCBI database at both the protein (BLASTP) and nucleotide (BLASTN) levels. The alignments were filtered with query coverage (>70%) and the E-value (<1e-10 at the nucleotide and <1e-5 at the protein level). Based on the taxonomic assignment threshold that was previously described (14), the CAGs were assigned to the species or genus levels (species level: 90% of genes can be mapped to the species' genome with >95% identity at the DNA level; genus level: 80% of genes can be mapped to a genus with >85% identity at both the DNA and protein levels).

[0120] 6. GMM-Index and ESP-Index Calculation

[0121] The high-quality reads from each sample of the GUT2D and/or QIDONG dataset were aligned to the 64 high quality draft genomes with Bowtie2 with the parameters —reorder—no-hd—no-contain—dovetail (seed sequence set to be 20 bp in length). The alignments with YT:Z:DP (indicates the read was part of a pair and the pair aligned discordantly) were filtered. GMM-index=log (Σᵢ₌₁¹⁵Aᵢ/Σᵢ₌₁₆⁶⁴Aᵢ), wherein, Aᵢ (abundance of CAG No: i)=number of reads aligned to CAG No.: i/(size of CAG No.: i×number of total reads). ESP-Index=ln (Heip×10¹⁰×Σᵢ₌₁¹⁵Aᵢ) , wherein Heip=(e^{H}−1)/14, H=−Σᵢ₌₁¹⁵AᵢlnAᵢ, Aᵢ (abundance of CAG No.: i)=number of reads aligned to CAG No.: i/(size of No.: i×number of total reads).

[0122] 7. Statistical Analysis Intervention-responsive bacterial CAGs were identified using Wilcoxon matched-pair signed-rank tests (two-tailed) with adjustments according to Benjamini & Hochberg (18). The P value adjustment was performed in MATLAB® programs with the “mafdr” command. Random Forest analyses were performed with the R package “randomForest”, and cross-validation was performed with “rfcv”.

[0123] 8. Data Availability

[0124] The raw pyrosequencing and Illumina read data for all samples have been deposited in the European Nucleotide Archive (ENA) under accession number of PRJEB1455 (GUT2D Study) and PRJEB15179 (QIDONG Study).

### Example 1 A High-Fibre Intervention Significantly Improves Bioclinical Parameters in Patients with T2DM

[0125] Almost all bioclinical parameters improved in both the W and U groups during the first month of the intervention. The level of glycated haemoglobin (HbAlc), the primary outcome in the current clinical trial, decreased significantly over time from baseline levels in both groups (FIG. 2A). By Day 84, reductions in HbAlc were greater in the W group than in the U group. At the end of the intervention (Day 84), the adequate-glycaemic-control rate (the proportion in the cohort with HbAlc <7%) was significantly higher in the W group than in the U group (88.9% versus 50.5%, P=0.005). The more stringent goal-achievement rate (the proportion of the cohort with HbAlc <6.5%) showed a similar (although non-significant) trend (51.9% versus 25.0%, P=0.084). Patients in the W group also lost a significantly greater percentage of body weight and demonstrated significantly improved lipid profiles and inflammation levels, compared with the U group. Levels of glucagon-like peptide-1 (GLP-1) and peptide YY (PYY), which can stimulate insulin secretion and inhibit glucagon secretion, increased significantly over time in the W group but not in the U group.

### Example 2 High-Fibre Interventions Modulate the Global Structure of the Gut Microbiota in Patients with T2DM

[0126] Shotgun metagenomic sequencing was performed on 172 faecal samples collected at 4 time points (Days 0, 28, 56 and 84). From a non-redundant gene catalogue of 4,893,833 microbial genes, 422 co-abundance gene groups (CAGs; binned using a Canopy-based algorithm (19)) were identified as distinct bacterial genomes. Based on Bray-Curtis distances from the 422 bacterial CAGs, the overall structure of the gut microbiota (as indicated by principal co-ordinate analysis) showed significant alteration from Day 0 to Day 28 in both groups with no further changes afterwards (FIG. 2B). At the end of the intervention (Day 84), significant difference (P=0.0056) in the gut microbial structure between the W and U groups reflected a distinct modulatory effect of the WTP diet on the gut microbiota. There was a notable reduction in gene richness (the number of genes identified per sample) in both groups, which followed a similar trend as in the overall microbial structure, i.e. significant reductions at Day 28 and remained stable for the rest of the intervention (FIG. 2C). This overall reduction of gene richness challenges the current notion that higher diversity implies better health (20). However, the gene richness at Day 28 was significantly higher in the W as compared to the U group and a similar trend was observed at Day 56 and Day 84 (FIG. 2C), consistent with better metabolic outcomes in the W group. Further, a Procrustes analysis with all bioclinical variables combined and the 422 bacterial CAGs showed that structural changes in the gut microbiota were associated with improvements in the clinical outcomes during the intervention (P <0.0001 from 999 Monte-Carlo simulations). Taken together, it was showed that the WTP diet induced significant changes in the global structure of the gut microbiota and these were correlated with improved overall clinical outcomes in patients with T2DM.

### Example 3 Transplantation Indicates a Causal Contribution of the Gut Microbiota to Alleviation of T2DM

[0127] To establish causality between diet-altered gut microbiota and improvements in glucose metabolism, the pre- and post-intervention (Day 0 and Day 84 respectively) gut microbiota from participants in the W and U groups were transplanted into germ-free C57BL/6J mice. After 14 days of transplantation, mice receiving the post-intervention microbiota from the W group had a significantly lower body weight (FIG. 3A). These mice also had the lowest fasting and postprandial blood glucose when compared to those that were transplanted with the pre-intervention microbiota from the W group or the microbiota from the U group at either time points, an effect appeared to be associated with fasting insulin levels (FIG. 3B-D). The transferable effect of our interventions via microbial transplantation confirms that the high dietary fibre-induced changes in the gut microbiota causatively contribute to improved glucose homeostasis in patients with T2DM.

### Example 4 Specific Strains Respond to Fibre Intake

[0128] High-quality draft genomes were assembled to identify the bacterial species/strains that drive the gut-specific effects of dietary fibre on alleviating the T2DM phenotype. One hundred and fifty-four high-quality draft genomes were assembled from CAGs that were shared by >20% of the samples. The percentage of total reads per sample that was mapped to these high-quality draft genomes was 57% (±11%), which represented both the prevalent and dominant gut bacteria in the entire cohort. 141 of the 154 high quality draft genomes harbor at least one of the key genes for SCFA production, and can be considered as SCFA producers. Out of the 154 high-quality draft genomes, 64 bacteria were selected for further analysis because: 1) they are the intervention-responsive CAGs identified by Wilcoxon matched-pair signed-rank tests as significantly altered by the intervention at Day 28 in W or U group (FIG. 4); and 2) they harbor at least one of the genes for SCFA, H₂S or indole biosynthesis. All 15 genomes promoted in the W group harbor at least one of the genes for SCFA biosynthesis and genes for acetic acid production (including the 3 that were also enriched in the U group) and 5 of them also possess the capacity for butyrate biosynthesis (FIGS. 5B and 5D). This is consistent with the largely similar increase in faecal acetate and the enrichment of the acetic acid synthetic pathway in both groups but a distinct effect of the WTP diet on inducing butyrate production. The enrichment of these 15 genomes mostly peaked at Day 28 (FIG. 5E) that also accord with the pattern we observed in the overall gut microbiota, which further support these bacterial strains as the key drivers of structural shifts in the ecosystem.

[0129] These 15 bacteria, including Bifidobacterium spp., Lactobacillus spp., Eubacterium spp. and Faecalibacterium prausnitzii may serve the important purpose of replenishing acetate and butyrate in the W group and thus are likely the ecosystem service providers (ESPs) for that essential function. Efficient energy production from carbohydrates and tolerance to low pH may explain why these bacteria had a competitive edge over the other SCFA producers. A good example here is Bifidobacterium spp. which, taking advantage of its “bifid-shunt” pathway (21), is able to produce more ATP molecules and acetic acid comparing to other acetate producers. Intriguingly, despite the increase in the overall genetic capacity for SCFA production, most of SCFA producers were significantly diminished by our interventions (FIGS. 5A and 5C) that clearly suggest that not all bacteria that possess the functional genes can respond to substrate supplementation and become a provider of the function that the host needs. We envisage that this is at least partly driven by changes in gut luminal pH as some SCFA producers are known to be highly pH-sensitive, such as Bacteroides thetaiotaomicron and B. vulgatus (12). Accordingly, our data challenge the consensus in the microbiome field that assumes physiological relevance of gut bacteria to the host primarily based on gene-based functional predictions.

[0130] Among the 49 bacteria that were significantly down-regulated in either of the two groups were those that harbor genes for synthesising lipopolysaccharides, indole and H₂S. Again, in accordance with the gene-centric pathway analysis, this indicates that the reduced capacity for producing metabolically detrimental compounds is likely to contribute to the beneficial effects of the high dietary fibre diet. Reduced endotoxin production has been shown to alleviate inflammation and restore insulin sensitivity (22, 23). Lipopolysaccharide binding protein, the surrogate marker for endotoxin load, and inflammatory markers were lower in W than the U group, indicating the alleviation of inflammation probably due to reduced endotoxin production (FIG. 6). Decreased abundance of indole- and H₂S-producing bacteria ameliorate the inhibition on GLP-1 production (24-26), which accords with greater postprandial GLP-1 response observed in the W group. Taken together, it was showed that diminishing bacteria that produce detrimental metabolites lead to clinically significant improvements in the hosts.

[0131] The 15 ESPs mentioned above, CAG0023, CAG0033, CAG0037, CAG0045, CAG0046, CAG0064, CAG0079, CAG0106, CAG0133, CAG0153, CAG0155, CAG0207, CAG0224, CAG0236 and CAG0409, were designated as CAG NO.: 1 to 15, respectively, in the present invention. The 49 bacteria that were significantly downregulated, CAG0010, CAG0012, CAG0015, CAG0017, CAG0018, CAG0021, CAG0022, CAG0028, CAG0031, CAG0032, CAG0034, CAG0035, CAG0048, CAG0051, CAG0057, CAG0058, CAG0063, CAG0067, CAG0075, CAG0076, CAG0080, CAG0082, CAG0086, CAG0090, CAG0093, CAG0100, CAG0111, CAG0116, CAG0122, CAG0128, CAG0131, CAG0134, CAG0138, CAG0173, CAG0178, CAG0185, CAG0202, CAG0221, CAG0246, CAG0248, CAG0255, CAG0264, CAG0281, CAG0292, CAG0312, CAG0331, CAG0341, CAG0365, and CAG0390, were designated as CAG NO.: 16 to 64, respectively, in the present invention.

[0132] A Gut Microbiota Modulation (GMM)-index for each sample was calculated based on the abundance data of the 15 ESPs and also the 49 that decreased following intervention. GMM-index=log (Σᵢ₌₁¹⁵Aᵢ/Σᵢ₌₁₆⁶⁴Aᵢ), wherein, Aᵢ (abundance of CAG No: i)=number of reads aligned to CAG No.: i/(size of CAG No.: i×number of total reads). This GMM-index was significantly negatively correlated with the post-intervention level of HbAlc across all patients (Spearman correlation coefficient (SCC)=−0.4901, P=1.0253e⁻¹¹), indicating that shifts in the composition of the contributory bacteria in the microbiota, prompted by increased MACs, were associated with the primary clinical outcome (FIG. 7C).

[0133] An ESP (ecosystem service provider)-index was calculated based on the abundance data of the 15 ESPs only that increased following intervention. ESP-Index=ln (Heip×10¹⁰×Σᵢ₌₁¹⁵Aᵢ), wherein Heip=(e^{H}−1)/14, H=−Σᵢ₌₁¹⁵AᵢlnAᵢ, Aᵢ (abundance of CAG No.: i)=number of reads aligned to CAG No.: i/(size of No.: i×number of total reads). The ESP-index followed a similar trajectory in both the W and U groups, i.e., a dramatic increase from baseline to Day 28 and remained at a similar level for the rest of the intervention, but the index was significantly higher in the W group at each of the post-intervention time points (Days 28, 56 and 84; FIG. 8B). The significant negative correlation between HbAlc and ESP-index at baseline and at the end of intervention (Day 0 and Day 84; r=−0.6731; P=5.55e⁻⁰⁷; FIG. 8C) confirmed the role of these ESPs in regulating host glucose homeostasis. While clinical outcomes such as HbAlc continued to decrease over the duration of intervention (FIG. 2A), the ESP-index plateaued from Day 28 onwards (FIG. 8B). Our data clearly indicate that dietary fibre-induced enrichment of the ESPs preceded significant changes in clinical outcomes. When ESP-index at Day 28 (instead of Day 84) was used with HbAlc at Day 84 to plot the post-intervention data points while keeping the exact same set of baseline data points as in FIG. 8C, a similar negative correlation was observed between HbAlc and ESP-index (r=−7434; P=7.485⁻⁰⁸; FIG. 8D). This suggests that ESP-index at Day 28, indicating the enrichment of the 15 ESPs at this early time point, may be informative on the eventual treatment outcomes that occur much later.

### Example 5 The Ecosystem Service Providers are Shared by Different T2DM Patient Cohorts

[0134] Finally, to find out whether the ecosystem service providers identified in GUT2D trial are shared by other T2DM patient cohorts, another independent clinical trial (QIDONG) was conducted in which 74 patients with T2DM received the WTP diet without acarbose for 3 months. Levels of HbAlc improved significantly from baseline after the intervention. Fecal samples were collected at baseline and end of each month for all the patients. 148 samples were metagenomically sequenced at an average depth of 14.1G. More than half of the sequenced reads were mapped onto the 154 high-quality draft genomes that were assembled in the GUT2DM project, showing that the corresponding prevalent gut bacteria were common to different cohorts of Chinese patients with T2DM. The 15 ESPs and the 49 bacteria that were co-excluded by promotion of these ESPs identified in GUT2D were present in patients of the QIDONG trial. Notably, using the second trial (without acarbose) to provide a test dataset, the GMM-index based on the 15 ESPs and their co-excluding bacteria had a similar significant negative correlation with the primary outcome (the level of HbAlc) (FIG. 7D).

[0135] Further, using the same set of 15 SCFA providers that were identified as positively responsive to dietary fibre in GUT2D, there was a similar negative correlation between the ESP-index and HbAlc in this QiDong intervention group (FIG. 8E).

[0136] Receiver operating characteristic curves (ROC) were built according to GMM-indexes from the 172 faecal samples collected in GUT2D study and the 148 samples collected in QIDONG study, with the leave-one-out cross-validation area under ROC (AUC) achieved 0.7052, wherein the binary number was set as 1 when HbAlc>=6.5%, and the specificity and sensitivity were 90.48% and 44.75%, respectively. The GMM-index was −1.028883 when Youden's index reached the maximum.

[0137] Further, receiver operating characteristic curves (ROC) were built according to ESP-indexes from the 172 faecal samples collected in GUT2D study, with the leave-one-out cross-validation area under ROC (AUC). achieved 0.70, wherein the binary number was set as 1 when HbAlc>=0.65%, and the specificity and sensitivity were 92.11% and 45.52%, respectively. The ESP-index was 4.4 when Youden's index reaches the maximum.

### REFERENCES

[0138] 1. E. K. Costello, K. Stagaman, L. Dethlefsen, B. J. Bohannan, D. A. Relman, The application of ecological theory toward an understanding of the human microbiome. Science 336, 1255-1262 (2012).
[0139] 2. A. Koh, F. De Vadder, P. Kovatcheva-Datchary, F. Backhed, From Dietary Fiber to Host Physiology: Short-Chain Fatty Acids as Key Bacterial Metabolites. Cell 165, 1332-1345 (2016).
[0140] 3. J. Qin et al., A metagenome-wide association study of gut microbiota in type 2 diabetes. Nature 490, 55-60 (2012).
[0141] 4. F. H. Karlsson et al., Gut metagenome in European women with normal, impaired and diabetic glucose control. Nature 498, 99-103 (2013).
[0142] 5. K. Forslund et al., Disentangling type 2 diabetes and metformin treatment signatures in the human gut microbiota. Nature 528, 262-266 (2015).
[0143] 6. N. Larsen et al., Gut microbiota in human adults with type 2 diabetes differs from non-diabetic adults. PloS one 5, e9085 (2010).
[0144] 7. A. Soare et al., The effect of the macrobiotic Ma-Pi 2 diet vs. the recommended diet in the management of type 2 diabetes: the randomized controlled MADIAB trial. Nutrition & metabolism 11, 39 (2014).
[0145] 8. M. Chandalia et al., Beneficial effects of high dietary fiber intake in patients with type 2 diabetes mellitus. The New England journal of medicine 342, 1392-1398 (2000).
[0146] 9. F. M. Silva, C. K. Kramer, D. Crispim, M. J. Azevedo, A high-glycemic index, low-fiber breakfast affects the postprandial plasma glucose, insulin, and ghrelin responses of patients with type 2 diabetes in a randomized clinical trial. The Journal of nutrition 145, 736-741 (2015).
[0147] 10. T. Chen et al., Fiber-utilizing capacity varies in Prevotella- versus Bacteroides-dominated gut microbiota. Sci Rep 7, 2594 (2017).

[0148] 011. H. J. Flint, S. H. Duncan, K. P. Scott, P. Louis, Links between diet, gut microbiota composition and gut metabolism. Proc Nutr Soc 74, 13-22 (2015).
[0149] 12. S. H. Duncan, P. Louis, J. M. Thomson, H. J. Flint, The role of pH in determining the species composition of the human colonic microbiota. Environmental microbiology 11, 2112-2122 (2009).
[0150] 13. H. J. Flint, K. P. Scott, P. Louis, S. H. Duncan, The role of the gut microbiota in nutrition and health. Nature reviews. Gastroenterology & hepatology 9, 577-589 (2012).
[0151] 14. G. Wu et al., Genomic Microdiversity of Bifidobacterium pseudocatenulatum Underlying Differential Strain-Level Responses to Dietary Carbohydrate Intervention. mBio 8, (2017).
[0152] 15. C. Zhang et al., Dietary Modulation of Gut Microbiota Contributes to Alleviation of Both Genetic and Simple Obesity in Children. EBioMedicine 2, 966-982 (2015).
[0153] 16. J. M. Bland, D. G. Altman, Calculating correlation coefficients with repeated observations: Part 1—Correlation within subjects. BMJ 310, 446 (1995).
[0154] 17. Yuexin Yang, G. W., Xingchang Pang. China Food Composition (Book 1.2nd Edition). (Beijing Medical University Press, 2009).
[0155] 18. P. D. Cani et al., Gut microbiota fermentation of prebiotics increases satietogenic and incretin gut peptide production with consequences for appetite sensation and glucose response after a meal. The American journal of clinical nutrition 90, 1236-1243 (2009).
[0156] 19. H. B. Nielsen et al., Identification and assembly of genomes and genetic elements in complex metagenomic samples without using reference genomes. Nature biotechnology 32, 822-828 (2014).
[0157] 20. E. Le Chatelier et al., Richness of human gut microbiome correlates with metabolic markers. Nature 500, 541-546 (2013).
[0158] 21. K. Pokusaeva, G. F. Fitzgerald, D. van Sinderen, Carbohydrate metabolism in Bifidobacteria. Genes Nutr 6, 285-306 (2011).
[0159] 22. L. Sun et al., A marker of endotoxemia is associated with obesity and related metabolic disorders in apparently healthy Chinese. Diabetes care 33, 1925-1932 (2010).
[0160] 23. P. D. Cani et al., Metabolic endotoxemia initiates obesity and insulin resistance. Diabetes 56, 1761-1772 (2007).
[0161] 24. M. T. Yokoyama, J. R. Carlson, Microbial metabolites of tryptophan in the intestinal tract with special reference to skatole. The American journal of clinical nutrition 32, 173-178 (1979).
[0162] 25. C. Chimerel et al., Bacterial metabolite indole modulates incretin secretion from intestinal enteroendocrine L cells. Cell reports 9, 1202-1208 (2014).
[0163] 26. V. Bala et al., Release of GLP-1 and PYY in response to the activation of G protein-coupled bile acid receptor TGRS is mediated by Epac/PLC-epsilon pathway and modulated by endogenous H2S. Frontiers in physiology 5, 420 (2014).

The application's sequence listing, which the Patent Office published only in electronic form, follows.

SEQUENCE LISTING (14850 sequences)

SEQ ID NO: 1 - DNA, 1099 bp, Unknown
  gut microbiota DNA sequence
gagatgagtgaattagaaaagctgcgtgctgaagttaaaattttaaaagcagagaaagcacgtgctgaaatggaggcatctttcttaaaaaaactcgaagaaatagagaggaggcggggctaagcctgattcgtcatgaacatatatatcaggcaatcaaagaagaacacaaagaacataattatccaatcgctgcactttgtaaacttggcagagtttccagagccgcttactataaatggttgcatagagaaattcctgaaagtgaacaaaagaatagactcattgctgatgagatagaaaagattcatacagagtcaccggataaaggctatcgaaggatcagagatgatctggaacgatatcatggtattgatgtaaacgataaacgtgtgctacgcatttgccgtaaacttaatataaaatcaactatcaagtattctaacaacgggtgcacaagacaggctgcaaaccctcagtatatagctgaaaacatacttaatcgcgagttcactgccaaagcaccaaatgaaaaatggctcactgatgtgacagaattccattattatattgggatggaaaagcgtaaagtttatctgagtacaatactggatctatatgatagacggattgtttcgtatgttattcgtgataagaacaacaatgctttggtgtttgatacggtagataatgctttacttagaaatcctggtgcgcagccactgtttcacagtgacaggggattccaatatacgaacaggatatttcatacaaaacttataaatgctggaataacgcaaagcatgtcgcgagttgctaaatgtatcgacaatggaccaatggaaggcttttggggaattctgaagagagagcgatactatggaaaacgattcactgatagaggtactctcgtaaaaatgatcgaagattatatagattactacaataataaacgcttgcaaaggaatctcggaattttaacaccaatggaaaaacacgaaatttacttgcaagctgcataaaactgccagcagataaatttctactggcaggaaaaatttatattttttcaattgtctacttgacggggagcggttca

SEQ ID NO: 2 - DNA, 17156 bp, Unknown
  gut microbiota DNA sequence
gattggtcaaatggtatgataggggtctccaaaacctttggtgggagttcgattctctcatcccctgtttccttaggagcctgaatgccttcaagtcaaggcgttcaggatttttttgtgtcacaagtaaaaacggctactaaaacccatatttgctgagtttgtagccgtcttactggcaatcgcaatttaatatcttaatcaactgctgcaatgattttcactaaccgtaaaaaaatgaacaatatctgtatcataacgatccttcaacaaagcttctccatctctatatcctaatgcaattactgaaaatggaatcagcacattttcacattttaaatactcagctaataatttcactcgcatttcatccggataaaagccaagccatacaccatcaagatcctcttcctttgccgcaagcaatactccataggagcaaattgccatgttctgcacccaccagctgtttccctgcttatctatccattctttttccttcctaagacatggaataatcagtacagatgcattttttgccggaaccgcatatgggctcatctgtgaaattttttcttttgccgcatcttctgtaactacaataaattcccattccctagaatttccagcactaggagatgccattgcatatttcagaatacgcatgattttttccttggtcaccaccttctttctaaattttcgtacagaaatgcgttttgataaaattgattttttttcttcatttttcaaaaatgcttcaacttttggtgaaagtagtgtaacactgtatgtcacgatctccgaatgtcccggcttcaaaacatgaataccttttttctgatacggatcatagccttcttcctctgatgctgctattccgttacacggttcaatgcatatataagaagcattaggcaccgaccaaatagaaaaatggctgaatccaggaaagtcaattataattttatgctgattttttccactagctaaacaaacacgctgagaagaaagccccttaaagttccatgctccatttacaaacatctctgaatgtaacgggattttctttgtctgcataaggcatggtacaggttttcctattgttcttccattcaacaatggatatctattggccgtttcttccttctcaaactctaaataataatcttcataaacctctcctttaaaaagtggaacacaaaaaccaatatgttctccaatagaatatggcatttctttttccgattcattgtttataaattgttccacatgaagaatatttcgatcaagactatatactattgttagtgaaaaatcaaaaggatacattgtctgtatttctttgtttgaatgcaacgtacatatcatttctgtatccttacaatgaatttcaaacttttctaaccttccaaatccatgacatggcatttcatattcttttccgtctataacatatttgttatctttccagtcaccaatagcaggaaataaaagcggtgaatgatctgaccaatatttaggatccccttgccatatatattgcaaatcatccattttattccgtaaggaacagatttctgctcctatttctgaaacaatcagttccagatattcattttgaatgatatacaaacttatcctccaattctctccaaatattccgcaatctttcttccctgttctctctgtgcttccgtgattaatgcattaggtttttttaattcaccgcactgaacccccattatttgtaatgtagccttaagtgtagggaaaagaccagtggcattcagcatatcctctacatcgttaatatttctctgatacttcaaagcagttttataatctttatcctgtaccgcatcataaagtttttttgccaaccgtccagtaagattaaaagtacctcctattgctccatctgttcccattaaaagagcatggtacaatatatcgtcaaagcctgtaaaaagaatagcatccgggcattttactctcaccctgtcaagaagataataatcattgtgggtaaacttcaatcccacaatattaggatgcttcaaaagccgcaccaacatactctccgtaaagtccacctttgaaaaagaaggaattacataaatcatcagcggaatagaaatgtgatccgctatataaatataataatccactatttcctcactgttgtatccatggaaaatcggtgcgatcatagctaccctggaataaccttcttcttttgcacaagctcccaactcaagaacttcttcaaaagcaagtgcagaaatattagcaaccagatcaacttttcctgcagtttcatctgccacaatgtgatataattctttcatcgctgccgttgacattttatatcgttcacccattgtaccgcccacgaatagtccttttacaccacaatgatctatattatgtctaactatttccctgattcctctttcgtccaaagaaccatcttcctgaaaagcagtaaccattgctgcataaattcccttcatttccatactcctaaaaaactcctttcaaaatataatttttttcctgggttaattcttccaatgttctggaaattccttctcgtccaataccactctttttatatccaccaaatgccaaatccggtattctatatgcgctgcctccattgattacatttccggcagtttccagcctagacgcaatagaaattgctcttcctacattcctgctaaagattgcccctgataaaccataacaggactgatttgctatttctatggcttcttcttcagaatgaattgttataattggaaataccggtccaaaaatttccatatcttttgcgacatccatttcagccgttacacaatccaaaattgttggttcaaagaatgccctaccaaatctttttcctcctgtcacgcaaattgcaccctgtgcaatgcaatgctctacctgtttttctacctgttctgctgcatcctcactgataagacatcctacttgtgtttgtggatccataggatctccgattttcattccattgattttgtccttcaactttttaacgaattcatctttcaatgtttcatgaatcaaaaaccgtttgctagcgcagcatatctgccctgcatttcccattcgacttcctacagcctcatttactgccagttcaagatctgcatcttccaaaacaataaacgaatcgttccctccaagttctaagaatactctggttaaattgtctgctgcttttttataaatgctaattccaacttctgtacttccggtcatagaaattgcattgattccttgatgtccacaaagataattgccaaccactcttccctttcccgtcacgacctgtacagcacatttaggaactccagcttcataaagaatctgcgtcattcgaataattgccaatggattatatgacggtggtttgataatcacagagtttcctgccactaatgcagacatcactttttgtgaatacaaatcaactggataattaaaaggaataataatcaccattactccaagcggttctctcctagtaaaaataatatccttttcttcgtttccattggtgcttccacccggaatacaatttccatataaatgcgccgccatttcacaatatcctcgtgttacttttgtacacacatcaatctcgtcttctgcttctcttaatgtctttccagtttctgccgctaacaattctgagatttcatgtcttctggattcataaagctggatatatttataaataactgcatttctgtttgcttgagaaagtccgccccatattttaagcccttcctgagcagctttcacagcctcatccatcaattccactggcacatctggaacggtatctatacattctccattaaaagggtttattacatttattgctggcaattctttgccaatatctttaccatttatattaatcagcatttcattttcctcctttataggcgtttaagttttaagagtgagtacggaagcgcatcacttaacgtcattatgtaaagatttcctttcgaatctccacagaatccatgagtcattagggaggacatataaaagccaagctgtgccactacatttacatcataatcgaaaatagtaattcctccacgctcacctacataaatatactgatcatctgcccatatctccgacggctgatataatccttctgagcaatatgcaatcagttccccatcatccgtaaatacctgaatactgtttccttctcgatcagcaacccaaatacggtcttttttatccaaccacagactgtgcataacgaaaaatttaccaggtcccattccaggttctccccaagtattgagtaggcttccatcattggagaatttatgtaaagcacaatttgcataaccatcacttacaaaaatatcgcctttagatgtttctactgcacaggttgggcgattaaaaggaggtgctgcacgcttaatagttttaatactttcgataaaacaccagtctttttggaatggtaaattcataggaatcatatttcccattctatgcatatttctccaaatgcctgcatcataaccgctatcactaggtttattataatttccaaaatctcgaattaactctccatctgttgtaagttcacgaatcacatgcgtattggaatcagcacagagaagtgtgccatgatttgttacaaacacagaatgaataaactgaaacagatttttcccaaaatctcttatataatttccatttgaatctactacaacaattggtctctctctatctctggtagcaagataaatattgtcattttcatcacaacatccagtacaaattggcgtatatcttaaaaagtctggaagtgtcaaaaagtctttatccaattcataggcaaattcaccacatttaaaaatcgtctgggcgattaagtctctgtccctatttgcctttatcattttcatagtgttataccctccatcttcgtttaaaattacaccaagtcttaaactcttcatcttctttaggacgattctctggaattccagggagtgatgcagctccatctacaaccaaatttgcccccgttatataagatgcttgatcacttgccaaaaaagcaacggcattcgcaatatcttctggtgttcccatccgctctaatggcagctgtttccaaagattatctaaatcttcaatctcctgctcacaaaccccctcttctcgcatttcctcactggttctcacacgaataggtcctggtgaaacacaatttgcacgaattccataaggtgccagatccaatgcaaaggtctgaattgcgcggataagtccagcctttaatccaccatataattcatcatatgggaatgcacggattcctctgcaagaagagataaaaataatatttcctttaatattattttctcccataattcttccagcttctctggctgccataagataagaacgaaaatccaaattaattaaaaaatcaattgttttttcatccatttcataaatgctatttaccaaagactgtccagcattacatatcagaagatccaaaccacctagttcatcataagccgtccttacaaattcttctgctgttcctttttcattcaatgcaaactgatgcatatagcactttaccgcatatttttccgttacttcctccactaatgcttctgcctgtgcttctcctctctcagaactgtaggtaaaagcaatatcataaccttcttttgccattcgtcttacaatgccacggccgattccacggcttccaccagtaattgctaattttttactcattcattttctccttttcttattcgcaccatacgcaagttgcctcaggtatagcacatttatcactttttttaatttcaccagtttcttgactaaatcgaaaactaattacatctccagaatactgatttgccatcagcacataacttccatctgatgttatactaaacatacgaggatggcacccacctgactccaccactttcttcagcaccaacaaaccatttttgtcaatctcaaatattgttaaaaacccctgtttctctttggctgctccccaggtgcgagttcctgccaaaagatattttccatttgaagttacagcaatctctcctgcaatatattcatttttcatatcttttgaaagaagtgagattctctgaatttcttccagaccgttctcttctgaatacaaatatacatacactacatttgtaatctcacaaatcaggtacacccatttcccatttggatggaataccaaatgccttggtccatctcccggcaacaccttttttgacattctctttcgaagctggtccttttcaatcacatacatcacaacttcatcggttccaagatccggtacaaaaaggtaatcttcatctggcgaaagatgcactccatgaggatgaggttcagtttgtcttgcatgaacactctttccagagtgtgaagtaatatactcttcttcctcaaaatgtcccgtctcatctaacaataccatacccacatctccacttatataattagcaaagaatactcgtctggcatcagaatccatacaaatatgacatggaccacgtcctgaaatatctttctgatccaaataacaaagaaacccatcatcctgtatttcataagaacttagccagattcctttgtcactttcatttaacgcacaaagaatttttttcttccagttcactgcaataaaattgggattttcgcactgttcttctacagaaatacgtctcagtgctcccgtttctgtgtccagaagacaataataaattccttttcccttttctggccccgtatagcttccaacgtatacttttttttccatagaaccctcattcaaatcttattttttttagaatcaatatacatcatcacaaagataatcagtgctttagcaatctgaaagacatagatatctgctccaatcatcgtaagtccattttcaatcattgttaaaataagaacaccgataaaggctttaggaaatacgctgccttcaccacccgcaagggatacacccccaagcacaatcgcagccactgcagtaaattcgtatccatctcccaattctctggtaacgcttcctaaatttatacaaattaacatacctcccagccctgcaaaaatcccactgattgtaaatgccgcaagtttgtaattctttacactaagtcccagttttgatgcagcatttgggttggatccaactgcaacaatttttcttccgaaagttgtatactttaaaacaaactgcataatcaacattacaaccaaaataaaaactataaagctggacaaaccaaatattttaaaattacggaactgtagcacttcctgaggcatattaatcgcaactgtattagtcagtttcactacaattccaactaatgccaatttcatagaaagagtcactaaccaagcatttaactttactcttgtaaccaaaattccatttactaatccaactaatcctccaagaattggcatcatgatcatgcaaaggtatggattccatttataattcaccatcaaaagtgcacatacagatgctgaaaaacgacagtttgctcccactgataaatccagctcgccaacaattaatgcgaaagtcataccaataccaatagacagcatcaatgtagatgctcgcaaaattgaagtcgcatttgtgactgtgaaaaagtatggagacattacagaaaatactgcgataatcaatattccaaaaatatataccgcattgttgagggcagccaatttcatattctttatttttacttccctattcatacttgacctcctctcgtataccctgacaaagatccatcagcttttgtttgctaatatccttctttgcaacttcagcaacaatttcaccgtttcttacaattaacactctatcgcacaagttaagattttcttccagttctgaagatatcataacaatggcacatccacattctgccagttctacaattttcttatgaataaaagatttagcattaatatctacaccccttgtcggctcatcaataaagaaaatatctggatttttaccaattgatcttgccataaccactttttgctgatttccaccactgagagtctctacaagcacattttcatcagacgcttttatctgcatttcattgatcatttgaagtgcataatctcgttctttctgctcgtccattataaaatgctcaaacttcttcaaatttgccatagagatatttttccaaatcggcatttgcataaacagtccatctaaatgtctgtcttctgtaacatatgcacactcttccaaaagcttatgaccactaattttttccaaaatccctttgttattacgcttatagacaattccggaatctggtttatccaaagccagaatatttcttacaatttctgttcttccagaacccaaaagcccccaaagtcccaatatttcacctttttttactgcgaaatttacatttctcacgaccggataacaattaagattctcaactttcagaacaatttctttatcccttttatctgttgcattcacaattgtctctacttcctgccctgcaatacctgtaacaagttcttttgttgtgacatcttcgttcaaaaattcacctgtcacacacccatcacgcataacaactgttctatcgcagattctcattatttcatcaataaaatgtgtaatatacattacaattttatttttctgctttaattctccaataatgcgaaacagattctctttttcgtctagtgacaatgatgaagtcggttcatcaaataatacaatttctgcatctctaacaagagctctcgcaatttcgatcatttgtttttcaccaattgtaatgttttttacaatttcttttggatcaatatcagccccaatcattgaaagatactttgatgcatcctcaaataatctcttatattgtatacgtccagcctttgtatatttgtttaaattataaataaatatattctcagccactgtcatgtccttaaaaacaactgcttcttgatgtattaatgcaatacgacattttcctgagtcgttctgattcctgattattgtttcttttccatcgatataatatgttcctttatcaatacagatttccccagccaatgcgttcataaaagtagatttcccagcaccgttaattccaataattcccagtacttctcccttatctgcaacaatcgttacattattcaatgcatgaacacctggatagtatttatgtaaatttcttgcttcaaagtacattcttttttccatctttataccctccttgcatttgcacgaatggtgtcaaaccaggtaataaaaataaagactgcgcccttaataatctgaatcgtataataatcaataccaaataataccaagagattagaaagaccattaataataaaagcccctatcaacgcaccaagtactgttcctacaccacctttaatacttgcgccgcctacaattgccgccgcaattacatctaatgatgtaccatcagatgcaagagaaagagaagatgacgaaattcgtgccgtcaaagcaatcgcagcaagtcctgccataattccagaaatcaaaaatacttgtatttttatttttcccgttttaatgccacatgcctgagctgttttttcatttgttccaatggcataaatgcttcttccaaatgctgttttggtcagtaaaaattgaaggataatcaaacagacgagcatcattatgatatttgcgtgaaacggtccgtaatattttccaaatagctcagtaaactttggaagaaccggtatactggttgattttgttactcgaagcgacaaaccattggaaaaaatcatggtaatcatagttgctacaaatggattaattccaatttttgccacagaaaatccattaaacaaccctaaaagaattgctatcatcataatagccaatactccaagcattatattttcagtttcgcgcatagtatacgctccgatacatccagaaagcatcataacggaaggaattgataaatcaataccaccacttaccataacgtaaatctgaccagctgccataatcgcaacagcactgctttgaattaaaatactggacaagtttctaaacgcataaaactgaggttttgcaatagcgattgccaccagaaatagaacacccaatataacgctagttaacagaaaatttttatcttttctgttgctaaaagctttctctttttttgtaaaatactcttttatattcataaaagattcccccttttagatgtgactgccccaaaaattcccgaatcttttgcggcagtcacagtcaggttttagaacttattttgtccgctctgcatagtcataaacccagaaatgattttcatccagcaatggctgaatattttcctgtgtgattggttctgattttacaaagaaatcgtctgcttcctcacccagtgccagttttacagcaacatcaaccgtatttgtagatacctgtggaagattttcatatccagttgcatccagataaccttcttgaatcatattaagacctatttcacagccacctgctgctgccagataaatatgtccttcttcatctgatttcttccataattcctttccttctaatacgctctgtacaccgagcattaaatcttcattaggtgtaaaaatcatatttgcatctgtatttgcctgaagtgtaggcgcaagtttgttcataagagtttctacagaccagttacactcaatatcggcaacgattgttgctccattatcttttactgccgcctcacagccttcaccatatctgactgcattttgatcttttaaatctccctgtactcttactattttaatttcctcagcgggaattccatctgcaatcatttttttaattgcagcatcaactgaaacatacgcagtatcgtaagtgtccggtccaactgtagaatctgcttctggtccacctggagtcagcctacggcaaaaagaaataaatttcttacccgcatcatgtgtttctgtaatcgaagaccagattgctgttgtatcaatcgcacctgacacaactacatcaacatcctgatttaacaaatctcgaatctgtgtttcctgtgccgctgcatcatcccccgccgttgtttcaattaattttacctggacttcgttttccgcattgtaatcttccacataccatcttaaataatcagccattgctgaccatgcctgagttccaagagatggccatgctataccaattgttacttcttttggctcttctgcaaatacacttacagggctaagtgccaatgtagctgcaaccactgccattactgcttttttcatagttttcttcataatttgtaccccactttcatttagtttttgcttttatagttcacatcctctttataaattcactccggattgaaattacattagggatgccactaattcattttcacgttgatcagttatagttacaatttgcaaaacactctgccatgcattccaactgcattgccattgttacagcacctggatccaaataccccactgatttatcttcccgataacttgcccttccctttacggctttcatttcccgtgtactatctgcaccttgtttcgccgccatcaccattttatgtaaacaatctgcgatatcatttccttcattcaatgatttctgatatgcatttgctgcaggatatatagcatccaacatggttttatatcctggtttcgcatttcctctcgatgctatggcctctgcccaatccaagagcatttctccaaaaagcatttcatccattatctctttgtctttcataagcatagaagattttaaatacgcacttccatataagacaccagaagagccacccatagcagacatcaataccatagcgatattttgaaaaagttcctgaaaattcatttgtttccattcccctgttttctccactaatttctggaatccaatgttcatattcagccaatggtctccatcacctgtttctgaatctagctctgtaatatactctttgttttcttcaattacttttgctaccttttttaaataaataatgaaatcctctggttttaaagcaaacatatacttttttcctttctaaaactttaatcctggcgtattacatggtgcatccaaaagtcttttcgtttgtttatccaatttaaacattgtaattgaacatcctgccatgtccaacgatgtcatataattcccaaccaaaactttatgtgctgatattctttttgccttcagaagcttttgaatacatcctgcgaaaacgtacaactccattagaggagtcgcccccaacccattgatcatcaaagcaatttcactttcagaataatcgtaatcctcaataattttcgcaagcatgatttctgccaactctgatgctttctttattttagttttttgaatcccaggttccccatggattcccataccaatttcaatttcatcatcagcaaccgtaaatcctggtttatctaatccaggaagggtacatgccgtcatagacattcctatacttctaatatttgcgtttgctatttcggctgcttcttttacttcttgtaaagaagctccctcatttgctttagctccagcaattttatgtacaaatatagtcccggcaattccacgtcgtcctgtagaataagtgctatccggaacagctacatcatcttttaccacaacacattccacttctatccccttcatttgtgccaactcttttgcaacagaataattcatcaaatctccggaatagtttttaagaactactaacactcctgctccagtattaatttcctccatagcctttagcatttgatctggagatggagatgcaaacaaatttcccgctaccgcagcatccaacattcctttccctacatatccagcatgagccggctcatgaccacttccccctaccgacatgatgccaactttgccctttttcttttccttcaacgcaactacacgataattcggaaaccattcaatttcttcatgtgcaaatacaaatccttccagcatttcgtctacaatgttttgtggttcattcataatttttttaaccataatcacctctccttttatggaatcgcttccatattttatatttttttaaccaggcacattgtctggttagtaaacgaatatgtctcctgttagcgacatcactatatacgaaaatcaacaatttcgtgtcttggtgcattcacaactgatgggcgaatgagtaatgcgggatagtctcaccaattactcattcggtcaagtccgtccaatattcataaatttactcataaaagcatggctcattcatgactattgtccgagaccttcaggttataaattaactctaatctctgaaggcatataatactttctaactggcatagacgtattcgcaatacgttccatcagcatagtcgtcgctaaatgccccattgctttgggatctcgttcgatataactatattttaagtcttcgaaagtgtttaccttatcaaaggaaatacatcgaatatcttttcctaataccagttttgcatcatatactgccttaataaaccctatagttgtcagattatttgttgtaaaaactgttgtcggatatgtttttctttccaagatcttttgtgttatctggtatgctgtcttagtggtaaaatcaccttggaatatattttcttcccttaccgcaagcccgtgttcttcaaaagctctaagatatcctttatatctgtcccttgcagttttggtactcaaattacccgtaattattccaatatcatcaaatccatgttcaatcattactttggttgcattgtaagcaccgcctgcattatcaaaatatactgtatcccaatcattaaaatctaatcctgaatccataaaagtcactggaattctcaatgattctattaattttttatattccagtattttttgcacatccagatcgtcaattgccggagtaataatgagtcccttaagtttctgttgctttaataatttcaatattttttcttctttatcaaaacttttgttagaattacaaagcactaataacagttccttttcttccagcacttcgtaaattccttccaatgcagctgcaaagtaagggttgtgtgcttctggaacaattactccaatcatattactatcctgctttgcaaaatttcttgcagttgctgatggaacatagttgcaactctggataacttcctctattttttttcttgtcttttcatttacataacccgtattattaaggacacgagaaactgtagttcttccaactcccgctttttttgcaatatcatcaattgttgttttattctgcatgttttacctcatttcattgtcccatcatttatggaatcgcttccttttcttgatattcttaatatagcacaatattttctgttggtaaatatggtaatatatacaaattatacatattatttttatttaacttgccatttttccttttaattccaaaattgaaattgtattttcacatattttatgatattttttaaacatcatcatatattttatggaatcgctttcatctcaatgcttatgaaaggagaactaatacatgaatttaaatttaaaagataaaatcgtagttatcacaggaggaactagtggtattggtaaagccactgcctttgcttttgcgaatgaaggagcaactgttattgtttgctcccgttctcaaacgaaaattgataagtttctatttgattctgatcaattaggttatcatattgaggcaatgtcggtggatatatccaacttcaaatcattaaaagcttttattgattatgttggaaatacttatggaaggattgatgtcttatttaataatgctgcgcaaggacatatggattatttaactcaattgagtctggaagactggaatgcagtaatctcatccaatctaacttctgcttggttagcttccaaatatgttgttccgtacatgaaaaagaacggaggaagtattatttctaccagttctttagctggaagaatcgccaccacatccattggaatttatggaattacgaaaagtggactcagtgccatgaccaaacttcttgcttctgaactggcaccttatcacatccgtgtaaatgcagtttcacctggagttatttcttctgatatggttaaaaatggcattttaaaaacaaaaggtattaattatctcagtaatactgctgttatgcaacgtataggaactccagaagaagtagctaagcctgttgtttttttaagttctgatgctgcatctttcataactggagaagtccttgatatttccggtggtaaatttattgtgcaagatccatgggcgccatgggaagattttgatataaaaaaaccttttgaaacactggaagaatagcaatatagctaataacagctgagtgctatatatagactggaattccattaaattccaaaacaatcaggaaacgaatgtctgaatgtcttttagagcatttcagaattcatttaaaatcattgctttttctgcaagagagcacaataaaaacgctggtaatcaaacagcctttctcttttttctgctttatttctatgaactgaaagtctatgttcatacaaagacatgtcgcactaagtaatcagtgcgacatgcctttgtattttcttaattattttctgttattcagtttcaaaccttgtctgtatttgccccatacacatccgcaatctctgcaatcgatatgtaagcagaacggtcattttcatgaaccaattctttcatcttcccaacctgaaaacggtttaccacaatatacaccaccgttttgggagaatcggaataatatccttttgcctcggtaatggtcataccacattcaaaggcttctgaaagagccgcacagacctcatccgggtgtattgttacaatcgtagcagcttttgaacgatccagaccttccacaataaagtccactgtcttcagtgccgctccgtacgctacgatcgaatacaatggaaggatccaactatgaagaacaaatccgcaaacgatatataataccagattatacgccattacaaacgtgccaaccgtgattcccagtctttttgcaaagatgacagcgagaacctcgatgccatccatggcgcctccaaatcgaattgccatgccacttccgataccagaaatcagtccaccgaaaatggcacaaagaagaagatctgacccggcaagtggtgatacaatacttacatccaccggcaacacatcagtaatcagccatgctccaaaagaatacactgctaccgtatagattgcataaatagtaaaagtaacaccctgcttttttaatccatacaggaacaggggaatgttcaatacaagcaaaaatagagacagtgacaaccactctggtgtcaattgtgacagcaaaattgaagttcctgaaattccactatcgtacaaatctactggagcgataaacatcgtgacaccaaaggcattcaccatacctgcaaccgtaaggaagaaaaaattcttccatttcatctttccaagtgcttgtttcaaagtcatacataatctcctttcattttctgcctatatagtttcttacgattccccttataaatcttggtttattgcatatgaaatggtgtgtttttataaaggtatattaagtgataattatcgcccaagtcaagtacggatgacctgtacagtgtgctattattttcataaataaaaaagtcgaaagcaaagtaaaatcaatgcttccgacgcttaagaaaacaggggatgagagaatcgaactcccaccaaaggttttggagacccctatcataccatttgaccaatcccctttatttatataagaaaaggtgactcataaagtcactctttcatttgtaccttcaaaaccacatacatgctgacatcctttggaatcgtgaaatcctgctttttggtcaagcc

SEQ ID NO: 3 - DNA, 718 bp, Unknown
  gut microbiota DNA sequence
ggattgggtttctaaccagccgccgtgaaccggcggtgggacaatgccagacggggagtttgactggggcggtcgcctccgaaagggtatcggaggcgcccaaaggttccctcaggatggacggaaaccatccaaagagtgcaaaggcagaagggagcttgactgtgacaccgacgggtggaacaggtacgaaagtagggcttagtgatccggtggtattaagtgggaatgccatcgctcaacggataaaagctaccctggggataacaggcttatcactcccaagagttcacatcgacggagtggtttggcacctcgatgtcggctcatcgcatcctggggctgtagtaggtcccaagggttgggctgttcgcccattaaagcggtacgcgagctgggttcagaacgtcgtgagacagttcggtccctatccggcgtgggcgtaggatatctgaagggagctgtccttagtacgagaggaccgggatggacggaccgctggtgtaccggttgagcagccaggctcatggccgggtagccaagtccggaagggataaacgctgaaggcatctaagcgtgaagccccccctgagatgagatatcccattcgaaagaagtaagaccccttgaagacgacgaggtagataggctggagatggaagtgcagtaatgtacggagttgaccagtactaatcggtcgagggcttgaccaaaaagc

SEQ ID NO: 4 - DNA, 21144 bp, Unknown
  gut microbiota DNA sequence
aaatatgctccctcctaagtgacaagtttttattatttcacttgtctacctagaagggagcatatcaaagatatactgtggcagctcccatttttttattgaaacaatggctgccgcaatcccactggctttagacggtgggttaaggtagccaaaagtggtggcttgtgctatacttgcgttatgggaacatggaaattaaaaaacaggcacaagtatttgctacagtatcacattattttcgtatgcaagtatagaaagaaattgctgatgtcaaagcaaatatcagatgatataaagcagttttcttatgagatatgtcaaaagcacaaagtcattattagatatatggagacagataaagaccatattcattacatgatagaaacagaaccaacgatgtccattagtaaaatagtaaatctaatgaagagttacacaatatatcatatttgggaaaggtatccgaattatttacgaaaacatttctggaaagagcatactttttggatggacggatattttgcttgcagtgtaggaaatgtttcagaagagatgttgagaaaatatatagaaaaccaagggtaggaaggtggtgacagccaatgctaaaagcatataaatacaggatatatcctaatagcgaacagagaatacagattgcaaaaacatttggctgttgtcgttttgtttataaccagacattggcatatcggaaagaaatatacgagaaagagaaaaagtctgtcagtaaaacagattgtaataattactgtaacagagaattaaagaaagactatgaatggctaaaagaagtggacaaattcgctctgaccaacgcaatttataacatggactctgcatatcagaatttttttagagaacatgcaggatatccaaaattcaagagtaaacatgacaaccataaatcatatacaacaaattatacaaatggaaatataacagtaaattatgagaatggtaagataaaattgcctaaattaaaagaggtaaaagcaaagttacataggaattttagtggacagattaagtcagtgactgtttcgcaggtttccagtggaaaatattatgtgtccatacttgtagaaactgagcataaggaactggtacatacaaatgatagcataggaatagatttaggaattaaagatttatgcattacttccgatgggaagatatatgagaatctaaaaatcataaggaaatacgagaaacaactggtaaagctacaaaggcaactgtcacataaagaaaagagaagtaaaaactattataaaacaaagaaaaagatagcattgtgccatgagaaaataaggaataccagaaaagattatctgcataaagtttcacatgagattatcagcgaaaaccaagtgatagtttcagagaatttacagataaaaaatatgataaagaatcatcatttggcaaaagccataagtgatgtatcgtggtatgagctgacaagacagttagagtataaggcaaaatggaatggtaggaaatatatcaaaatagatacattttatgccagcagtcaattatgttccgtttgtgggtatcagaatgcagaaacaaaaaatctgtctgtgagggaatggacatgtcctgtctgcgggacaaagcatgatagggatattaatgcggcaaaaaatattttagtggaaggattaagtcacatagcataaagaaacatgtatagggcagggactgcccgaatcaacgcctgtggagatagtaggttacgaggtcgatgaagcaggaagctcattggctttagacaatgggtagttcaccaacagacatggaatatgtataatgattactgttcacaggctaatttatgtgaatagaaatacgtatcatgcggttcgtaagacaggaaagcataagattttgccggaacatgaagggatagatagaatgacattaacagaaatactgaagcaggtccaggagggtactctttctctggaagatgcccagcggatcttaaaacaggatggatataaggaaatggattatgcaaagctggacacagggcggaaggcccgtacaggctttgcagaggtggtatattgcagtaacaaggcagatgaacatctgctgaacatatacgaaagactgtatcaggaagaagggcaggtgcttggcacacgagccagtgagaaacagtatctgctggtaagggaaagacttcctcaggtacagtatgacccggtttcccggatcctgaagattgaaaagccggataagcttcacgaaggccgggtagctgtgtgcacagcaggtactgctgatatttctgtggcagaagaagctgcccagaccgcagagtttttcggaacctatgtggatcggatctatgatgtaggggtcagtgggatgcaccggcttttttcaaaaatggatatgatacagaaggcgaactgtgtagtagctgtggccgggatggaaggggcacttgcaagtgtgatgggcggtctggtaagcagacctgtgatcgctgtgcctacctctgtaggatatggagcgaatttccatggcctgtctgcacttcttactatgatcaattcctgcgccaacggtattgctgtggtgaatattgataatggatacggtgcaggctatctggcaacccagatgaaccggcttgccttgggaaaggacagatagccgctttttacaaccgttgcaaccagtctgataatatgctacaatactaagacggttcagggaaccaaaaaagacataagatggagcaaagtaaaaatgaagaaatacatcgacaatcttatacagtacaaatttctgttaagtgagcttgtgaaaaaaggaatcaaactgaaataccggcgttcgtatcttggtattgtgtggtctcttctggagccgctgcttaccatgatcgttctgaccattgtatttggtactttgtatggcaatacagacaaaacctttcctgtgtatattctgacagggcgtctgatctacagttattattccacagcgaccaagtcagcactgaagtccatacgtgccaattcagccatgatcaagaaggtatatgtgcctaagtacctgtacccattatcaacggttatttttaactatattatattcctgatctctttgatcgtattggctgcagtaagcattgttcttggaatcaagcctaccatttatctgcttcaggtacctatcgcactgattctggttctgatcctttcctatggatgcgggatgatccttgctaccattggcgtattcttcagggatatggaatatttatggtctgttgtgctgatgatcatcatgtatacctgtgccattttctattatcctgagaagcttctgaagagtggatggttctggatcctgaagtacaatcccctttacgggatcatcaagatcttcagagattctgtgtttggaaagcctatcaatatgcattatctgatgtatacaacagcattcagtcttttatgcctggtgatcggccttgtatgcttcaagaaaaagcaggacgattttattcttcatatttaagaggtaaggagtaagagaagatgagtgataaaccggcgatcattgtagatcacgtaagcatgaaatttaaccttagcaaagaaaaagtagacagcctgaaggattatgtaataaagatgatcaaaggccagatccagtacaatgaattctgggctttgaaggatgttacctttactgtgaataaaggagaccgggtagggatccttggattgaacggagcagggaaaagtacccttttaaaggtgatttcaggagtgtttaagcctacggaaggaactgtgacaaagaatgggaagatcgttccgcttctggaactgggagcaggctttgatcctcagtatacaggtcaggagaatattttcctgtatggtgcaatgcttggatattccaaagcttttatccaggaaaaatatcaggagatcgtagacttctcagagctgaaaaactttatggatgtacctgtgaaaaattattcatctggtatgaaatccaggcttggttttgctattgctacagtggtatctcctaagatcctgatcctggatgaggtgctttcagtaggagatgccaagttccgtaagaaaagcgagaataagatattaagtatgtttgattcaggagtgacggtgctttttgtatcccactccctggagcaggtaaagcgcctttgcaataaggccattatccttgaaaaaggaaaagtagtatcctatggagatattgatacgatttccgaacagtatgaacagatgatcggaggctgatcagaggtcactgtttgatggtcatagtatggagggaatatgggagaagggttaaaaaaagaagattctgctgcattaaaggggattgctattttgatgatggtattccatcattgctaccgcacagagaagaagtttgcaggatatgagatcctttttacaccgtttacagcagagaatgtgattcatctggccctttatatgaaaatctgcgtctgtatttttgcttttgtatcaggatacggactaatgcatggatatttaagaaaccagaatcctgataaccggatttctgacagtgcctttgtaaaaaggcatctgttcagtacctgttcaggctactggtttcttgttgttcctgcctatcttgtgtatggagtcagaaatggcttttcctatggcaaatggggaactaccctttgggagaagattgcggggatcctgacagatgcgcttgggctttctgagattcttggtaccaaaagtgtaaatggagcctggtggtatatgggagcagccattacctttatcattttggtgccggtcctgggacaagtgatcctgaaaatgggcggcctgacctgcattggtcttgtttttcttctgccaagacttcttaatattggctttcagggaggcagatctcctttgtcttttttaatggcactggttgtgggaatggtatgctgcaagaaggacgtgtttgccaggtttcatagctgggttccttttggcagcaggtatgcaggcggctttctgaagtttgtgctgcttgcagcactggttttgtggggatatcgaagctatcggcttctgcccttttcctattgctgggaataccagtttgcattgatcccatttatcctgatccttttccttaaggaatatgtgtttcggatcctcggccttaaaaggctgcttggcttccttggcaagcattctttaaatatctggcttgtacatacctttgtgagagattacctgaagtcctatctgtggtctttaaagtattttgcacttgtgccgctggcaatcctattgatctctcttgtacttagtgtggtgatcaatgcattgaagaaatataccggctatgatggcctgatcaggaaaataagcaggagttttgtatgaaagtattacagatcggcatggggaataacccaggcggagtggaagcctttgtaatgaattattaccggcagctttccttaaaggggatccggtttgacttcgtttccatgtatggagagatcgcctttcatcaggagatactatctttgggtggacaggtttttctggtgccaaatgtaaaaaaagattatttcggctatgtaaaagccatgaaggaaatccttgcagagggcagatatgacgtggtgcatgtaaatatgctttccgcggccaatatccttccccttcgcctggcaaaagaggcaggcgtgggcaaggtgatcgcacattcccataatgcttctgcaccggggatgctgcgcaggatactggatcagtggaacagacctaagatcagccggtatgcggatgtgctggctgcttgtggtgaaaaggccggaagatggctgtttggagatcaggcttatgaacagggacaagtggttttgctttccaatgcgattgacgtagaacgttttctgttctctgaagagaaaagaaaagcaaccagggcaaaactgggacttacggatggttttgtgatcggccatgtagggagatttcaggttcagaagaatcatgaaaggattcttgagattttcaggcagatccaggaaaaggagccggatgccaggctattgctggtgggagaaggagagcttcttccaaagatccgtgaaaaggccagagagtatcagcttgaggagcagattgtctttgcaggtgtacggtcagatgtggaagattgtctttgtgctatggatgtgttcctttttccatctctgtttgagggccttccctttactcttgtggaagcgcaggccaatggactgccttgtgtgatttcagacaggattacaagggaggtagtcctggatgaagaaaggatatgcagtcttagccttgaaaacagtgatacagcctgggcagcaaaagtgctgtcatataggggatgtggcagggaagaaccacaaataacaaaaaaaagactggtggctgctcattttgatatacataatgaagcagacaggcttttagaactgtataaccgttgaaaacaggctgtctttaatgatttgtgaacaggaagtgagagtgcagatggataaaatcgattttgtgatcccatgggtagatggcaatgatcctgcctggatcgcacagagaaagaaatatcagccggataccagggatgatgacggagaaagccgttacagagactgggagaatctgcagtactggttccgtggcgtggaaaagtttgcaccatgggtaaataaggtttactttcttacctgggggcatgtaccggtctggctggatacttctaatcctaaggtgcagatcgtcaggcatgaagattatattcctaaagattatctgcctaccttcagcagccatccgattgagatgaatatgcacaggatccagggattaagtgaacattttgtatattttaatgatgatatgtttctgatccgtaaggcagcgcctgaggactttttcaaaaatgggctgcccagggactgctgtattgaaacagcactggcacaggacaatattgatgatccctttgcccatattcttatgaacaatactgctttgatcaatatgcatttcaacaaaaaagaagtgatccgtaaaaactggaaaaaatggttcagccctgcatatggcaaaatggtgcttcgtaatgtactgatgtatccatatcaggagttttccggatttaagtatacccacatgccaagcccttttttgaaaagctattttgagaagctttggcaggcagagggagacagacttgataagctgtgccataatcgttttcgcacagcttttgatgtgaaccagtatgtggtcaagcactggcagtgcatggaaggtatgtatgagcctcagtctccgggaatcggccggttctgcgtgatgggcagagatgacgagatgctttttgataccatggagcaccagtcagccaaaatgatctgtattaatgatgacgcaaggctggaggattttccaggaatgaaacagagggtgatccaggcttttgaccggattctgccggagaaatcttcatttgaaaaataaggggatagaatgaatctgaatgccataaaaaagaagatcagggatgaaggcctgatgaaaagtgcaggatattattctaaccgggtgatatccaagctgtccatgcatgtggtgggaagacttgcggcctggcatggacaggcaaaaaagaataggatcgtgtttaaaaacagggaaatgctggattttacagataatccaagagcattgtttgaatatttagaagaaaaagggtataatgaaaaataccagattatatatatggtttctgaaaagaagaatttcaggagccgacattataaaaatgtaaaatttgttacagcagaaagtccgggtggattttccagtcctgcagctttctattatggagcaactgccggttatttcttttattcccacaattccgctgatctgaaccgttttcacagaaaaggccagatcacagtgaatctgtggcatggctgcggatataaaggtgcgtctttggataataagaatattccacatagtactaccatgtcagcctttgattactgtctggttccgggacaggtttttgccaggtcaaagtctgagtgttggaactggccaaaggaaaagattctgtgcatgggatatccaagatatgactggatgctggatccgggaaatgatcgggtgaacatcctggaaaagctgggatttcatgtggaaccggatactaaagttgttatctggatgcctacttttcgtaagagtgtgcttactggttatggtgagaatgagatttctctgccttaccagcttccaggaatagaggatcctgctcagatggcacagctggatcggcactgtggcaaagagaagattctgctgctgatcaagaagcatcctcttcagacgggatgggagcaggagaattgctataagaatattcggtatgtaacagatgaaatgtttgcaactgcagatgttgtgctgtatcgtcttcttggagtatgtgatggactgatttcagattattcttcagttgcagtggattatatgctgctggatcgtcctatggcatttgtacttacagacctgcctgcttatggacagctgcgtggctttgtatttaaggatccgcttgcttacatgccaggagaaaaggtgtatgatttcgggcagcttcttactttcctcactcatgtaagagaaggaaaggatctgttcgccaaggagcggcagctgcttcttttggagatgcataatccctgtaaggattacaggggaaggctgctggactttttaaatatcagatgtatgtaaaatataagttggagagaaaaatgggaaaattaatcggttatacacagggcacctatgatatgttccatattgggcacctgaatctgatcaagaatgctaaaagacggtgtgattatctgatcgttggggtaaatacagatgaattggttgaaagctacaagcataaaagacctatcattccacttgctgaaagggctgagatcgtaagggcaatccggtatgtggatgaagtgctgatcacagataccctggacaaaaaagcaatatgggataagatacgttttgatgagatctatattggtgatgactggaaggggaatgaacgttgggagaagaccggcaaagagatggaagcccttggggcaaagctggtatatctgccatatacgaaggatacttcctctactatgcttcgggaaaagctgaaagactattaagtaagaaactagggaaggaaaggagccgttcgtcggcaaaacggttttgataagatgagtattgtcacaaagataaagaatgtaacaggaaaatttaataaaatccggaaggaacagggaaccagggctgcttttgacgaagtctgggcgctgggtacttatgtgatctatgacagatggaagatctgccgtctgaagaaatttccgccggcacttcatccaaaccggatgctgtttgaaacaaatgatgattttacagacaatggacgtgctttattcgattatctggtagagaatggatacaatcagaaatatgagctggtatggcttgtccatgatccgaagaaatatgaaaagtaccaggctcctaatgtaaagtttgttcaaagctttaagaaaggctctacgatccgaagggcaattgcctatcgttatgcccttacttcaggttatattttttatactcaggcatttaactggattggtatgtcaagaaagaaccagctgtttatcgatttgtggcatggctgcggttataaggcaaataagaataaccgaaaagtgttttttgattattgtcttgttccgggagacgtttttattgagacgaagaaagagttttttgcctgcagttccaaaaagatcctgccccttgggtatcccaggtatgatctgatgctgaaaggaagtgccggggcagacagatttaaagagagacttttgaaggactccggaagtgataaactggtgctgtggatgcctacctatcgtcatgccaccagcgagagactgaatgaagaaacattgaacaatgaatttaatattcctattattgatgacagagagaagcttctggatctgaataagttttgtaaggagaaccatattctggtggtgatcaagcgtcattatcttcagatcccttatgatttcggggaaaatgtgcttaccaatattgtatatctggagaacagtgacctggaaaaagaaggccttcagctttatgaatttatccattgtgcagatgcattggtatctgattattcatcggttgccattgattatctgctccttgaccggccgcttggctttacactggatgattataaagaatatacacaatcaagaggctgggtttttgaggatcctctggagtatatgccaggagagcatatttatgatgtaaagcagtttgagcagttccttctggatgtgaaggatggcagagatgaatatgctgcaaaaagaaaggcagtacgagagaagactcataatgtgtgtgataattactgtcagcgtgtactggattatttccacatcacaaaataggaggggtaaatgaagatctgtatctgggtgacgaaaatatttgatctgggaggcaccaagcgtgtagttacgcttcttgccaatgagcttgtaaaggaacatgacgtgacgattatggtttatcaggaccgcttcagagaagaccgcaccatgtaccatatgagcgaagacattaaagtggattttattgacaatgatgcttttgtggacagacactggacccctgcatttggtgccaggtttgtgatcaagaaattaaacgagaattacggtatttttaataaaaaatgcttcaatcatattctgggagatgcactttttccaaaaaaaacaagggatagatgggtagaatacttaaaccagcaggattatgacatcattatcaccactgctgcattaagtctccgtctggggatgatcgcgccaaggctgaacgcaaagaccattggctggcagcacaattgctacagcggatatgtggatgtaccgaaggtcgttttctggaaacaggagtgcttgcttcaggaatatctgccacagcttgaccgttatattgtgcttagcgactatgataaacgggattaccagaaattccttgggatcgatacagaagttaagatcaatccaagaagctttgtcagcgaaaagaaatgtaatccggatgccaagcgttttctgatggctacccgttttgtatatgcaaaaggacttgatctgatgatgcagtcttttgaagaattctgtaagcaggatgatgaatgggaactggatattatcggagatggggagctgtgggatgagatcctggcagaggccaggaaacgccatgtagataaaagggttcattttatcggctataccaatgagccggagaaatactatctgaattcttctgtatttctgcttccatccagatgggaaggctggcctatggtgatcatggaagcctttgaatttggtcttcctgtgatcgcttatcatatgggggcaatggatctgatcattgatgaccagaagacaggctttcttccggaagcctttgatacccacaagtttacagaagcaatgctgaagctggctcatgatgatgaactgcgccatcagatgcataggaatgctattgaaaaatcagcagattttaatattgataaagctgtggtagcatggaacgatctgtttaatcggttgatgaaagagtaggagcgtagcagatgaaggggtttggacaattaaagaaactgttaggctttgggaaaaacagtgttaaagaagcaaagaaagaggaaaaagcatcagggcttgaacaggcaatcgaagatgcaagggaagagggcaggctgaacctgaacgaggaaatgcgtgcagtttatgtggatttttgccaaaacagcccgatcaaagaaaaatgtattttatatgaggcatttgggggcaggggcatgacctgcagcccttatgctttgtttcggtatttattgacccaggcggacttatcagagtatgtccatgtctgggtcattgacgattttcaggataatcagtaccagatggagctttacaaagagtatgaaaatgtaaaattcatttcccgccagtctgtagaatacagagaatatctggcaactgccaaatatctgatcaataatgtaagctttcctggattttttacaaaaagagaggggcagatctaccttgatacctggcatgggatcccgttaaagactcttggctttgacatacctgcaggtaaggtaagcacagggaatactgccagaaatctgctggcagcggattatctgatctcacctaatccatttatgactcagatctatcagcaggctttcaagatggaagggctttatcagggaaagatcctggaagagggacagcccagaaatgaccgctttttccatacagaccgtaagaccattatggacaaattgtcaaaaagcggtgtaaagatcgatccctccaaaaagctgatcttgtatgcacctacctggaaggggagcaaatacagcagtccggataccagtctggatgcttattttgaactgatccatacagtagaggcaaatattgataccagtaagtatcaggtgcttgtaaagcctcatcagatcgtatattaccatattaagaaaaaccaggggatcaccgggcagtttatcccggcaaccattgacaccaatgaactgttatcagcagtggatattctgatctctgattattccagtatttattttgattttcttgtttccggacgtcctgtgcttttctttatcccggatctggatgagtatttgggctatcggggactttattttgggattgacaaactgccgggcccgattgcaaggaatcacaggcagctgggggaaatgatccatgatgtggacaaggcgatggagccttatatggataagtaccgaagggaagctgcatgggcatgtccaagggatgacggggatgtgtgcagccgtattgtggatgtggtatttcggggaaaaagctctgagcatgccatttcctgcggggaaatcaataaaaaacggctgttgctttacccgggagaaatggaaggaaatcatggcacattttcctttatggagctattgcagcttctggattacaacaaaaatgatgtaaccgtgcttaccggaggatccggagatgagccggaacagcggatctgcagtctggatcaaagagtccgtgtgttatatcggggacaaccggaaaacggaacctatgaagaaaaaggtctttatgctttttctaaaggaaaggatccttctcttgctgccttttataaaagggaggcaaaacggcttttcggagatgccaggtttgattatgtgatcaatttatccagtgaaaaaaatgtgatcactgcaatgcttccgtttgtagagaatgcagtttatgcagaatatgggacaagctttgtggacattaccaggatcagccaggatcttggaaaacaacagcagatccattaccagggccaggacttttatatagcagaaagacaaaagaccggggaggcaggaccggctttaaaactgcttctggtgccggatcctgggaaaaagaattatgttgctatgggaagtctgacaaaaaaacaggattttcagggactgatccgtaattttaaagcgtatgcccatgaaaatgaaaatagtcatttgtatatcctgggtgatgggaacgaaagaaaggctttgggaaagcttcttctggaagaaggtcttaccaagtgtgttaccatgaccggctatgtggcggagccgtttggatttctgaaactgtgcacagcttttgtgcatacacatacacagagggctgattcacttcctgtcctggaggcaaagactttaaagcttcccatgctggatgggaatttcagggaagaagcttatccagagtttgagccccaggcatataatcagaatgtttacgcagagtttgagagggcaatccaatgagtgagattgatagatatctgaaagaaaatatagaggattatgaatctgtaaaaaggtctgccctgaaatatattaaggaaaacggggaagagctgaaaaaacgttatccttacagtaaagaactggaaaaggatatacaggaaaaacgaattctttttgtgtgggacagtaaggcgggcagatcaggagaactgcctcataggatgtttcaatatgtggagcgcacatacggaaagcagtatgactgcatttgctgtcagaaaggctctatgaagcttacttccgggggaaatagtgtaaaacatgattctcctggattctgggaagcagcagccagtgccgcatatattgtaagcagcattccatttcctgttgcttttgtaaaaagaaaaggacagaaatatttttatacaggcacccagctttgggaaaaggatggccggatggatgtggaaggggtatctgtgcttgcaagggaaatactaaaagcagattatattcttgcacaggacgagaagacagccttaagaggacttcaagaggacaccaggctttctcggatttatgaaggaaagctggtggtctgccaggatccggaacatgcagcaggagaactgacagagcttttgcttggaaaagaagatggcccacagaaagtgtctgtgctgtctcttcgtgaaagagcgagaaaaaagcttctggtgcttaccagctggaaggatagcagagaacataaatttataaccagacaattgcttcagaagcttcaggaaaaagatatggatacggtgatcctttcttcctggacagcagatgaagaagaattcagggattttgtttccggagatgatgcccttgtccgggtgatgtacagaggccgtatgaccatggacgaagaggatttccttttttaccgatgtatggaaaagaatccggatgtgtacaaaagctgtgctcctgcgaaggaacatatggatctgctgatggaacgggaatggcacaggatctggggaagccagacctttgatacctgcctggtactgggaagtcagggatatcagcagtattatatggcaatgacctgccctgcaaaagaaaagatcctggtggatctggattttctgcctgtattaaaagaaaaggattcaggcaaatggatcaaaggcctgtctttatttgaccagattttttatccggctgtcattccaggcacaggcggttatggaatggagaatcaggaaaaggtaaggcctcttcctgtaatgatccaacagcagcagacaaatggagagctggtagaactggatggcaggaaatatctggtatgtgacagggtgaaagataagaataacagcatggatgttaagcttatgctttacccggaagctggaagcatattggtgaatgcagatcttgctccggatgaagcagtaaaagagaagcttgacaaagtaaagggcaggatctatcttctgggtccctgtgcacaaagctatcggttatttttgaatgatgcaattgttctggatgaatatatacgtaatatcctgtatcttctgcctgtagcaggattttactggaagcagttcaaggcatatgtgcctgcagcagatacaaagtcagatccgctgggggagatctgccgcctgtttggggtagaaaccctttgagcggatggtcttatgtgcttacggaaggggacgccgggaaaagtgcaggtcagcttttaaaagaagcaggctttacaaaaaagcagatcagcagacagaagttcctgccatccgggatctgcctggatggagaaaagtgccgtgttacggattcgggtaagccggggcagcttctggaggtaaatttcagggaagcacacagtccggaacaggcttcagcaggagaagaagctgcaagagaaactgttgcagcagaaccctttgagaaagaacggaataaggaatttacggattttccagatttggagatcctgtatgaggatgaatatctgctggcagtgaacaaaccgtcagggcttgcctgccacaagggcaggggacattatacggatcatctgggaaatcaggtggttcggtattttcttcaaaaaggaagaaatattactgtgcgtcagatcggcagactggatctggatacttccgggatcgttctttttgcccttgatcctgtaactgcccagagactttggaagcaaaggcaggaagggcagctggtaaagacttattatgctcttgtgcacggcaggatggaacaggaatcaggacagattactttgcctttaggaaagaaaccaggctgcaaaaatcagatgtgtgtacttccaaaaggggaagggctgtcagcagaaaccttatattccctgctctgggagaaaaagctttcagaagaatatatctcttgtgtaagctgtcatctgaaaacaggacgcacccaccagatccgtgtgcatttttctgcaacagcacatccgctgcttggcgataaagtttatggtaaagaagatggggcaaaacggctgatgcttcatgcaggagagctttgcttcatacatccttatacaagacagatcgtaaaactgcaggcccggataccctggcaatgcatatcttatcttaaataatttttcattatttttaaggcacttttttccaggcggctgacctgcgcctgggaaatgcccacttcttcagctacctccatctgggtttttccttcaaaaaagcgaagattgataatatgccgttctcttgttccaaggtgttccatggcttcctgaagagccagattttctacccagtgctcttctttattttttttatcactgatctgatccataacgtaaagagtatctccgccttccgtataaacaggctcaaacaggcttaccggattctggatggcatccagcgcatagacaatggtttctttatctattccgatctctttggcgatttctgtaatggtaggctccttcaaattctgtttcacataattttctttggcatagatagccttgtaggcaatatcacgaagggaacggctgacccggatgctgttgttatcacgcagatatctgcggatttcccctacgatcataggcactgcataagtggaaaattttacctgcagggaggtgtcaaagttgtcaatggctttgatcagaccaatgcagccaatctgaaaaaggtcatcaggattttcgttgctgttctggaatctgcggatcacactgagtacaaggcgcaggttgcctttgatgtaacgctctctggcagcagcatccccatccttgatccgatgaaaaagctcttctttttcttctgacgtaagtaccggaagcttcgctgtattgaccccgcaaatttctactttgttaagtgccatttatgcatcctccttattgtctttggttactacagatgattccaccaaggaggataaatatactttttccggaaaaatataaaaaatataagaccttgacaaaagagggcaaggcagagtaagaattactgtttacgcaggcatttgtcctcctgtatttccaccaggataatgtcttcgccaatctggcggatacattcccaggggatcacatattcgctttcatgaccaaaaaaactacagaatctgcagggaccaggcactacaagtgcagtcagccggctacagcagcagtcaaattccacatctgtggcacagcccaggcttttacaagtacaggtattgatgatctccttttgctttaattcacagatacgcatataaaatcactttttcttacaatatatgcataaatgaaagggttatgaatctaatcatcaacctaatcatcagttacggatatatattgacagaattcttgaaaataaagtataattcaggaaagaacagaaaaaagtgttattgttcaatatgtacgtaatatatgtaaataacgaaagaaaactacatatcagaggagagagggggagcacctgtgagatgtccatattgtaatcaggataataccagagtagttgattccagacctgtagaggatattaatggcattcgccgccgccgtctttgtgattcctgcggcagaagattcaccacctatgaaaaggtggagaatataccgctgactgtgatcaagaaggatcagaacagggagcagtacagcagagccaagatccagggcggggtattacgtgcctgttataagcggcctatccctattggcaagatagaagcgatgatggattccattgaggctgccatttttaatacagaggataaggagatttccagtaccaggatcggtgagatcgttatggagcatttaaaggatctggatgcagtagcatacgtgcgttttgcgtctgtatacagagaatttaaggatgtaagtactttcctggatgagcttaagaagtttatgaattaatgtagctgtttagcaggcagtatgcaaggggagcctgaacagttatggactcaaggcggtcggcataattgaatgctggccgcttttatgacggggcattcttgtgtaaatctacaggaattttctcatgaaaaaaggggaagacgatatttatgaaggatacaattgaattgcttcaggatctgttggaacagcatcaattcgaacttctgattccggaaaatgaaaatacagatcggcttcggctggtttacctgatgaatgatgcagttgaaagctttcttgtttttgtgaatgcaggaattacaggtttatatcagaaagactatgaaggagaactggattattctctgagcagggaaggtcaggggtatgtattgtcagtatggcagggaaagaacgtagttaccctgtttttccgtaagctggaactggaagtacatttgtatgattacggagagattgggcatttctgggtgaagggatatgaatatctcaggcagctggagtacaggattgccattatcagggataagctggagtatctgggagaagaattctgcacagaggaagaaatctgtctggcacatctggccaacttccctcctttgaattattgctgctatccagctgtaccggagcaatacattgttccgggagaaaatccctggatgccatcagaggctgcatttaaagtgatggataacctgtcaaaggaaacacaggatgcctccctgctcaggcttctcaagttgtataaacacttgccttatccttttatggccaggatggtagctggggcgcttcataaaagaaagcatcaggcagtggtacggcttcttacagagaaaataaagcatgcagccggtacttatcctgatcgttcttttggagcagaggcagataataaactaaaaaaattgctggaaaaagctgaacaaataaaaaggaatatgagtatcaaagaccaggatatccaggtggatatattgcgggaagagccctttactactgcccaggatgatgtggatttccatgtttacctgatgatctgggacacgaaagggataaattgcagggttaaaatactcaggataccaggagcaaaggaacttgtattgtaaacaatgtaactattaagaagataactgtgaaggtacgaaacagctgctaaacaattacatattcacatggagcaggaagaggataagtatatggacaaatatgcacgattccttgcaggacaggggcagaaaatctcgccggaggatagcgattacaaagagaaactgattcatgttgtacagtccttcagaacttttgatgaggcagcaggtctattactgcaatcgattggaatctgtgagaaactctggcagaagtatatcattttggcaggcacgatgaaaaatgccaggctgttcttacactgctggagactaaaataagtaaaatgaatgcattggaaatcttggattgacatattaatgatgcaagatataatagagataaagaatccattatttatggacggcagaaaaggggtgaaggaggaaagcagcatcatcaaagcacaaatgtaaaaagaaaaatcaggaggaaaagtaaaatgaaaaagatgaaaaagattttatgcagtctactggcctgtcttcttgttattctggcagttccggtatctgcagaagcagcagtaaaagcgccagtttgcccgaaaacacaggtacttcagtattgcagggcatgtatgaacaatacgcagcagcgtactggcggatacggttatatttttattaagaatcttgctaaaaatgcaaccattactaatgtaaagtcatccaataagaactatacagcgaccagagcaaagggactgaatgcgattgatgtagtgcagactcagaaatctattcggaatttcaagtatgatgttaaagacggcgaaagcacaaagctttcttttacagttaagcagaatggaaagagctatcgtttgtcctgcaaagtgatcttcaaagctcatgagccagtttttaagacatttaaactgggttccaaagatctgacttctcttacaagcggatattggatgttactttataacaaggttcccaaaaaaggcaaagtgaaagttcagattcagacaacgaagaattacaagattgattctatcactgttacttacagaaacggtgataaatatacatctaaaaagattaagaatggggcaaaagtttctctgaaaaatgccatgtcattgaatgtagattatcatactaccgtgaaaccaaagtattatcggaaaccaagctctgattatgtgggatatttctttggcggatatgttgagagtccgctttatgagagcttttcattagttatgatgtaaatataaccgtttgactgtagtgatacagggtatcgttcgatcatttgatttgatgattgggcgatgccctttttttatggagcagccgcttcacaatgaaccgctccccgtcaagtagacaattgaaaaaatataaatttttcctgccagtagaaatttatctgct

SEQ ID NO: 5 - DNA, 6143 bp, Unknown
  gut microbiota DNA sequence
ctattaagtgcccccgacaggataccggtgctttgcgcattttttcggacagaactatccgccccatttagggcttcccggtactcatcaatcttaagtttgatggcatcatatgaagtccccaggcgtgagttcatctgatccagtttttcctgctctgccgctaagcggtcagctgtatccttgtgctcctgtgtattttcaggcttgacgtaagcggtgccgttttgtttcatttcagcttgctttttctggatagcttccatcttctcttcaagctgatccagttctttctcaagtgcccggaacccacctgaattttcaggaacacccatttttgtccactcggacagcttgctttctacctcagcccctttatttgccaatgcttccagttcagagtttaattttttgtattcgtctgtttcaattttcgtttccgataactgtgacagcttctgtttcaggttatctaccttctgtgactgcttttcatattgagagcctaacctggaaaaggaatctatctgcttccggacagccagctctgcagtttccccaatgcccttgacactttcagccatctttcgcaaagatgcttccagtctttgcacaccaacctttgctcctgtttggtctacggttgtctcaattacaacttttccatccatttttgcgtctcacctcctacagccacttttccagattatccatttcttttttctgttccacactgatcttcttctgcaaggtgatcagatccttatttgcattcaaaaattccttttcccacttttccagcttcttgtgttttgccttcttctgccggatattgaccacctgcgaaaacaggcagtcaccaatctccatataggcccccaggaatgtccaccaatgaagatagggaagcgcacggatctcacatccctgaacccggttgatagcaggaatgatgatctgggcatcctgctgccagtccatggtatggggctttttcttcccatcatccttcattcccatatcaatgaagtccagtgccttttcacaggcttccgcgaagtcttccggcggtattgtctggtaatcttcatagaggatctgtaccatggtgtcactcctcaccaaggcaatctcctcttctgaagcatctggcagaaaaagatccgggtcgttcatggcttccaaaatatccagaactacccggaaatctgtccgtatcttataatcagtgccgcctacatgcaggtatgtggggagcttccacgcatccattacttatggtactttgccgtatatttgttctggcggctctgtacctttttaagccggatgttcatctccgcttcgattaccttacccagctgttccacaatctcctccacatacagcttcccgtttgcaagcggtgtaaacggattcatcacagaaaaaatagcggtagaaatgtcggcgttaaacagcccatccagcttctccttcaagccgtcccccagctcaaacagtgccttctgggtttccagtttcttcttcgccgcctcattcaaatattccaccaccttgtcataccggcgggcaatatcaatgtccgccggattaaaggagatggtaaacagatggttcccttttgcgtcaagaaactcatattcttcaatggaaatattggtttttatctgttttgccatggtctatgccctccttatgatcacgcagttgcgtccgctgtgaacgcttttgtagtcacattccaggttccctttaccctgtttcctgccttatacacagtaaacggtgtctggataccggatgtatcgccgcccacagaattagggatgatgtaaacatcttccttataagcccaaacacaggttggtgctgcatcctctgtggctcccggtttcagcagcacatccaccatggtggttttgcacttatcaccggtagccctggtgttggccagctcaaggatcttattggacagagcatcgtcataatcctcataatagaacggatccacatctgcctgggcttcatatccggaatggtgcacagactgctcacccaggatatttttcttcaactcgacgtccggattcagttcttcgttgtattcttccaggtctttgccgatccgcacataagcagctgtttctcctccaaaactggaatccagataatgcgccagatattttctttcaatcatatttttcttcctttctgcccatcagggctttaaaaatcatttgcaatggtccggtaaacgatccgtgcctggatcatgtaccgcgccagtccttcctggtaattcaccccggacaggttaggcatgttctgcaggttttccattttctggatcctgcatttttccccaaagtccgggtaattcttctgcctgtcctggtcttccagccagtccataaaagcctgtgcaaaattcatggcttccagattgagatcatcctgcccggaagaataggcctttacaatgataatggaaaatccataggccttctgttcatctccacacacgtatttcttcagaaccttatctgaatactgtgtcaccagggagaagctgtcaggggattctggggaaaagttaaagttaaggatgtccccgcacaattcctcaacctttggttcgaaaaatgccttaacagcatcatgttttgtcatggctgccctccttcagatactttgtgtatgcagctgccagttcgtccttccttgctgtcatcatggcctgatcccagtggtccgttgcaagagggtgccggaatgtgctgtatttcagcttcctgcctgtgggagtcttatggggcggtgaccagaatcccatcagttccccaccgtcaaagattgggatattggggccgtatatctcccccatatactgataatgtgcataagggctgttataagtgatatatcctgtatcttcatcggccgtaatgtccacgttctgggcaagtaccaggttatcggccggcacatatggatccattaaagcagccgcctggttggcaagaaacaacattccctgtctgccgccaagcttcttctttacaatctcttccggcgtaccgttccattcagctttcatgtccaaagatcatccccccagtctgtaatgctttgccagcggaaatgctgtgttatctgaaaaggctgtcactttaaatgcatccggcttgcatctgttcagcacctgcgcagctgtgtgccctgcagttccgttgatctcttcgcagcattccccaaggacaacaagatcatcttgggaagctgtaaagtgccactccggatcctttacatattctgtataggaaagataccgttcatcctttgggatccgcaccacataggtattctggacgcttgcctgggtaccgttaaagcctgtatttaccagtgatttccagaagcagttatggagcaccgtccggttccagtgttcctttttatccgtgctgtcgccggcacggatccggttgtacagggtaatggtgcgggtataattctggttcatactcacaccccctgatacaaaagtccggtgttccccagataccggcaaatgatctccttcgtcttcctggctttcccttcctctgtgaagtttgactgggacaggtcaaaggttccggattccccgtcattggaaaatgatgtaaggatgccgccctgctcagatgcctgctgtgagaccctgtccgcctgatacagcagttctgcaagctcacaggtacaatctttcacctcgtccgtaataagcccgaaattggaagccagacgactaaaggtgtactggttcagcacacgttctgcctgtttttcccagtatggatatactgcttctggcactgccggggaacgccccagcagatagccgtcagtataataaccataatcagcgtacatgaacgttccctcctttatcaggactgtgctgtaagggtgattgcctttgttaccgcagcggatgctaccgtgaaggtttcagtcaccgtgatgaagcctttcttgctgatcttcgcagtgtacgtacctgcacgcagattaaactctgcttttccatcagctcctgtcacaaggattgcaccgtctacgttaattcgtgcacctgcatatgctttcgggctggattctgcgccatccgttacagtaaaagtaactttctgggtagtagcgggagtacccggctccaggtacgcaaatgcacagccggtacggtcttcgttcatccgtgtagccggattcggaagtgcccagcccatacggaatacaacacgaagtgcggtcatatcctgctgtgccaggttgtacacgatttcctttgttaccggatcctgaataacgccctggtcaaggatcttcacggtcacatcctgacggatggagtacactgcctgaccgaaatcaccaaccacaagctgtgcaatttccggatagaagcctccattctcagggaatgtgatcggagcgccgtccagggtgtaccttgccacgtcctgcatgttgttcttgaagatcggctgtcctgtggtgtcacgaagaccgcggagctttgccttaaagttcatcggcgccactgctccagatacgccgaagccgtctgtttctacctttgcgaatacgccgccatctccaaggatcagatcgtaataatcttttccggtggcagcagccacattgtttcctgcctgccttgccagggtaatgatatctgcctgccactcccttgggcggttatccccaaaaataacagcagcatccaccttctggccaatggcctccatgatacgtggagtgatctcgccaaagatgtcaaattctgcgtcagaacgtactgcatccgggatcggcacgattacagccagctcaccggcattcagatatacgttatcccatgcctgtctggtggtctgcttcatgcctgtatcgccgtctacccagtaagcagttggcaggaagtccagcacacggatcctggtctgattgctggtcatgttgggaagctttcttgccatccccataaatacagaatttttcggcgcatcctggaaaatactggatacgatctgttcgcggataatcgcctccgcatcggctctgtttgtaatatttactggcattctttactctccttttccgagcagggatctcagtgcttcattcgcctgctcttttttagtctgaacatcattgttaatcccggaagtggatgaaaccaccctgggaacctgcacatttgactggaacaggtaatcattgtccttcttcagggctgtaagtgccgcctcaatgtcctgtgcctgattctttgatgcttttaaaatgtccacatccaaaagggccatgatcgccttttcattccttccggacgctttccggatagcgtctttaacagaagcatcaaaggcataatcggacttgatcttctcaatctctgcgtccttgccctgaagctgctttgtcagatcggatacttttgtctgtagtccggctgcatcgattccctccatagctttcagggatgcctgtgctgtatccagctgggtcttataggaatccctttctgctttcaaaggatttacttctttcccgtactctgacataacaaactcaacctgttctgctgtcagtccctgtgctgttaaatcttctcttttcattttccttttcctttcttttactcttggtttacgtgtgtgagccacggattaccgactgttttacgtctgatcagctgacgaaagcataaaaataacacccagcataacgctgcgtgcttcaccgctgtttaacggacagctccgagatatttaggatcacctccttcctaggcctcttcataagtcttcagaaagatatccggcttacagggatacagctccccatttacgccctggatgacgtaatcccccaggcgtgcgtgcatcctgccttccagtgtctggatcgtacaaccgtatacggatatatgtccgtcatttaggctccggtcaatccagactttttcatctgccacagcctgggtgaaccagggtggggattcatattctggatcatccgtcagctggaaggcttccacgactacaggtttctttcggtatttcaacattctcacctccttacttgcgccg

SEQ ID NO: 6 - DNA, 5476 bp, Unknown
  gut microbiota DNA sequence
gaattcttgctatatttatgttaaataatctgatatgtatatattcctaaaatctttcgtgaaccttgttagtccttttgtattccttttttttctattatacaggtctttcctctctttaagcaagccttctctggtcataccggaatatttataaaacaaggcgcctgccctggttatttccagaggaagcgcctcgttgatttcttttttaatctttaattattcttctacaacctcaagtacatccattggacatgcttttgcacagataccgcaggcaatacacttggatgccggattgccttctgtctttatgatcaggccaaacggacatgcttctgcacatttgccgcagccagtacatttcttcttgttgatcatatatacgccttttgcgttctgtgtgatcgctccttctggacatgcctctgcacattttccacattgtggacatgctactggacgaacagtctttttttctgtaatctgaagacatgctttgtctggatcaaattccttataaaatgcctctgaacaggcacgtacacattccagacatgccatacaggtactgccctttttaactttcagtttcttcatgatgtaatcctccgtgtttttttctattattttaacattaatgtaaaaatttctcaataaaaacatatctgctgataacagtgaccgtacaatgaaatccaccacagattccagttattcaacttccttgtattccttcctctgacagaaatgctcggatctcttccggcgtcagcagcgcataaatacttttgtgaaaggttgctgctacttccagttcaccataatacccggtacgtacatcgcagtttccatgaagcgccttatccagggttattttcagatcatttccctggggactgtccataaaatgtttcagcatccgacagcaggtgtgggtattttcgtaatagcgtcggtatgcaggatgaaattcccgcatccatccactggatgaaacacagaaaagtgctaccggatgaataaccggctggtacagaagattccatttttcctgctgcaatgaatctgacgcaaatgcaagaagggagtgcttcaattcttctacaaaatccggatactctgcttctgtcagggaaatgattttctggttacggaaatattgattaatgttggttgcatcaatttgctcaggcgaaagagattgcagataccgtgacatggttttcagatccgtttccgcatgttccagagtatgattagtgatcttctgccaaagaaactgctgatattctgtcacaggtgtgtcaagataagtcatccaaagatactgggccagcagctgggcatctctggtcttcatctgatatctggatgaatcatcaggatgaaaatgggtttcctcaagcatatctgtcaattgatccagagactgacaaacaggcagctggctggtcagacgatccatctcactgatcgccttctggatagacatcagctgcttctgtaaaacattcaattgtttatgcaagtaaaacggagttgtgcgaggctgcttcaatatagagcggatatctgccagcggaagatctgcttctctcaatttacggatgagaaaaagcttctgtatatctttttccgaaaaatcatgatagccgtttgtgggattgacacggggagtgatcatattctgatcaatataataataaatagtccgccgtggtaaacctgttttttgaatcacttcctgtattctcatcctggtctcctcaaaagtgttcacctggtgtatgctttttttatttattataccttgtgtaccaaaggaaatctataaaatttgtaaaattcaccagaaatcaatttcgtcaaagcgaattgagatgaaactttttgtgaataatttaacattgactatccaccaactgcacccactataataaaatcaagaaaaatcttagaagaggtgataaagtatgttaaaaaataaagtcgcaattgtcacaggtggaactcgcggaattggctacgctgtggtagaaaaattcttgcaaaatggagcaactgtagtattattcggctcccggcaggaaacggtaacaaaagcgattgcttccttaaaagagaaaaatgagaactgggaagtttccggtgcatggccaaccctgacggatgcagatgccatgacagctgaaatatccaaaatcaaaaataaatatggcagaattgacattctggtaaacaatgctggcatttctgacagtgcatctattgagaaatatactgctgaacatttttccaaaatcatgaatctgaatgtaaatgctgtaatgaacgggatcctcccggtgatagagatcatgaaacagcagggcggcggctgtattctgaataccagctccatggtaagtatctgtggacagcccagcggggttgcctacccaaccagcaaatgcgctgtgaatggtcttacctggtctcttgccagggaattggggcctttccatatccgcgtgaacgctgtagctcctggaatcaccagaaccgatatggtagccgcactcccaaaagaaatgatccagccgctgatcaaccggattcctttgcgcagaatgggtgaagctgaagatgttgccaatgcatttctattcctggcaagtgatatggccagctacgtcacaggggaaatcctgtcagttgacggtgcaatgcgctcctgaggaagactctgcgttatgcagagtgctcccgaggatgtcaagtcattgctacaaaaaatatgcggcttttttgccacgaaaatggcttaaaaccgcatatttctgtatagaggatgttatataattgtcacaaaacagatggagaggatgttacgtcattgtcacatttatccagcaacaaatagtcacattattaccactatagccagcctatcaaatcaagcctagcgaaacttagcaaaacggatcagaatactgactggttcaccagaggaatatgagacggaaagaaacccaaaactactattactttgacccagatatgaaaagttttaatctcctgatcagtgtgcttcagaacgcagtagatatcacctctgcatttccagacagaaatggtttgtaaaccctgcaatcgtcttatagaagttctataatgtcttcgaccgttggcagattttcaactatagcaattccaggaaacagacatctgccagccaggttaattttacagaaatgcaggggataattatttccgtggcagaaaagcttttacatctgaacgaagtggaaatcgcttctcttcacaaaaatccgcctgccggagatcattggaaatacacttacttccattggaactatgattgatcctgccagtatgatcaatgttatgaccactttgttgtctatcattacaatgccggttatggttatgctatttcagatgatcctataaaaatcataattgacattcaaaaacatgtagtatataatcgttttgttcatcggagggtgatttgttcgatcagaaacaatagctggataagaaggaagactgaaatgtccgctttcttattcagctttttttgttatctgcctgattcgactgaattttcaataaaatcaattacacaaggatgaatcacagcacatggaaaaagacacatcatttaccgaaggaaaaatcatgcatcccttacttctgtttgcagttcctgtattgctggcactgtttctacaggctatgtacggtgcagtaggtttgcttattgttggtaagtttgcatcttctgctgatgtatctgcggtatctaccggttcacagattatgatcacattgacaaatctgatcagtggctttgcaatgggaacgacgattttgcttggccagcagattggaagcggtaagaaagaagaaggcggtcgcaccgtaggaacagccattctgctatttgccggaattgctgtgatcatgtcagtcattcttgtagtcttcgcccctcaggtcagcagtctcatgaacgcaccggaagaagcttttcaaaagaccgttgattatatccggatctgcggcggcggtatgctaatcattatcgcttataacctgattggctgtgttttccgcggacttggagactcccggacaccattgatcaccgttgccatcgcatgtgtattcaatgttgccggagacttgcttttatgcgccgttttcggtatgggtaccgctggtgccgctattgctactgtatttgcacagattgtcagtgtaatcgtatcttttattcttatcagtaaaaaagatctgccatttacaataaaaaaagaaaatatccggattcacaaaacttacctgcgtaagatgaccgctttcggcgcgccgattgccctgcaggatcttctcgtaagtatttctttcctgatcattctggcaatcgtaaatggtatgggtgtgattgcttccgccggtgttggtgttgcggaaaaagtctgtgcttttattatgctgatatcatccgcttttatgcagtccatgtctgctttcgtagcacaaaattatggtgccggacgccttaccagagcaagaaaagcattacactatggcatcgcagtttcctttagtgtcggtgttgtaatgttcgtaattaccttcttccatggagatatcctggcgggtattttctcctccgacccggaagtaatcgcagcagccgcagattacctgaaagcctatgccattgactgtctgttcactgctatcttcttctgctacaccggattctataatggaattggcagaacaagatttgttatgatacagggaattctcggtgcattctgcgtcagagtgccggtatcttacatcatgagtatccagccaaatacttctctgttccatatcgggctggcaacaccgatgtcctctatattacagttaatcctctgtgtaggatttatgctttggctgcaaaaaaacagactgttagatgacaaaccttaatactctcattcgttttgatcggaaactgttttcctcacagtcaacagactgctgaatagttattttctctctacaatatgatagtaagaacgcgccgtcataagataaatcaatccatacacaatggcaaagatcagcactgttcccgcagtacatccaataaacagcttcgtattcgtcattccaaagagcaggagcattcttcgaatcattggaaatgccatggtaatatgaagcattgccattaacagcgggaggaaaaataccatcagaatctgtctgcggacagaacttctgacctcccggcggcttaagccaaccttctgcatgatctcaaatcgcttctgatcttcatatccttcggaaatctgtttataataaataatcatagctgttcccataaggaaaagagaaccgagaaagattccgataaacaagagagaaccattatccgcataataggactcatatt

SEQ ID NO: 7 - DNA, 12095 bp, Unknown
  gut microbiota DNA sequence
ctccctacagatgctttggcaacgacaaaaaagcccttaactatggttattaaccacagctaagggcttagtttataatatggaatttgttcagagccaagctccgaactttagtctgcaagccacctgttaattgttccgttacccataaaccactggataacaagaataatggcacttgctatgactgttatcaatttgttatcaaaagactaatcgaaatcgctgaaatccgcataaacactggcttttttaagcaactcgatttattcaaactccacagttcctgtcggcttcggtgtaaaatcgtaaagcacacgattgataccagtaacctcatgtgtaatacgatctgtaatatggaccatcaattcatgaggaatctcagcaacagttgctgtcataacatcggtagtgcatactgcacgaacgatacagcaccactcaaaagaacgctttccgtctttgattccggtagatctgaattccggaacaaccgtgaaatactgccagattttcccttccaatccattcttttcaaattcttcacgaagaattgcgtcggattcgcgtactgcttccaaacgatcacgggtaatagcgcccggacagcgaacaccaagtcccggtcccgggaacggctgacgataaaccataccatgaggaagaccaagctggtcaccaacaacacggacctcatctttaaaaaggattctaacaggctctacaagttcaaaatccatatcttccggaagcccgccggcattatgatgtgccttaataccttcttcagactcaagaatatccggccagatcgtaccctgcgccaggaattcaatcccttcaagctttcttgcttcttcagcaaaaacttcaatgaattctccaccaataatctttctctttgtctcaggatcttctactcctgccagtttatcaagaaaacgatccgtagcgtccacataaacaagatttgcattcatctgattgcggaacacttcaaccacctgctctggctcacccttacgaagcaggccatggttaacatggacacatactaactgctggccaattgctttgatcagaagtgctgcaacaacagatgaatccactccaccagaaagtgcaagaagaaccttcttatctcccacctgctctttgatcaatttaacctgttcttcaataaatatctgtgccagctccggtgttgtaattcttttcatatcagccggtcgtctgatttcagtaacgttcattggaaattcctcctcatccattaggtttttttcaatgccgattgattgtcacttaattataaatgacaggaaaatatttgacaacctttatttaaatatctattctaaagtatcttgcttcatgtacatcccgcctttctgcttgctcacggtcataatctttaatatccataatgacaaaacattctcagtcattcttggtcagctatggcttccacatccatgctcgccacatgtatgtccttccccgtggctgtgctcatggtgagaacacttaacatctggattataatccagtgtttcattaataaaagcttctactgcttcatccgcatctccggaaactcctccaaaaagcttaataccggctgccgctaatgctgtctgtgcgccacctccgattcctccacaaatcagaacatctgcatttaatgcattaaggactcccgccaatgcaccgtgtccacttccattcgtatctactacttctgaatatacgacttttccttcctctacatcgtaaatcttaaatgtctctgtgtgtccaaagtgctgaaaaatctttccattttcatatgttactgctattctcattataccttctcctttttccgctgcatatttttgatgaatctcctgcttgtaacatcctccaagtccacagttactgctctgaccatcacagattctgaaatctccaccttctattctgagtggatgtccatcaatgagtgcatctgctattttcttcctggcaatctcgtaaattcgttgaacagttgttcttgcgacttgcatagatgctgcgcactgctcctgactataacctttcttatctaaaagccgaattgtctcgtactcatctaccgtcagaacaataggtttttttatctccgtagcatctatcggaagaaattctaaaacattggggaaatgacagacttttctgcattttactggtctcggcataaactgctcccttctttcttttcttatatattatcttcataaagagcatatgtcaataatgtttttggcatatgtcaattatccgattgactcatttcaccgaaacaagtatactatgttcataaaggagctacatattatgaattttgaaaattactttccaatatggaataaattaactgcaacgcagaaaaacctaatttcagatagtttaatcacacagcatgtaaaaaaaggaacgatcattcacaacggaaacctggattgcactggattattactggttaaatccggacagcttcgaacttacttactttcagatgaaggacgggagattaccctttaccgtctattcgatatggatatgtgtcttttatccgcctcatgtatcatacagtccattcaatttgaagtaaccattgaagcagaaaaagatactgatctttggatcatccctgctgagatctataagagtatcatgcaggaatctgctcccgtcgcaaactataccaatgaattaatggctacccgtttttctgatgtcatgtggttgattgaacaaatcatgtggaagagtttggataaacgtgttgcttcatttcttttagaagaaacctctatcgaaggaacaaatgaactgaaaatcactcacgaaaccattgccagccatcttggttcacacagggaagttatcactcgaatgcttcaatattttcaaagcgaaggtctcgtcaaactctcccgtggcaaaatcaccatccttgattcgaaaaacctggaaatactcagaaaatcataatagtattttttaataatccataccacatgcatatgacctttcgatcagcgcacggtcattgaccactgcatcgtagaaacggaatccgccggagaagttgtatgtttcatatccatttccttccagaatacggctcgcaatataactgcgcagcccactctggcatatcagataaacaggcttttccttctcaacttccttgatacgttccctcagttcatctacaggaatgtttttaaatccattaatatgtcccctgttaaattcacctatagttctcacatccagcaacacagcacttttatcttcaaagattttatccatatcttccaaatgccattgttttaaggtaccttttgctatattttctatcataaatccagccatatttacaggatccttggcagaggaatacggcggtgcatatgccagatccagatctttcaactggagtgccttcagccctgcatggatcgctgttgccagcacatcaatacgtttatcaacgccttcatatccaataatctgagcaccaagcaagcgataagtctccttctcaaaaacaactttcatggtcatgacttttccgccaggatagtaaccggcatgactcataggagaaagaattactgtatctacctttaatcctgactttttggcgttggtttcattgacacctgtagtagctgctgtcatatcaaatactttgataacggagcttccctgactgcccaggtaatgactatcaccgccgcaaatgttatcagcgataatcctaccctgtttattggctggaccagccaaagaaatcagcgcatcatcacccgtaacataatgttttacctgaactgcatcacctgcagcataaatatccggtacagaagtttccattctgtcattcactacaatacttcccttgataccaagttccagaccagcttcttttgctaacgctgtgtctggtgtaactccgatcgccagtactaccatatcagcatgaagggagggattatctttcaatagaatctccactccgttgtctttttctttaaatccttctactgtatagcccagtaccagttttatcccatgctttctcatttcattatggatcatggatgccatatctggatcaaaaggattcatcagctgcttaggccgctggacaatcgtaacatccatgccaagctccctcaaattttctgccaactctaagccaataaagccaccaccagccaatacagcagatctgggatgattcttattaatatattccttgattcgtaaagtatcttctactgtacgaagtgtaaaaagtttattaatgcctactccaggaagctttggctgtgttggcttagcgcctggagaaaggataagtttatcataattttcttcaaatgttacaccattctttaaatccttcactaaaacagttttacgatccggatatatggagataacttcatgatgaattttcatattaatacggaagcgtttaaaaaaactctctggtgtctgtaatgtaagttcttccggatctgtgatcacgtctccaatatagtatggaagaccacaattcgcataggaaatgtatcctgatctttcaaatacagtaatttctgcatgttcatccagtctgcgtattcttgctgcggctgtagctcctccggctacaccacctactattattaccttcatattattttccacctttcctgaataagcagcaatgccacctatattatctccttgtctttctcttttatgaatttattataatccaaaattcatatattttctgtgatatcatcacgttctgtactggctgatacaaaatcagggattctttttttaagcacaaataaaaatatgtggaataatagcaagcagtcttcttgtataactttatattgtgtgcggattcattattctatctcccactgaacagcgatcgctctaaccggagaaccatcacatccaactagtttcattggtaaggcaataacatacggattttcaaaatcaattttatcaaaaaaagcccagttttctcctatcattaatctattttctgaaaacaaatcatgcaccggaaattctgttccacctgtttgatcagcattaatagtatcaataccgataaaacgaatacctttatctactaaaaacttcgcaacttctccatttacatatggatgatggaaaaactcttctgtcccacgttttttataccagtttgtattgaataatacaactttaccctctgttatgtcatttttatatggttcaatatcttccattgtaattgcttcatctgctttcttttcagtaacatgtacaaccactgcgtctcctaaaaagaaatccagttccatattatcaatagtttctccagtatttgaaaaatgatatggtgcatcaacatgtgttccagtttgcgttcccattactaatgttgataagttatatccttctttttctaaagttgttgcaactgttacagatggttccggatctcccggataaattggtgtatcagctgtaaactcccatgataaatcaactattttttttatttttttcatttgtatatccctttatttatcattatatgcttttataattaagttcaaataatcttcctttgtgatttttcttgcgttgtcagcagacaaaacattatttgcagatcgttcagctatagtttcaaaattctcttctgtaataccttttatatctctaattgtaggtatatttaattttctattcaatgctttaacatattctacggtttttaatgcatattcttcatctgtcataccatcttctcttttgagtcccatcgcacaagcaatatctacaaagcgctctggacaagctggaatattatattccatgacataaggtaagaacaaagagttggcaactccatgaggtgtgtcaaaccaagctcctaccgtttccgcaaatgcatgtacagctccaacatttgatgaaataaatgacatgccgccaattgtacttgcgatcatcatatttcttcttgcatttctgtcacttccatcattatatgctttttccagattttcagaaatcatagaaatacctttaagtgctaaagcatctgtaataggctgatgcaattgtactgtatacgcttctatacaatgtgttaatgcatcaactccgcatgatgctgtcaaagattttggtaagcctaatgtaatttcaggatcacaaattgccagtgtaggaatcatgtgaacagggtctcctactgtcattttatactgtctttttgtatctgtaataactgcacaccatgtaacttcagctcctgttccagaagtagtaggaatacaaatgagtggcaatatcttcttctctaattctgtgtctccccattctattgtagtttttccatttgttacaacagcgccaacagcttttgcttgatccatagctgagcccccgccaagagctattaatgcatctacgtggttttcttttgcaaatgcagccatttcatcacagtcttcagctcttggattcggttttacatttgtcaataaataattcacaacattttctttgtcaaggctatccttcaggactttatagtgctcagaggatgctaaaaaagagtctgtaattacaagtacttttttaaagcctaaatgattacactcttcgcctactgtttttaacactccgtatccctcaactatacgcgtggcatgaaaaaaattatttgtttctaacatggttggtctccttttttcttttgttatttttcattatatggtatgtacttactatatactcaagcctttttttgtaatttattatttataaaacatttatataggagtgaaccaaccagcaaaatgtacaaaatactattaattcctatcgaattatcaaacatttcaggactttcaaaacaaattttattgttttataaaaagaaaaaaatctttatctcagagtttaaaaatgaaaaaggtatcgtttttatggcttagaacaaatagatattatagttactatacagacattacaaacaattagtttatctttaacagaaattcaaaataatatagcacaaaggaatcttcctcttcatataaacactttacaaaatactttgtcggagcttttcctctaaacatcagatatctctgttcttccagctcctaatttcacagtttccatatgtgttatcgctaaaccctgaagtttgcatcattgaaaaaagggtataaaaaaacagtctgctctaacggaaaataattccatcaaaacaaactgttcttcatattcagatgttcagccacaaaacacctttttgacaattcaataaactgattaattgcccagtatttcccctacaggctttctcttagtagcaatccctaatcgttccatgtctaatttaaaaagttcacttggatatccatatgcatcaaatccctctggcttgcagatatctctgttcagatactcactaagttcccattgatactttgtttctttctccaactttttatcaaaatactgtgtatccattaccattcgattaatgccaccaactgctttcttaccatgagttttggttacaattgtatcgcctgacattttaaaatactgccctatctgatcctcggaatatcccatttcctgcatcatcccatgaatcacacggctgatatacattgcatagcaattccagtttcttggttcaatatctgtcattgctattgtgtaacgattactagcatttacaataaacaagacatttcttccttttattttcgtcaaatgtgtgtcccagcaaaacacaagtgaagcaccattgctttcttcaatctttgttgtttttagtcgattttgaactgcttttgttgcaccaatctccatgtgtatcacctgctcatctccatgataactcccggatgacgcttatcttcctttatccatttttcaagttcccagaatttatctgatgcagctttttatcatcatttagaaaatttacatactttttaacaagttcttccatataattttactgccagcctgatattctttctcgaaatagtttccaatcctttttttcttatgtccatgattttgaacctcctcaatcttatgttagtctcaacaaacaatttcagagatgagactgacttgaaactataactttataatttacctacaaatcctgggattatcgcattttgctatatcatagagtctcacttagtctcagatctcgcgagacttcgttgagactaactttgaaatattcttgagtaaaagtttgggtgtcacattgagtaccaaatttactgtcatcagtcaaagattctagtgatatcctgataccggttaattacacgataaatctctacatactcactgcccactttatagataatcacatactcttcccatatcgcatatttataatctgtccgaaaactgacccgtttggagagatccgccccaattccaggaaacatctgaaggttttcaaatttaccgtaaatttccttcatggtctttgccgcatattcctcgttgtcttcagcaatgtaatcccgaatattcttcagatcctttgcaacaatcggattgatccgcagttttaacatcttattcccccacaagtgattttaattcatccagatccagccagccttctccgtctttcactgcttcttcggcttcctgcagcttcatcagaagctttttctctgcccgatcacgctcataatcttcaatatccatgacaacgaaacgtcctctgccatttttggtcagatatactggttctcctttatgacagtttttcaggacttcattataatttctcaaatcagatactggtaaaatatttgccatattctttcagctcctttctttgatttatattgtttctgctacttctattatacataaaaagctgtaaaattcaacgtgaagttttacagctttattcaaactatgctttttacctaaaagaagctgtccactacggacagccccttctctataataagattttcattactgatatatgtccaccaatcctgtttttaacattgaatctgaaaattcatatgccgctccatcaccgttaagattcagatacatattattcaagtcattctcatttacaatccatgccatattcacctgtatactctcaccaggttttaatgaagtaatatagtttcctccatttccataatcctctgatacactgctgtatgtcatttcagctgtacgtgcaacaccatcccatataacacgatcgtagtcatctccgggctgttctgtcggatcgtaaatttgatatgctccatcttcatggtccatcaacagcaatgtaccgatataaagcatatggttaatttcttcatctgacttattggtataagtaactgtcgcatagacaagcttttgtttcacactttctgtttttacgatctcatccactgaatcaatgccattaccggacttaatataagacagcgtattatttactaaaattccatcagtcccaactgcatcaatccattcttccggcacattattctgaccaagcagctgcagattgtcccccacctgaacagcatcaacacaaactgaaatcttattattttcaatatagttgccatctctgtcttcaccagatgctgatatatcaaacacttcacctatctgatgcattggcaatttattatctgcaatggaagtcatcactgcttctcccgatgattcttcaggggataccatttcgctccacgtatacaaaccagccgtttcaatcattgtatcattttcaatgattacaaggttttcaaccactttaatggcatcctcttttgaaatatcatcaccgatataaacagtaattacacgatatacatccgggcaaaggagataaatcctttgattaaaagacccatccgctgccaggtcattatatttaaggtatacaccttcataattgccaaaaactctttcctcactgtcaacaacattcttatcttgcattactttgctcaaatcatcctcatctaaaagcacagatgcaaagctgaatcctccggttcgattatgctcagtatattccagatgtaattcatcaatccattccataccttctggaatatatcctgctgagatatctatatcatgaattttttcaggaagattaattttccctgtgctgccatccgctttaattccagttatgatactgtagattccttgtttttctaaaaacatatgatataatttggtacctgcataggctatggtcgatgtagccaatacacatacagctattgcagcagccactctggcacctgtccattttttcactcttcttgtctgaatattaaccaccttcgtgtcctgaagctgttttttcacttcgctttgaatcatcgtgtggatgaactccggagtttcaggaatatcttttttcatatcttctaacttcatactgtcaacgcctcactttcctgtaaattacgcttaagttttccccgtgctctggcaagccttttttgaactgccccctcggttatctctagaatctgcgcaatctcttttatgttgaaatcctcaatataatacaaaataactggcattcgtaaatcttctttcaaagaatttacagccctgtacaagtcaccgtagtcagttttctgatctgcctcaatttctgtcatttcattcatcccttccagagaaacaagtttactcgactttcttaaaagagtataacactcattgatcaatatacgaatcagccatgtcttggcatatttgtcatttctcaaagttccaatctttgaaaatgccttaacaatcgtttcctgaatagcatctgcacaatcttgatcgttaattagaattgttttggcagtagaatacaattgcctctctgaattgagaatcaacgttcctaattcctctttggtcactttaacaccaccttctttagccggccggcaattttcatttacatagattagacgtacattttttcaaaatatccccacacaaactttatttttttaataccagagggaattagatctttctcctctggtaatattgtacacctgtcttacttcttacccatatacaagaggtacgaaaagcattgcacacttataacaaccaatatgccattctctaaatggggagaaattttgggttctcctactctggcaaatgcgatgctagatcgactgttgcatcattcacaggttatttccatcaaaggaccgtcataccgtttaaaagaaaaacgagcctttatggaagcacagactgaggaataaatcttggaaaatatacatttttattttccactttttaatcatttttatattgacatttacaacaacgtcctttgtaattctttttccgcatagtgcttctcctttccccaaaatcacttttagaaaaaacactatgttcattcacacactccattatccactttttcgcactttctattatccagtaaaagtgaactttatttgctcacaaaacatctattccaccacaaaaataaggctccgaacctactatgtagattcagaaccttaaagtgtatagattattcatttttacaaaaaactgaataatgaggtttgcgaacaaacaatttttattattcaaactcggcaagtccaaagatgttattaaatatatttgtttaagttttatatcttttttgccgttattttatttctattgcatatattattttggctcgctgattttctgttaacaatttgttgccagcttattgtaaatggtgtaaataagtttgacaacatttattttgagaacactgcatcatttctggaaagaaggtacacacaatactgattcatgctgattccttctctctgcgaatgctctgccagtgatctgtgcagacttctcggaattctcaatttaaactgtccagaatagtcttccagactgtctggttcatgaatctctacaccatcttctaatgcagcttcaatcca

SEQ ID NO: 8 - DNA, 3073 bp, Unknown
  gut microbiota DNA sequence
atgttagcggaacccctactgtaaagtaatcttttcgggttttatgccgaaaaagatacattgccagccaagcacctattgaacctcctgcaaatgaaagtcccagcaatgtgacgatccttattctggatctgtgctcaattgccgctattttatccatcgcaaaagcagcaaaagtaacaatatttatcacgatcagataaaaggacagtattttatttcttttaaagaaatcccaaaatgagaacgtaatatgatctgccagatttccttttacgatcagcagcaaaatgatttgtataacaaatatgcatgctacaaagattctggacatcatattttctttatgggattttctatcaaaaataagaatggccgctataatgcctgccgaccctcctaatagcgatacaatggttagtaaggcgtcgatctggcctgtggcagtatggtcataaagcagcttattaataagaaaaaccatcaaaccaaccacattaattacaacaagataatattcaaatgctcccaatttcatttcattctccccgtcattagctaatagtaaaaagactgccagaattcctgatgcagaacctggcagccattcttattcgggatttctcccttttatttacgattgtaattgatcaggcatcccttcaggatgatctcacgttcatcatccgtcaattctcctaaagtcacttcaaatttctgaagaccgctctcttttacaacatatccggtgatcacatctgccttttcggcaactgctttctggataccggggaaaaacagataatctccatttgtaaagggcagctcgccttctttgatcaggaaaggaagcattccccagttgatcaaattggagcgataacgcttggtagcatactcattggcaatgtttgcccatccacccaataccttctgacaggatgcagcctgctcacgggcagatccatctcccggcttcacagcaaagatcgtgcttccaacgcccaggttgccctttccggcatctggaaattctttctggatggtttccatcacaggctttaactcaggaagtgctgtgagaggacattctcctgcctggatcgctttctgtgccttctgtacctctttggcacggcctacatacgcaggatccttacgggaaagcgtaaactcagcaagcccaagcggattggatctgtaggaagacgtctcgccagaaggaatcaactcatccgttgttgtaacaggatcatggatctcagaaacaaccttcagtacaagattctctgcaagaggtgccatttccggccagtctttaatattcggtccaaactggatctctacagacggatccgcaacacccttgctgtcgaatacacggttctcataaattgtcttatcaaagaagtatttctggcctgtatatccaccggtatattcctctgcagatgtaaggaagcctttatttgctgccgtagcagcaatagatctggcatccataagagcaacagaagaaatctggccattctggatcttagatccttcacggttcgggaaattcctggtagtgtgacggatactgaatgcattatttgcaggtgtgtcaccagcgccaaagcaaggtccgcagaatgcagtcttaacaacagcacctgtttccagaaggcttgccagcactccatttttggcaagttccatatagattggcgtacttgccggataaacacttaaagtaaaggcatcataaccaatactgctgcccttcaggatatctgctgctgcacagatattttcaaatccgccgcctgcacatccagcaatgatcccctgatctacgtaaagccttccatcctttactttatctcttaaagtatacggaaccttaccatcaaggcttaccagggctttcttctccacatctgccaaaatatcatccagattggcattcaattcatcaatggtatatgtattactcggatggaacggcatagcgatcataggcttgatctctgaaagatcgatctccacacatccgtcatagtaagccactgcacctggcttcagttctttataatcagactctctgccatggatctcataaaactcatgaatcttctcatctgtctgccagatagaagaaagacaggtagtctcggtggtcataacatctacgccaatacggaagtctgcacttaaattctggacgccaggtcctacaaactccataaccttattcttaacataaccattggcaaatactttgccaatgatagcaagcgccacatcctggggacctactcccggacggggagttcctttcagataaatagcaaccacacctggcatattgatatcatatgtctgggaaagcagctgttttacaagttcaggtccgccctctcccatagccatggttccaagtgctccataacgggtatgactgtcagatccaaggatcatcttaccgcaggctgcaagcatctctcttgcaaactgatggataaccgcctgatggggcggtacatatacaccaccgtatttcttggcacaggtaagtccaaacatatggtcatcttcgttaatggtgcctcctactgcacaaagggaattatgacagttggtcagcacataaggaaccggaaatctttcaagtcctgatgcacgtgcagtctggatgatccccacaaaagtaatatcatgggaagtaagtttgtcaaatttgatctggagcttctccatattaccggaggtattgtgtgcttccagaattgagtaagcaatggtattttttgcagcttcttctttggaaaccggaaaatctgcctgtcctgccggaatgatgtcatgtccattctgcagatatacacctgtatcgtataatttcataatccctttctcctcatttcagttttttaaactagtacatcgaatattaagtttcgatgtactagtatagtgaaacagtcaatgctgttcacctgattaaagcctattataaaataaaattttcctgactgcaagacttaggttagcagagtaataccagtcaagcggatattcgcaatccgct

SEQ ID NO: 9 - DNA, 20253 bp, Unknown
  gut microbiota DNA sequence
gacatgctacatatagttattatccacagttatcgagtaggtgttatcaatgccgataacaaaatgataacattagctcgtataggcaggataatatggatatatcaaataatcaaaagaacgagaaacattacagagaataattcctaaacaaaaagcgttagtctttgtagagtttgaataatagattaaaatgagaaaagatcagtaaataaaagatcagtaaataaaagaccagtaaataaaagacatttgaaagaagatactgaggacaagaaaagagttttgttttcagtatctttttttgatggatgttttattttgcggaaaattcccgggcaatctgggcgattagctcaagctgttctatagacagggtttttaacagttcagtaagtgcatccagtgcatgtggggctttggtggtatcatcaaaaaaagcagcaggagatatctgtaaatagtcgcatatatagaaaaaacactgcatggaagggaaggcttttcggttttcaattcggttgatataactgccattttgccccaaatccaggctcatttctctggcagacacttttttctgttctcgtaaggatgttaatcttgaggcaaaagtctcttcatttatcataaacaaactcctttttcaacactttatgacattatatgatatatttaatatttcgataagataataaagacatatatttaacgataataagataattaatatctttacaaaaaagagttatctaagctgtgaatgtttttcctctaatgattggagagtaataatatggaatccgttagttggcgaaaaataatattcactatacttagtacatcgaatattaagtaactaacatattgacttgtctgatttttcatctgctgcattgtcgttggtcgccgtagccaccgctacgccttgcatatgaagaaaccattctgcgtcaatatagcagaaacttatcttttgatgtactgatgttatgtctgtaagactgcggtatccatatggtggctgcgaaaaagggttgcgaaaagattataaaaacatataaaagaaaaacggaatgtgctatgataaaaacactggtaaagaattaagcgatatagaattggggggtaaagaaatggaaagacatgcatttgctatgcagataaaagaaggaagaatgaatgattacaggagaaagcttgggagaatctggccagagctgacagcgtttctggatgctgctcggattcgaaatttcagtatctggaatgcagaggatctgatctttggatattatgaaaaagaccggaataaggaattggaccggcagtcacagacaacaaaggaaaaactgatcagtcagctggaagatacatttacctggttgtctgtgcctggggaagatatgcggcttatgtactataattatggtgttgtaagagagaataaagaaatgatccgtcacagggtctttatgacaaaactgaaggatggctgcgcagaggaatataaggcacgccatgatgctttgatccggcagcgtggagatcaggtggattcaggaccagacagtaattttactatttggagcgcaggcggatatattttcggatataatgagattgatacttctatggaaacagaggagacaccagaagcacgggaggcaaccattacctgggagaaacgtcagctggagatcatggattggatcacaaatgacgtggactggatcacaggaagtgtacatgccagcgtaaaacggctgggatggcataactgaacagacaggcgtaacggtttggatggcatgattgataggccagcttggcagcagctgacaacaagagaacggcaccgggaggggaagcagatgattatcagaaaagcagaaataaatgacctggaacagatcatggggatatatgaattggcccgcagttttatgaagaagcaggggaatgcgtctcagtggggacagacttatccgccggaaaaattgatccggaaagatatagaacaagggaatttttatgtatgcgtgaagcaggagcggattgccggtgtgtttgcttttatcctgggggacgatcctacatatcaggaaatctggcagggagcctggcacagcgatctgccttacggagcagtccatcgtgtagcttctgatggaagcgcccgcggactgacaaaggcctgctttgatttttgcacaaagataatagattatataaggattgatactcacgaaaataataagcctatgcagggagccttacagaaatatggatttcgtgaatgtgggatcatccacgcagatgatggcacaccaagaattgcgtttgattacctgaaaaactgaacaggcggctgatctgctttatgctctccaatgattttttccatccagatcatgtcataccagcgaccgaatttgtaaccgcagttatggaacagccccacagtctgaaagccaagatgggcatggaactgctgactgtttttggtaagatattcatcttctgtctgtggataaccaatgcatgcgtacagattcaggatccccattttttttaaacggtttgccagagcatcataaatcctgcgtcccaggccgcagtttctggcattgcgatccagatagatggaaagttcgcaagaccagtcataggcagctcttcctacaaaagagccagcgtaagcatagccctgtacctggccgctttgttctattaccaggtatgggtatttttgcatagtgtttttcatgcggatctgaaattctttcaaggttggaactacatattcaaaggtgatggctgtgtgctttacataataggaatagatttccagaatgcggggagcatcttcaagaacagcatttctgacggtgatggtatccatagttattctcctttgtatcaagcgtctgaaataaaatgaaaaagcctgaaagcataatgctctcaggcttctataagtagtcgaagcgacgggattcgaacccacggcctctgcgtcccgaacgcagcgctctaccaaactgagccacgcttcgtcaactgcaagtgatattatattaatttctgaaaggtttgtcaagcattaaatgaaattaatttcatgattccagagatggttcatatatattaatgaagcgagaatcaaaaggggcaataacttgaacgggtatagaagatttattgcatatgtatatgaatacagaaatggaagaaaagcagagaattgtggctttataaagctggaagtgcgagaaggcaaatgtaccatggaaattcatctgcatgaagagaagcagatggaacactgcagtatttatggatttatccgaaaggaaggactgatacttggaatctggttgggaagtcttcagatcagtagggatcctgctgttaatgtgctgaaggctgatgcagggaatatgggagatgcaggggtcggcttggaccagttgtgtggaatgatactggaaacagacacaggggcttttatgggaacccagtgggatgacctgcctatccggccggatcattttcagaaactggaaaaaaatgaacagacagggcagaacgaaggggttttggcggaaatttcagaacgaaaacaggaatcagaaaagcaggacaacgaacaacagaaaaacgaaaagcaggacaacgaacagcagaaaaacaaaaagcaagacaacgagcaacagaaaaataaaaagcaggaaaatgaacagcagcaagagggggaagcaagaaaagaatcaaaaggcagagaacttcaggcagagtctattcaggaagaagcagaggagagccccgctttattcccggactgtgatcaatgctggaggatttgcccaggggatttaaggcagatttgcagaaaaaactgcgtatattgtaataatcgtttcttgcagcatggatacagtcatttcggatatattttgttgtgcaggcagacagacgggcagtacatactgggggtgccaggcatctatgaccagcaagagcgtttcatggcagagatgtttggattcccctggtttaaggaatggcctttacctggaataaaaaacggaaagagcgggtactggtacaggatctgtgctccctgtgaaatgctcctggacagcaggagatgatgaagcaggcctgtcattggactctggctgtccattgaactgctccgggtgctgttgagcgtagtcttttaactggtagaaaagatcgtatttcatccgtttccctccttgaaaatacgtaatacggtcaatgcgtcattgtatggatgcagctggttttatgctactgtacgcagagtgaacagcaatgactttttcctgctttcagaaatcactttacagtttctgctgttttctgatataattatatttcaggtaagaaagtaaaaaaacaatattaatgtcataaaatataaaaatatagacaaaatagcagatgtaatattaaaaatatattccaaatagctatcggtgatagcagaacaccttacggaagaatatctgctgaacagggactttgtaaaaatgggcaggtaaaatgaaaattaggatcaaagaaaatcagcaagaggcaatccaggggatcacacaggaatatccatacgcctaccatcatgtgaatataaaaaagacaaaggtcccctggcactggcatgaagaactggaattgaattatgtggaagctggctgtgtgaaggtttttacttctggtaaatcttatatattccagaaaggacaggcctattttataaattctaatgttctttgttccatggaagatgggggcggagaccaggcctgcgtgttggagtctcatttgtttcactcaacgcttcttgcaggacattttaaaagcatttatgaaacaaaatatttagcacctattcttcagaatcgtcatcttgagattttggggattgccggagaaatcaaaagacagagagaattgctggcaatgctcattaagcttggccggatgcaggcgatggagaatgtggaatttcaaacaaggaatctgcttagtgaaatctggctgctgttgatggaagaagccagggatatgtttcaaggaaaaagaggacagtattcagaaaatcagaccaggatcatggacatgctgtcttatattcatgagaattacgatcacaagatcctgctggaagaaatagcagaggctgcatctgtaagcagtcgggaatgtatccgctgctttcaggagtgtatccacaaaactccctttgactatgtgcaggattatcggatcaggcaggctgaaaaattgttgacagaaaccgatttgtctgtgacagaaattgcatatgccacaggtttttctggcagtgcctattttggaaaagtatttaaaaatcttactggaaaaacaccagggaattatcgaaaaggaaaagataaatgactgaacaggaaaaatatatgaaagaagccatccgtcaggcaaaaaaagcgctggcactgaaggaagttcccattggctgcgtgatcgtacatgaaggaaagatcattgcaagggggtataatcggagaaatactgataagaataccctttcccatgcagaattgaatgcaataaaaaaggcaagcaaaaagcagggggactggagactggaagggtgcaccatgtatgtgactctggaaccatgccaaatgtgtgcgggggctctggttcagtcacgaattgatgaggtggtgatcggcagtatgaaccctaaggccggatgtgcaggatcggtattaaatcttcttgaaatggatgggtttaatcataaagtaaaggtgacaaggggcgttttggaagaagagtgctctcatatgctgtctgctttttttgcagatctcagggaagaaaaaaagcgcctgaaaatactggcgcgtcagaaaatggattaaaatatgaaattattataataataaaagaatatgtggtatatttatttttgcgcgccgcacctcggaatgcatccacagacgttacctttacagttaactcggcccaggcgccctcacggcacacagaagcttctacttagtgctgctacattcctgtcctgacacggttcatagattcctgttgcgtaagacccagacgtcaacgccacttataaagggcagctccacagatcacaagcctcagattggcatcacccctgctgtagcggattgcaggtacagggcaccgctatctccccggctgcgcggaatttattatatgtagttttgacggatttgtcaaggcttttgggagatttcaactatttcttgttgtgcgaaaaaatattttggtatataataattaagattttaagaccgtgtgaaaacacagaaatggagggtaggaattatgatcaaaaggatcggtttgcttacaagcggcggtgactgccaggcattaaatgccaccatgcgaggcgtagtaaagggacttaccaacagtgtggatgaactggaagtatatggctttgacgatggatataagggtctgatctacgggaaatacaggatgctgacttccaaagatttttctggcatactgacgcagggaggtacgattctgggtacatccagacagccctttaagctgatgagagttccggatgccaacggtctggacaaagtagaggccatgaagcggacttattacaagctgtgcctggattgtctggtgatcctgggtggtaatggtacacagaaaacagccaatctgttaagagaggaagggctgaatatcatccatcttccgaagacgatagataatgatatctggggaacagacatgacttttggtttccagagtgcggtgaatattgctacgaatgccattgactgtatccatacaacagcagcatctcatggacgtgtgtttattgttgaggttatgggacacaaggttggcagcctcacccttcattcaggaattgcaggcggtgctgacattattttgatcccagagatcccttatgatatcaagaaggttgctgaggctatcaacaggagagccaaagcaggcaagcgatttacgatccttgcagtagcagagggagctatttctaaagaagatgctaatctgcctaagaagaaatacaaagaaaaactggaagcaagagccaagaagtatccgtctgtttcttatgagatcgcagaccagatttctgctgagacaggggcagaagtaaggatcacggttccgggccatacccagagaggtggagaaccatgtgcttatgacagggttctttctactaggattggcgcaggcgccgcagaggctatcctggacggagaatatggtgtgatgatcggtattgttgacggcaagatcaagagagtgccgctggcagagtgtgctggtaaattaaaaaccgtagatccgaaggatcagactgtgctggctgcaaagcagatcggtatcagttttggagattaagggacaaatgtctgaaatacaaggagctgatttatgagttatactgctctctaccggaagttcagaccggataattttgaggatgtcaagggacaggatcatattgtgacaacattgacgaaccagatcaaggccagccgtatcggacatgcctacctgttctgtggtaccagaggtaccggtaagacaactgtggccaagattctggcgaaagcagtaaactgcaaacatcctgtcaacggaagcccctgtaatgaatgtgagatgtgcaaagcgattcaggcagggacatccatgaatgtaattgagatagatgctgcatctaataatggtgtggataatatcagggagatccgtgaggaggttgcatacaggcctacagaaggtaattacaaggtttatatcattgatgaggttcacatgctttccacaggagcatttaatgcactgttaaagacactggaagaaccgcctgcttatgtgatatttatccttgccacaacagaagcccacaagatcccgatcactatcctttccagatgccagcgttatgattttcacagaatatccattgataccatttctgccagactggaggagcttcttaagattgaaggagtgaaagcagaagaaaaggcggttcgctatgtggcaaaggcaggggatggttccatgcgtgatgcactcagtcttttggatcagtgtattgctttttacctgggacaggagttgacctatgacaaggtactggaagttctcggggccgtggatacggaagtgttcagccagcttctgcgtaaggtgattaacggagatgtgacaggtgccattcgtacattggaggatctgatcacaggcggccgggaactaagtcagtttgtaggagattttacctggtatatgaggaaccttcttcttgtgaagacctcagaaaatccggaggaggcgatagatgtttcctctgaaaatctgaagcttttaaaagaagaaagtcagatggtagatacagaaacattaatgcgctatatacgggttttttcggatctgtccagtcagatccgttatgccactcagaagcgtgtgctcatagaaatcggtttgatcaagctttgcaggcctgccatggaaacaaacctggattctgtgcttgacagactgagagtgctggagcagagaatagatgagggtgcaatagtgcagcagactgtggtacaatcaggtggtgtagtccaacagaccggggcgcagcctgcacaggaagaaaagaagcctgcgaaagcagcacctgaggatctgcagaagatcgttgccggatggcgggcaatcgcaggacagactaccggagtgttcagagatcagcttttaaaggcagttcccaagtacaatggcgatacaggcgaacctgtattatatgtggaatttcaggactttcttggcaaaaattatgtggatgatccggaagccaggcaggaactgatggatattattgctgcacagaccggaaaagcagttgaggtgcagctgttggtggcaaataaccattcgtatactaatttgtccaaggtgactgtggacgaagcaatccgtcagaatatccatatggatgtagttatagaagaagattgacaggaggagtttattatggcaaaacgtggaggatttccaggcatgggtatgccgggaaatatgaataatcttatgaaacaggcgcagaaaatgcagcgccagatggaagaaagccagaaagaattagaagaaaaagcgtttacagcttcagctggcggcggggtagttgaagtaactatttccggcaaaagagaagtaaccaaggtaaagatcgatccggatgcagtagatccggacgatgtggaaatgctggaagatctgatcgtagcggcgaccaatgaagcgcttcgcaaggttgagcaggagtctacatccatgatgtccaagctgactggcggtatgggcatgggcggaggccttccgttctgatggaatattacagcagccatatcaaccagctgatccagcagctgtcatcccttcccgggatcggagccaaatcagctcagcgcctggcttttcatattattaatatgccaaaggatcaggtgaaccagcttacctctgtgatcacccaggcaagggaaaaggtacagtattgtaaatgctgctgtaccctgacggaccaggagatctgtcctatctgtgccaatcccaggagagatcattccactattatggtggtggaaaataccagggatctggcggcctacgagaagacaggcagatttgagggtgtctatcatgtccttcatggagcaatttcccctatgctggggattggcccagatgatattcggctgaaggaactgatgaaacgccttcagggcgatgtgaaagaggttattattgctaccaattccagtctggaaggggaaactacagcaatgtatatcagtaagctgatcaagcctaccgggatccgggttagccgtattgccagtggagtgccggtgggaggcgacctggaatatattgatgaggtaacacttctgcgtgcgctggaaggcagggtggaactgtaggaggtaggacctgtggcaaagaaaaaagcgacctcatcggatgttgctgaaagggcaggtgtttctcaggcaacagtttctatggttttaaacaaaaaatacaacgtttctttttcaagggacactgtagaaaaggtggaaaaagctgccagggaactgggataccagcttcccagccgcaagaacaaaaaggctgataaaaaagaaaaactgatcgtggtgttctgccctacacttaccagcccctattatgtgcttttgctgcaggggattgaatctgtggccaatgaacaagggtatggagtgtttatctgtaatactcaaagagatgcagcatttgaggaaaagtatctgcggatgatggcagatatacggccccaagggattatttatgcatgcaatcctcatcctgattttcaaaagcaggtggaggacatggcaaaagaaattcctcttgtgatcatcagcaacaaggagcgtaccacaactgtggatgccattaatcaggataatacggtggttggcaggctgatggcccggcatcttttggatctgggacacagggatgtggcatttatcacaccgccgcttaccaaaagacagtggcagcggtcaaagcgtattgaaggctttgtgaaggaatatgaaaatgcaggcctttccgggcatgtgatcattaaggtggcagatgagtctatggacaggcagctgccccgtatggatacagaatactctatgggctatgaactgactatggagcttctttccgagaaccgacagtttacagccatagcaggacaaaatgatatgatggctatcggagcattggatgcattgcaggaagccaggcttcatgtgcccagggatgtttcggtgatcggatgtgataatattttttattccgggatccgcaggatcgcattgacaacgattgaacattttgtggcgctgaagggcagggatgcctgtgatatcattatccgtaagatcggtaccaaggacagctttttctcagatatacagcctacaagcctttataatattgaatattcccccagagtaattgccagaaaaactactggttatgcgaaggtggaaaaaaagataaaaaaagcagaagacaaacaaaaataaatagaacgagctaaaaatattaataataatctgaatgatcgcagttgcagaaaacgataaaaagattgattttcctgtacattcacattgatatttctttgtaacacctaatgattatttataaaatgagagtttattaataaaaaagtaattaataaatatcgcctggcttgaccttgcaaaagagtctgctataattaaattatcagtgactatgaggtattaatcagttacgagtatcaaagaaaaagaacggcctaaataaggccagggatgtaagcttaagcttaagaaagaggaggaaaatgcaatgaagttttttattgacacagcaaaggtagaggatattaaagcagcaaatgatatggggatcatctgtggtgttaccacaaacccttctctgatcgcaaaagagggcagagactttaatgaagttatcaaagagatcacagagatcgttgacggaccgatcagcggtgaggttaaggctaccacaacagatgcagaaggtatgatccgtgagggtcgtgagatcgctaagattcatcctaacatggttgttaagatcccgatgacaggagaaggcctgaaggctgttaaagttctgtccaaagaaggaatcaagacaaatgttactctgatcttcactgcaaatcaggcacttcttgctgcaagagcaggtgcaacctatgtatctccgttccttggcagactggacgatatttctacagatggtcttgacctgatccgccagatcgcagagatttttgcagttgcagatatcaagactgagatcattgctgccagcgttcgtcatccggtacacgttacacagtgtgctctggcaggtgcagatattgccactgtaccatataaggtgcttgagcagatgcttcatcatccgcttactgatgctggtatcgttaaattccagaatgattacagagcagtattcggagataaataagtaaaaaggagaactataatggagaatttagagcttcagaaaattgcgaatgaagtccgcaaggatattgtcaccgcagtccatgcagcaaaagccggccacccgggcggatctttgtctgcagcagatttatttacatatctttattttgaagaattgaacattgatcctaaggatccgaagaaggctgacagagaccgttttgtactttctaaaggccatacagctccgggactgtattctgttcttgcagaaagaggatattttccaaaagaagatctgaagacactgcgtcatctgggatcttatctgcagggtcatccggatatgaaacatattccgggtgtggatatgtcaagtggatctttgggacaggggatttctgcagctgtaggtatggcactttctgcgaaacttagtggagattcttacagagtgtacacacttctgggagacggtgagatacaggaaggacaggtctgggaggcagctatgtttgccggtgccagaaagctggacaatcttgtagtgatcgtggataacaatggcctgcagattgatggcaggatcgaggatgtttgctctccgtatccaattgacaagaaatttgaagcttttaatttccatgtgatcaatgtggctgatggaaatgatatggagcagcttcgtaaagcctttgcggaagcaaagacagtaaagggcatgcctgtagccatcgtaatgaagactttaaaaggaaagggtgtttcctttatggaagatcaggcaggctggcacggaaaagctccaaatgatgcagagtatgcacaggcaatggaagatctggaaaaggtaggtgaagcattatgtcagaagtaaagaagatcgcaacaagagccagctatggtaatgcactggtagaattaggcaaaaaacatgaggatctgatcgttctggatgctgaccttgctgcagctacacagacaggtatctttaagaaggagtttccggaacgtcatattgactgtggtattgcagagtgtaatatgattggtattgcagctggtctcgcaactaccggtaaagtaccttttgccagtacatttgcaatgtttgcagcaggccgtgcttatgagcaggtacgtaattctgtaggttatcctaagcttaatgtaaagatcggtgctactcatggtggtatttccgtaggcgaggatggtgctacccatcagtgctgtgaggattttgcacttatgcgtaccattcctggaatggttgtcgcaagcccatctgatgatatcgaggcaaaggccatggtagaggctgcatatgagcatgtaggccctgtatatatgagatttggaagactggcagtaccggtgatcaatgacagaccagattataagtttgaacttggcaaaggtattgtccttcgtgaaggtaaggatcttaccattattgcaaacggactttgcgtagcagcatccatggaagcagccgagaagctggcagcagatggtattgatgcaaaggtgatcaatattcataccattaagccgctggatgaggagcttgtagtagctgctgcaaaggagactggtaaggttgtaactgttgaggagcattccattattggcggtcttggcggtgcagtatgtgagtgtttggctgagaaagctcctgttccggttaaacgtatcggtatcaatgacgtatatggtgagtcaggtcctgctgtagctctgcttgaaaaatatggacttgatgcagacggtatttacaaacagatcaaagagtttgcataactgtgatcctcagaaaagatttccaatattgctcctgtgatggtttccgccaggtcaatgactgtggcaaggcgggtagtctgcagggtaagcggatggagaaatcctgagatgtttacaattccggtaatatgaatatctcccactgggggaagatttttctgaacaccagcacctgggtataaggaaccatttccgatggtgatatatcccaggtgcttttttgcacccagagaagcatcaattgcgatcacaagggcgtttgaatgatgtttttgtatgtgcttcaggctctgctctagatttaatgcatgtacaggggcgttcaaggttccgtacacaaagacaccaggcagcttttgctgactaagatgccagcctacgtacggtcccaggcagtcgccggttgcccggtcactgccaatacacaggaatacgatttccgaccatttacctgtatgatgtaatataaatttttttaaaagatacgcaacctccccagaaggatttttaccctttccgtttatataaaaagccataattcctccattgtctgtgactgtcttgttttcatgatatccggaaaaaagaaaaatattcatcgctgtgagcgcattgaactattgcagatatttgcagctctctggcaggaaggatttatccaggtatttttaattccgaagaggctttccggcgggcaatgagacttgtaagattctgtcgtcaaatttatggggatacctcttatattatgataaaatctgcatttctcatatgctatgctgtaccggaaggggtgatgaaagatgattgaggttgtttacaaggatgaaaaaagggaagtacaaaagaatgaagggaattttaaccttccaagaaatatacggcagatcggacagatcagaggaaattacagaatctatatggaagactatgtgtatactttccttgggaggctatctgcagctgcttgcaaagacgaggaaaaaaaaggaagcctggctgtattcacaggggagatgcaatgggaagacggaacaggatatctttttatcaggggagcacttcttgcaaaatgccaagatttaacacctgaacatattgatctttcagaggaagtatggatcacaatacaagatgagcaaaagcagtattttccggaacagcatattctgggatggtattttgcatttcctcagatggcggttgaaatcacagaacttatgcaaaaaatacatcttcagtattttggcggagaaaaggtcctgatgctggcggaaccaacagaaggggaagaggctttttttcattatgaaaatggtttgatggcaaaagttaagggctattatatttattacgaaaaaaatgctgctatgcaggaatatatggttcaaaagaatcaaatcctgaaaccggaatttacagaaaaatgtagtgacgaagcagtgacaactttcagaaagatcatccaagaaaaaaagaacaaaagcaacggagcagagacggaggtacatacctctgttttttcctatgcagccactgcatgcattcttttggctcttctggcggtaggaacaggattgtaccggaattaccgggagtttcaggacataaaggaaaatgtaccctcatcatctatggcagtagggacagatgtaaagaaaagagaagatgctgaaaatgtcaatgcagaaagtacaagtacagaaagtacaaatacagaaggttcaaatatagaaggagtaaatacagaaagggaaaatgcagaaagtgcaaatgcagaaagtacaaatacagaaattgtaaatacagaaaatgtaaatacagaaagtacaaatacagaaaatgcaaatccgcagaatcaggatgaggatagctgggaggaagttccggttacagaaaaacctcaggagatcagaacggaaaatagttctgacgaaaatgcggtagaagaaacaggcagttcagaattttatcgtcaggaatcagatgagcgaaaagcgaagcgcagggaagctttgaccaaaacaaccaccgaagacagcacaggagcagacataagaggtgatatggcaaattcagctatagaagaatcggatatagaaaatgctgttgcagaaaatacagaaataaaaaatgcggaagatccaagtactgctggtgtggatactggcactacagaagggaaaatggcggaaacctccggaaatgctcatgatacttatgtaatccgccccggggataccttatatcagatcagtattgaaaaatacggatcaatggatgtaatacgggaaatatgtgaattgaatggaattgcagagaatcagattatttatccaggacaggtgattgtactcccttagagaaatgtgatataatgtgtcgggcagatgctctgcgtcataagcgcagagcagctgactttcatatttggagaggtttgcaaggcagacatgtacacacagatagaagtgcagggaaaaggtgaatatggcgaacacatttaaagaaataaaaagaaaaatacgaagaagacggctgcggatccagagggaaaaactggcgcagacaggcaatggaaagcataaaaaaagtgtggggaaatatatgcctgatacaatgcggcgtgggctgatgattgcagcagctgcagtggcattgattttcctggttgttctttatattcagaagcgaagctatcatgattacaagattttgaaaaccagtgaacaggaagatacagtttctaccaattatgcggaaatggatggaaagattctccgttacagtcatgatggggtatctcttgtgaacaaaaatctggatactttgtggagtgaaacttacgatatgcagacaccgatggctgatgtatgcagcggtaaggcagtgatcgcagataaagatggtacatccatccggatttatgacaagaacggactgactggaagtgtgactacatcttataacatagtaaaggcaaaggtatccaaatccggactggttgctgcgatcctggatggaggagatgacacctggattaactattacagcacagatggaagtctgatcgcagagaaccagacgaagatcgaagatccgggatatcctctggatgtttccatttcagatgacgggatcattatgatggtggcttatcaatatgtggacggtggggaaaccaccagttatgtggcattttataattttggtgaagtaggacagaacgatgatgaccggatcgtaagcggctttacatatgaaggtgtagttgttccacagatccaatgccttagcagccatcaggctgttgcagtaagggatgatggatttactttatataaaggccgccagattcctaaagagagccaaaccataaaagtggataaagaaattgtcagtaccttttatgatgatgaaaccattggccttgtgtttaaaaatgacagtaaagataagttgtatacaatggaagtgtactctgcttctggaaaaatgaaatttaaaaaagagtttaatattccttacagcacgattcgcatgagtgatggaaatatcctgatgtttaacagctctcagatctgtgttcttgatgggaaaggaaatgagaaatatacagggacagtggacggcgatatcaatgatttctttaagattggatggaaccggtatctgctggtattagacagcggtgttaatgtgattaaattcagttgataaaatacctgtgcagaatataagcaggagaaaacaagagagggagaagatgaatctgacctggctagggattgtcgtacttgtattgattgcaggtgcatgtataactggatttcagaaagggtttgtgaaagaggttgtagctacattttttgtattattttccattattatttccggcgcattaaatccatatgtaagcagctttcttagggagagaacgccagtttataatatggttaaggaaaactgccggggggttgtagaagagaaactggatggaacctccgacggttttggagagcaaaagcaaaaagagtttgttgatgacttgaatctgccggagtttattaagaaaaacattcttgagaacaacactgctaaaggatatcagcagcttgctgcaaatacgttctccgaatatatagcggattatctgaccgggatcgtgatgaacggaatttcttttttgatcacgtattttctggcaaggcttttcattggatttttaataaaagtactggatatattaaccaaatttccagtggtacatgggatgaataagctggcaggagcactggtgggcggagcaaaagcgatattgctcctatggatcgcattacttttacttacaatttgttataatacccagattgggaaaatgggtatccagatggtagaaaaagacccgtttttaagttttatgtacgataataattttctgatccgtatttttataaatattcttcagggctttcaataagtagtaatcagtgctgctttgccctaatacttctgaagaaataacagatcgcccatgcgatactcattccagctgcgataccgaaagcaaagagaaaggtatcacgtccgtatgtcagtgcttttatggtgtttccttctacaatactgctcatacagtaataaagtgtgcttcctggaatcaatggaatcacggaggtaacaaaaaaagaggtagaagttcctttacatattcttgcaaggatttcggcatacacatctgcaataaaaccagccagcagtgtaggcagaaaaacatttccccaaagcacttttcctaaaataaataccagccagctaagtattccacctgcagcagccagcggcaggtgcttgcttttcatatgaaagagaataccaaatgcggtagagcccagggctccagtgatcagttgtataatcattgttgtgttcaaagcccaaacctcctaaataaaataattgaccccataaatccaagcgccagcgcagctgccagaagcagagatgctatcaaacggataattcctgatagagtatcgccgatgagtacatcacgaatagcgttggttgacataagacctggaatcaagagcataatatcgccgatcatgattttatctatatgaagcacagggcaaagcaaagtgaaacaacaaattacacaaccggtgagaaaagaggcggtaaactgaaatgttacttcattcatgcataacgggcgaagatactgttgaaaagtccagatcagaacagctccaattcctgctgcaatggcgtcagaaagacctccgccataaaagaaagtgaagctgcaggctgcaagaatggttccgagaagcttccaaaggggctgtggcttacctgtattgatcatatcaaattctttttgtaattctgccggagatacagggcggttgcagaaacggcggcttaaatcattcagctgctccaatttagtgaaatcatttccaccaccttcacggatccgacggatttgtgtttgggcggcctctccgggaaattctatcgtaataacaatgctggatgtgatcacgaacacattcatctgggtggcaccacaagcataccccattctgtttaacgtatcttctactctgaaaatctctgcaccgctgtttaacagtgcatcgcccatatcaagaaaaatatgtaaatagtctttgcatacctgcataatggatgctcctttaatgggaaaagacgcgagcataaaaaggtatagcggcgacttattccgatatattttaatagcttcagtagctttagtataaagctgaattgtggtcaatacaaccttaaatattgcaatgagatgatggtatctgcagtatgcagtatgccatgtaaaaagctgcaaaagtatcagaaaaattaatgcaaaaaggggcttgacgaagagtggaaagaaatggtatactgaaacacgcttcaaagaaatgtgtgtacagaattgtatgacataataaaaaagaagcaaaaaataaataaaaaagatgttgacaaatgaaactgcttatgataaagtagtcaagtcgccaacacggatgacaaaacttcatcttcaaagagtttgaaaaacttcgaaaaagttgttgacaaacaaaagaagatgtggtaaagtaaataagctgtcgagagacagtgaaaagcaaagaacattgataactaaacagtgaaacacatacgattctcgaaaattctttaacaatcacattcggaagaatgaactttaaaacagtaatgacgagagataactaagctagttggttgtctt

SEQ ID NO: 10 - DNA, 691 bp, Unknown
  gut microbiota DNA sequence
tccattcacggatgtctttctctgccagtccaagcctctgcagtctgctgatctgccagtaggcagaagctgttgcaaagcctgcttcacggatccggcgcacaatgtccatcatgatccgaatttccaggcttgaaaatatattgccagtcttcaccgccagcttttcgatctctccctgtgtcattcaaccaccgtatcctctggcagctgtatggctgcctttgcccgctcttctgtttccccataccacttagcacggtactcccacaaagacattgcccccatggaaacatccagcctgtcagactgccgttctgcctccacatccgttacaatggaatcgtcccagtcaaaggaagtctggtatgtcccggatgggcacaaatgatacaggtcacaccagaaagcaattgcatccaccagatcttccaaggcatgctgcagtgccgtctggcagctctgcacgaaagaatacgaccgctgtttactggcctttatctcctctgcagtcttgtccgtgttgttcgggtctgaaatcgtcccgtatgccagattgcagtcaaactcaatcatcctcatgagatgattccaaccattgaagtaagatgtatcccggatatccggtgaaaaggtatccataaacggtttatctgttgcgccggtattatactccaccgcccggtacagt

SEQ ID NO: 11 - DNA, 15562 bp, Unknown
  gut microbiota DNA sequence
tatcaaaagactaatcgaaatcgctgaaatccgcataaacactggcttttttaagcaactcgatttattcgaattcaatcgttgcagggggttttccggtacagtcgtacaatacgcggtttacattttttacttcattcacaatacggctggtggtttttccgatgatctcccagggaatttcggcgaattcagcggtcatgaaatcggtagtagtaaccgcacgcagggcaactgcataatcataagtacgttcgtcccccataacgcctacagagcgcatatttgtgagggctgcaaaatactgattcacttttttgtcccaacctgcattagcgatttcctcacgccagatcgcatccgcatcctgaaccattttaactttctcaggtgtaatatcaccaatgatacggatgccaagtcctggtcccgggaatggctgacgataaaccaaatagtccggaatgccaagctcaagacctgccttacgaacctcatctttaaacaggtttcttaacggctcgataatttctttaaaatctacgcagtccggaagtccgcctacattgtggtgggatttgatcactgtggattctcctcccacaccactttccacaacgtctggataaatagttccctgtaccaggaaatctacagcaccgatcttctttgcctcttcttcaaaaacacggatgaactcctcaccgatgatctttctctttctttccggctcttccacgcctttcagcttttcgtaaaatcgttcctgtgcatttacacgaataaagttcagattatatggtccttccggtccgaacacagcttctacttcatcaccttcatttttgcggagcagaccgtggtctacaaaaacacaggtaagctgattgcctactgcttttgataaaaggactgctgccacagacgaatccacaccacctgacaaagcacagagaaccttgccgcttcctactttttcacgaatatttttgatggattcttctacaaaggaatcaattttccagtctccggaacaaccacagatgttgtatacaaaattggacagcatcttacgtccttcttttgtatgaagcacttccgggtggaactgtaatgcatacaggcctttctccacattctgtactgctgccacaggacagtcattggtccatccacagatttcaaaacctggtgcctgttttgaaatgtagtcattatggctcatccaacagatggttttgggtgaaacatctgtaaacaatctggaggccgtatcaacatttacttcaatttttccgtattcacgaactggtgctttttcaaccttgccgcctaacaggtgcatcataagctgtgcaccgtaacagattccaagaaccggtacacccagttcaaagatttcttttgtataagtaggggcatccgccgtatagcagctgttaggaccgccagtaaagataatcccctttggctgcattgctttaatcttctcaatatctgtcttgtaagaataaatctcacagtatacgttacattctctgacacgacgtgcgatcagctgattatactgtccaccgaaatcaagtacaacgactgtctctctgttcattggtttcctcctatggtccatattggggacttattggcttttaccgaaaccttttctgtcctcgaagctttatccgtgtcatattataaaagagtatagagcgttttacaatatctaaaattcaatgagaagcctaaaatttataagttttttagaattttctcattgttttttcaatgattcctcacagttccatcacaatttacacgtatattaataagcaaataaagcgaaagctttttcatcatatagataaactttttctttttcatactcgccgggccatgtggtccggccctccttcttttataggaaaaatatcctcagcttttatatgcttttgtctttcttcttgcaaagatccgcaggatcccggccacagccccagtgaacaggcatcctgcatcatcaccataatgatggtaaaaagctgtctctggcctccggataaagctttgtaccttttcccgagacaggggccgaattcaaaatattcaataagctcctgcaatttctaattcttcctgatgctggtatgaaggactgtctccataatgtgtttcacagacatagtatttacatattcattaaattgaagatggactgccatctcctcaggcttaagctctgtggtaatgcttcccctgtactttacaagcccaagcaacgcttttatcagagtagtctttcctgccccattggaaccgatgataccgatccgctctccttcttcaaaaatcaccggcctttcgatggacaatgcaggcttttcctgatggtcagcttcagatacagcacattgtttacaatatcccgcatctcaataagcttgcccttcacttggggaagataggtttttacatctgcatatttccccacttcatcgatcataccgtcaatcagaagcatagctgctgccactggtgttttcagctaatgggaagaggcacgcataaaaacctcctgccgtttattttctttttccaggcttctgttggcagactctagggcacgataattttccccaagccttgcatacagctgattcagcgatgttcccagttcgccgatctcatcctttctctgtacatcaaagggcgcaagttctctgtcgcctgtgttcttgatctgggatgcatatctggataaccggatgatcggagcaacaatctttcccgaaaaatactgggaagccagtaaaaccaccagaaatatcactgccacgatcatgggtacactattaaggaccactccgctcatatcttgcatctgtggcatgatcagagacaccaaggtaaggatctggcagtcctcctcatctccaagcgcaatgtaagtaacatactgattttccccatccttagtagcagcttcataaactgtcaggttatctgaaaccgtatgcaccttcagatttcgataagtaagcttacgtgccagctgatccacactccactgaacctgtagtggatattcctttgtatcctgccactttggaaataacttttccgtcagcatatccagatcaaaagtatcctcattgatctcttctatttttccggatctttcaggtatgtttttactttatttaattccctgatcagttccggatccttggtttctacctgcaaatggattccctttccttctaagaagacctgatttttatcctccggcaagataaggcttaccgtattcatcggattgtccacctgcaggttctcatagcttcgactctacataaaatcctgggaaagctttgtaacagatgccagattactgtcatttttataagacacgtaaagagaaggaagcatataaacaaaatagaggagcagcaaaccggcaaggatccctgccatcacaatactgtacagaaaggtcttttttgacagcttcataagatatcttcatcccccttcctgaagcggcagcccataccgatcactgtccagatgcagttcacaggcaaattacaaatacagttagtagttgcgggtacgccacaggcacatagcagttggttttcatatatgtaaccgttaagattttagaccagcacagtcaatcgcagtaccccaagcaaaagcagatgggcaggataaaaaatatagaaaaaccacctgctaaatccactgccacaggagcctttttttccattgtaaagatacacgatcacaattcctgccagcagaactgcgctgcactcccaaaaggcatataatatacggattcccacagtcccggctgcttccatatagccttcttcaaacaataccaatgacacaatgaagaaatctctcatccgttttttctgattcatacgtgagtttctgaaaaggatcaccataagcggcgctgacattccccaatcgcaaaaggcagtgaggaagataagagctgcagccggaagcacatgtctttcatccagacataccagtatgagaaaacatataaataatgtaagaatcatatttccccgcacaagtctccagctctgcccctctccaaatgcgatctgaaaagggatctgggagagcagcgcaaagagcagcagcctttgtccatactgttttctggaatgagtgtaataatagccttccaccagaaaatagcacattacaggtgctgtaaaatatcccaggttacgaagcagcagaaaagctacagtgccttcctttaaaaatatactggcaatatgattcagtgccattaaaatcactgcaatatatttgatctgattccggttcagcgcctttccctttgtcagcctgatttcttccatacgctaaatctaaactccttttatgatacacgcccccgaacagctgtgaacccaccatacgcattattccttaataaaaagtaatattcagctttgaatataatggagacggcatataatttttcaaatacagattcgtactaacatatgtactgtccggcctcttgtaatatcttggtctgttctttgtatgataaactacatctaaacatacaatatttttcagtgaaacattagatccgtttttatatttttttaacacatttctgccgttcttcgtatactgggcgattatgcaatccactttataaccttttgtaggagtagccttaacctttatcttttgcgatttgaaacgcataacagaaacagctgaaaatcctttgaaataagaatcatactctctggatcccatcttaaaggctttgaactttcttttcatattcttaaaggttacatcacagtacagcctgtaggatcggccgttctgatacaccataaagctgatccttgtccgttctccggctttcagcacatggggtttactttccacataaatcccattgatccccttttcttttctggcctgaaaattgctgtttgaagatcttacctgatagacttctgcatcctttgccagatttccaatgtagatccacccttctgcacctgtcattcccatacttctcaggggacggcagatatagatctccatggtctgccttttggcgcacactggtgctgccccgtctgcctttgctgttaccggaaccagcataagcaatgccagcatcagaactatgccggccagtcctttcttcattgctttcataatcctcttcctccctcgtttttataacaagaaagaatcctgcaaagcaggattctccgactgcggcaggtcgccttaagcgacatctacccttccgccgcagtgcgatcctgcccggtcgggcttttttatgtactgggaaattccaacgtaatttcctagtacacaaaaaaacaccatccccgcggcaatcactttgtccgcaaaaacagtgctttcaatgcgccttcaggggctcgaaccctggacaccctgattaagagtcaggtgctctaccagctgagctaaaagcgcatagcgtcttgggtgattctgttttctctcagaactccatttgttcaacgcaagagatattgtacatgagccgacagaaaaagtcaagggaatttttataatttttttattttttttaattttcctttttttctgctttttttccacccatatgctccagcatatttgttaattcctctgtggatcgcctcatcttattcatgtgactgtccagcttcttatgcttgtaactgaactgactaagggactgtttcagacgatttctggacttcatatctgctcctgggcattctttctatatataatatgcccaggagcaaaatacgttctgtcctttgggtcttatctactgatcaccattttgcagataggattacctgctttggaaaacttctcttcatattctgtcataacatttcccttcaccatctcttcatcatgatgaagatcaaaggagtgagccaaaagcttccagcctgcttcctgtacttcctccagagaaaaatcaaataaaggacggttatctgtcttaaattccagggtcccgtcttttttcaggatctggtcatacctggctagaaactctctggatgtaagacggcgtttcccatgtcttgcctttggccacggatctgaaaaattcagataaatccgtgaaacctcctctttttcaaagatatccggcagattactggcatccacacacataaacaaaagatttgatagtgtttctccattattctcaagttcttcgcgtttttgcagagcacgcagcagcacgctgtcatacatctcgatccccacataattgatctccggatgaagtcgtgccatatccatcaaaaaacggcctttccccattcccacttctatatgaatcggctgatctgacgcaaacgcctgcttccaccggcctttctgctgttggggctgatgcaccacatatttgctttcctggattgcttcttttgcgccagggatattcctcagtctcatactttcattttcctctttctctttatttttcttatttcttttaccatgtttacttttcttttcccggccgcctcttcccggcaattcggattctttccatatcatacatgctttccggcattgccgcaactacattgtttcactgatactttttttatattacaggcatattaaatatactttttacatttttgtaactgccaattatactgacccttgaaaaaatttggtcttatgactatactgaaactatccattccatagacaaaaatcacaaattgaatttctgttttacaatccattttggccatttgtaaaatagtttttctcagattttaggtgtatgatatatggaaattttatggaggaggatgccgatggaacaaattttaagaaagctgtcggaaatcgaaaccaccgcagatgagattctgaaagatgcggagaggaaaaagcgggcactttccgaagagacggagagacaatgtaaagagtttgatgccgtcctggaaaaagaaaccgacgcaaaaatccgagatatacgtaatgaactggaaaaagaaaaggattcacgcctggcagcattaaaggaagacacagagcagcatctggtgcatctggattctttctataaagaaaatcaccagcgtatttccgaagaacttttcaaaaaaattattacagcttaattcagatgaatgaaaatttcaaaagaaaggaagtgaattgaattgggaagtgttttttcctatagcggactttctaccaaaataagggctctgcaaagcaagcttatgaccgaggaagagctttcagaaatcgtacagcttccgaatgtacctcagatagtggcctatttaaaaagaaaaccggaatattcccgggcatgggccaaccttgatgagaacgacctgcacaggggccagattgaaaagcttctgaagcagtcgatcttccgaaatttttccaaaatttaccactttgcaaacaaggaacagagacgttttctgtctttatattcaaaaagatatgagatccttgttttaaaggcgatcatggccaatctttttgaccacagaaatacagaccctgtagaccttagtccttaccgtgactttttccttcatcattccaaattagatctggatcgtctagccgccaccacaaatatggaagagtttgtaaatgccctgaagggtaatgaattttacggacctctttccagggtaatggaacacggcaacggtcttctttttgattatgggatggcactggatctttactatttcacccagatctggaaccttcggaaaaagcttttcaaaggggatgacctggaggaaataacaaaagcctacggtgaaaaatttgatatgctgaacctggaatttatccagcgttccaaacgctattaccatatggatcctgccgctatatacagcctgctgatccctatgaattataaattaaaaaaagaagagattaccgcccttgtagaggcttccggccatgatgagtttgtggctgttatgaaccgcacatattacggacggaaatatcctcagatcacaccagtcaacctggaggaattctacaattacattctccgtactgttcttgaaaaagaatcacggaaggatccttattctgtagcagtgatctattcttacttatatcataaagaacacgaagtaaaccgcctgaccattgctcttgaatgtgtacgttacaaagtaggccaggaggaagctatgcgttatattcgcaacaattaaagaacccggaggacaacatagtgattgaaaaaatgaaatttgtgagtatcaccgggccaaaagcggatattgacagagtggtaaaccggtatctcagtaaatatgagatccatctggaaaatgctctttctgagctgaccactgttcgtcatcttactccgtttctggaaatcaatccttataaagatatgctgtcaactatcagcagcttttatgaggaactggatactcctgaacagatcccggaaaaggatctgaccattgaacaggctctggatattgtttccggcctgaaaagcgaatctgaccggatcgcagacaggaaatgccagctggaagaacagcgtacatccctgactgaatccatgcggatcatcgctcccttccgaaatgtggaatttgatgtttcttctatcctgaatttccgtcatatccactatcgtttcggacgtattgaaaaagagtatttttacaaattcaaaaagtatatttatgaaaatctggatacgatttttatcaaatgcaacgaagacgaccagtatttctggggcatctactttgttccggaatgcgaggctgccaagatccatgcagcttatgctgccatgcattttgaaaaagtctttatcccggatcaatatcagggtacagcaaaagaagcttacgctgccctggataaagccattcacaaaaatgaagctgacctggctgatgctaatgaccagatgaagaagcttttaaaggataaggcttctgatattgtttctgcatatcagactctttcccagctttccaggaactttgatgtccgcaagctggctgcctgcctgccaaacggaagcagcaaagaccaggcaaatgattcagaaaatgccaataccttctatattttatgtggatggatgacagaagcaaataccagaaaattccaaaatgacattaagaatgattctaatatcttctgtctggtagacgatgatgaattgaacattaagaaacagccgcctaccaaattaaaaaatccaaagcttttcaagccctttgaaatgtacattaagatgtatggccttccggcctatggagaaatggatcctacctggtttgtggcaattacctattcctttatctttggtgctatgttcggagatgtaggacagggacttctgcttcttatcggcggactgcttctctacaagatcaagcatattgaccttgcaggtatcataagctgtgcaggcgtcttttctaccttcttcggatttatgttcggcagcttctttggatttgaggatatcctgaagcctatatggctgcgtccaatgaatgccatgatgaacgtaccgtttatcggaaaactgaatactgtatttattgtagccatcggctttggtatgggactgatcttgttatgtatgatctttaatatcatcaactctgtaaagtcccacgacatcgaaaaaacctggtttgatacaaactctgttgcaggtcttgtattctatggttcagcagttcttgtaattgcactgttcgtatccggtaaaagccttcctgccacagtccttcttctgatcatgtttgtactgcctcttattatcatgttcctgaaagagcctcttacaaacctggtcaacaagaaaccacacctgattgaaggcggtgtgggcatgtttatcacacagggattatttgaaatgtttgaagtccttttaagttacttctccaatacactttcatttgtacgtatcggagccttcgcagtaagccatgcagccatgatggaggttgtactgatgctggcaggtgcagaaagcggttcccctaactgggtggtggtcgttctcggaaacctgtttgtctgcggactggaaggactgatcgttggtatccaggttcttcgtctggagtattatgagattttcagccgcttctataaaggtaccggaagacagtttgttccttttggttccaagaagcagtgaaaataataaattaaaaatattttaacgaaaggccctgactacatttataaaaactttcatttcagggcaattgaaaggagaacattattatgacagctatgactcagatcgtattagcagcagcacttgtattaagtatcattattccctttggttattatcttctgggcgaaaaaagccgcggccgttacaaaacagctatcggtgtaaatgcattcttcttctttggcaccatgctgatcgcagcagctgttatgtttgcaggcagtgcatccgtacaggcagctaccggttctgacgcaggtcttgcaaccggacttggatacatcgcagcagcacttgttacaggtctttcctgtatcggtggtggtattgccgtagccagtgcggcaagtgcagcccttggcgctatcagtgaagaccagagcattcttggtaaatccctgatcttcgtaggtcttgcagaaggtgttgccctttatggactgatcatctccttcatgatcatcggtaaattataatatgaaaatattcttaatcagcgacaatattgacacctatacagggatgagactggcaggtgtggagggcgtcgttgtccatgaacgggttgagctgaaggatgcgcttgagaaagccatttccaataaagagatcgggatcatcctgctgactgaaaagttcggcagggaatttcccgccatcattgatgatgtaaagctgaaccacaaaacgccccttatcatcgaaatccctgacaggcatggtactggccgcaaaccggatttcattacctcatatgtaaatgaggcaatcggactgaaattgtaacaaggaggcacccaatgacaatcgaagaaaaactgcagcatttctatgatgtttctgtagaagaagcttccggctctgcaagccaggccctggaagaacacaagaagcatcttgcgaaaatgttttctgatcataaacaaactcgacagcaggatgcccaggctcagattaaggctgaaacagaaaatgcaaaacgggaagtaaacaaagcgctttccgcacagcagcttacactgaaacggaatctgactgccagggaaaatgaactgaaggacgagctttttgtagaagttaaagaacgtcttacccagttcatgtccaccactgaatacgaggattaccttgtacgtaagatcaaagaagctgttgattttgcgaaagatgatgaactatttatattcctttcccctgaagatgaaggcctgaaacacaccatgatggcacgcaccggattcccggtacagatctccaaagagccttttatcggtgggatccgtgcaaccattccaagtaagaatatcctgatcgacaattcttttatggaatcattgcatacactgcgaaaagaattcagttttgacggagggccgaaagcatgagcagaacaggcacgatttatgggatcaatggcccggtcatttacttaaaaggtgatccaggctttaaaatttccgaaatggtctatgtaggacctgagcatctggtaggtgaggtcattggcctgaaaaaaggcatgaccactgtacaggtattcgaggaaactacaggacttaagccaggcgaaactgttaccggtacaggagatgcgatctccgtgcttctggggcctggtattatccataatatttttgacggtatccagcgtccgctggaagaaattgcaaaatcctccggtaaatatatttccagaggtgtaagtgttgattctcttgacactaagaaaaaatgggatgtacacgtaaccgtaaaagagggtgatgtggtaactcctggtaccattattgcacaaacccaggaaaccccttctatccttcataaatccatggttccgccagatatgggaactgccacagttatcaagacagtacctgacggagcttacaatatccttgaacccatcgtaacagtccgccttgctgacggaagcgaaaaggatattgccctggcacagaaatggcctattcgtatcccaagacctacttacaagcgttttcctgcaagcgtccctcttgtaaccggacagcgtatcctggatactctgttccctatcgcaaagggcggtacagctgccatcccaggcggtttcggtacaggaaaaaccatgacacagcaccagatcgccaaatggtctgatgcagatatcatcatctacatcggctgtggtgagcgtggaaacgagatgacccaggttctggaggatttctccaaattggttgaccctaagtccggcaacctgatgctggatcgtaccacactgatcgccaatacttccaatatgcctgtagcagcccgtgaggcatctatctatacaggtgttacccttgcggaatattaccgcgatatgggctatgacgtagctattatggctgactccacttcccgttgggctgaggcacttcgtgagctgtccggacgtctggaggaaatgcctgccgaggaaggcttcccggcttacctggcttccaagctttccgctttttatgaaagagccggcatgatgcagaatctgaacggaaccgaaggctctgtttccattatcggagccgtatccccacagggcggtgacttctcagagcctgttacccagaataccaagcgtttcgtccgctgcttctggggactggataaatccctggcctatgcccgccatttcccggctatccactggcttaccagctacagtgaatacctggaggatctgtctccctggtacagagagcatgtttcccccaaatttgtatctgaccgtaatcagctgatggcgatcctgaaccaggaaagctccctgatggaaatcgtaaagctgatcggaagtgatgttctgccggatgaccagaagcttaccctggaaatcgcaagggtgatccgtcttggattcctgcagcagaatgcattccatcaggaagatacatgcgtcccaatggaaaagcagttccttatgatggaaaccatcctgtatctctatgagaaatgccgttctctggtaaacaagggcatgcctgtttctgtcttaaaagaagacaatatttttgaaagaatcatatctatcaaatatgatgttcctaatgacaaaccggaaatgttccaggattatatgacagacatcgaccgcttctacaataatgttctggaacgcaacggctgataaacaggacaataaggaggaatgcttttatggcaatagaatatttaggcttaagcgagatcaacggccctcttgtagtcctggagggcgttaaaaacgcttcctacgaggagatcgtcaaattccgtatggatgacggaaaagaaaagatcggccgtattattgaaatctatgaagacaaggctgtgatccaggtgtttgagggctctgatggaatgtccctcagcaacacacataccagcctttctggacatcctatggagatcgggctttccccggagatcctgggacgtacctttaatggtatcggacagcccattgacgggctgggtgatatcacaccggaagtcagcctgaacattaacggacttccgctaaaccctgtaacaagggaatatccacgaaattatatcaacaccggtatttctgccattgacggacttaccacactgatccgcggccagaagcttccaatcttctcaggcaacggacttccccatgacaagctggcagcccagatcgtgcgtcaggcttcccttggtggtgactctgacgagaacttcgccattgtttttgcagctatgggcgttaaatacgatgtagctgagttcttccgcaggacctttgaagaaagcggtgcatctgaccatgtagttatgtttctgaatcttgcaaacgatcctacagtggaacgtctgcttaccccgaagatcgcattgacagcagcagaatatcttgcctttgaaaaaggaatgcatatccttgtaatccttacagatatcacttccttctgtgaggcaatgcgtgaggtttcctcctccaaaggagaaatcccatcccgtaaaggatatcctggatatctgtacagcgagctggctactctttatgagcgtgccggtattgtccgtggcggtacaggttctgttacacagatcccgatcctgaccatgccaaatgatgatatcactcatcccatccctgacctgaccggttatatcactgaaggacagatcgttcttgaccgtcagcttcacggccagtccgtatatccgccgatcaatgtactgccctctctttcccgtctgatgaaggatggtattggtgaaggctttacaagagaagaccatcaggatgtggcaaatcagctgttttcctgctacgcaaaggttggagatgcaagagcacttgcttctgttatcggtgaagatgagctttcgccaatcgataaaaagtatctggcattcggtaaagcttttgaaagtgaattcgtaggacagactgatacagaaaaccgctccatcatccagaccctggataagggctgggagcttcttggaatgctgcctaaggaagagctggaccgtgtagataccaagatcctggataaatattatcacgagactgcaaaataaaaagtgaggtgatttcatggatccaaatacatttcccaccaaaggaaatctgatccttgcaaagaattcccttgccctctcccgtcagggctatgaactgatggataaaaaaagaaatatcctgatccgtgagatgatgaacctggtggatcaggcgaaggacattcagactcagatcgatgaaaccttccgtgccgcttatgcagccctgcaaatggcaaacatggaaatgggtatcgcctttgtggaacaggtttcccacactgtgcccattgaaaattccatccgcatcaaaacacgaagcgttatgggtaccgagatccctctggtagaatatgacaaaaacaaaaatacacctacctacgcttactacagcacccgaatgtccctggatcaggccaaggcagcctttgaacgggtaaaagagctgtccatacagctttccatgatcgaaaattctgcgatccgccttgccaataacatcaaaaagacccagaagcgtgccaatgccctgaagaatatcacaattccaaaatttgaagcattgacaaaggatatttccaatgcactggaagaaaaagagcgtgaggaattcacaagactgaaagttatcaaacgtatgaagcaaagcgcctgatcttaaacaggtggatatatgaaaatacaaaaaggagactgccg

SEQ ID NO: 12 - DNA, 10884 bp, Unknown
  gut microbiota DNA sequence
ttctggtactgtgtcggtctcttttctcttgtcaatagtttttcccttttttttcgtattttttacaattttatgatatataaccaaaacatttgttttttatttttttatgtaaatcaagtcatccacatcctatccatgtggacaatgtggataattttgtgtataactttatttttcaaggttttttacatgtttaaaaagtggaaaacttttgcacctattttcatacaatccacattcctcgacaaactttgtgcaatgtgccaaaaatatatttttttccgacaatttatcccctgtcatagaaccttccctctgccaataggatagtaaaaacagttttgaaaggctatctatgcgctccagactatcccaattatccaagcgacacagatatactctcacggccctgtttctttctcttatcttccttcttggcatgggtatcggctgcctgtccggccacggattttcagaaaacagtaaatttcagtcttttacaaaagaactgtttaaaaaagaagtgtccggaaatactcttacccttcactacacgctggccgatccggaagcctttgggatttccggtcaaaaggcttcacttggaacaatggatacagatacagacagtacccgcaagctttgcaaggattatctccataagctgaaagcctttgactcccatcgtctttcaagacaaaacaatataacccaggataccctgctgctttatttccatacgcagctggaaggcctgaaaaccccttatttagatgagcctcttggcccaagccttggcatacaagcccagctgcctgtgctgcttgctgaatatgcctttcatcaggagcaggatattacagactatctgaatcttcttgcggatatcccctcttactttgacagtatcctggaatatgaaaagcaaaaatcccaaaaaggtctgtttatgagtgatgccatgcttaaccggatccaagcacagtgccgctcttttatccaggatccggattctaattacatgctgtcaatctttgcccagaagctggatgcccttgaagcgctctcagatgccgataaaagccatttaaaccaggtgcataggcaaatccttatctgcaaggttattccggcttatcaggcccttataaacggtttagaggcatttcgcggcacaggccgggaaagctgcggactttcccattatcctggaggaacggattattactgttatcttctgaaaagccagaccggggtctatgagccggtagcccagatccgtaaacggctgcttacccagcttcagaaggattctgctgaagtttccgctctggcggccatacatccatcacttcttactgactatgccaaaggaactgatctcccctctctggcaccccaaaagaccctgctttttcttcaggactgtatgcaaaaggatttcccctccctgggccaaacatcctatcagatacactatgtacataaatccatggaaaaatacttaagcccggcattttatcttactcctcccattgacaccaaagagcctaatgtgatctatatcaatcaggccgcttccaccacacagctggagctttttaccacgctggcacatgaaggctttcccgggcacctgtatcagacacagtttttttcccagctagatccggatcctgtgcgctccctttttaattccggcggctatgtggaaggctgggccacttatgtagaatcctatgcataccagtatgcagccacactgataaaccatgaggatgccgaaagcctgacccgtctgacagctctgaaccgcagcattaatctatgcctatattctctggttgatattggaatccactatcagggctggtcttctgcgcaaaccgctgattttttaaaaaatttcggtatccgagacgcatctgctgtaagccagatctaccaatatattacggaaactcctggaaattacctgaaatactatgttggatacctgaattttctggatctgaaagacaaagcccaaaaagagaatccagaaacttttgatctgaaacagttccattcccaagttcttcagatcggcccggttccgtttcctgtgctgaagaaatacctgtaacaaaaatttaaaaaaattttaaaatgactttccatagaaaaaagaatttgctataattaaatttaacataaaattattgataataaaggacagtccaatgaaaaagaatgaaaatgtaccattgaatttcagggaaaagagcatttcacgcatcagtttttatgtatccatcggtgtgctggctgttttatttctcatattcaaccagatagactacaatatgatccgcaagcctgcacagcaagcccagaaagaagcccaggctaagaaagaacaggaacaaaaggaagctgagacagcacctgaagtgactacagcctccgtgatcgcagtaggtgataacctggtgcagcccagtcttctgaattccggcaaatacgaaagcggagcctggaactacgatcatgtatataccaattttaccaccatgcttcagaatgcagatattgccatggtcaatcaggagaccccctttacagacagtcatgattctgtcagcggtacagcaccttacgctacccctacagagattggagatgcccttgtaaaggccggctttaatgtgatcacctctgccacacagctgatcgatgacaatggttcaacgatgcttacgcagactttggattactggaagaaccagcatccggacacaatgatttcaggcatacacgacacaaccgacaatgggggggccaatattcttgagatcaatggtatcaagatcgcttttcttgattataccttcccttcatctgcggtttcggaagaatccggggacacaggtatggtgaatacctttgattcacagtcagtagctgatgccattaaaacagcgaaatcatctgcagattgtgtgatcttttctgccaactggggcaaaacagaagagcctatgcctaccgaatacgagaaggaatgggccaatttcctgatgaagcagggcgtggatgtggtgatcggcacccatcctaatgtattgcagccttatggttaccttacagatgatgaaggccacaatatgctgatctattattcccttggcaactttgtatccggtcaggagaccttgaaacagcttctgggaggcatggcgggctttaccattgagaagacagttaccggtgatcagacttctgttaagatccgcgacggagcacttaccccacttgtcatgcattacagctatgaggatggcgaatatcagccctatcttctttctgattatactgacgagcttgcttccaggcacagtgtgcgggacattatcggggatgaatttaccttggaaaatcttcagacaaaatacgatgagatcatgtccatgaatgtaacaccgtccaccaagaccacacttttagatgttacctttgattcagatggcaatatgcttgatgagtccggcaatatggtaacagacacggattctatcacttccagccaatattaccagaacctttcctcagcagaaaataatgagggcagcaacgacggtgattcagacagtgatagcagtgattcagaacagcaataacggaaacatgtgtcgccaggcacacatagcaagagccatgtaccccagatcaaagggcacatggctcatttttatctcagtcgaaaagactcccacctctttcaggtggtgagtaacagcttttgggcatttgcttctgtaatagtaatcacttcttcaggagtggtgtctttcaactgtgcaacagcagccgccacataagacagattcaacgaaaaatttcttttgccacgatttggctccggtgccatataggggcagtctgtttccaaaaggatctgttccagcggtgcctgccttaccacttccttcagctttttggcatttttgaatgtaacaacaccaccgattcccagatacaaccccattttcaagtattctgctgctatctccggactgtaggaaaagcagtggatgatgccgccatacatgccgcctttcatatactcctggatgatctccagtgtatcctctgccgcatcccggctgtgaatcataaacggaagcttttcctgtctggcaatatccagctgggcacgaaacatttcctgctgtttcctgtgttcttcctttgccttgtgccaatagtaatccaggccgatctcgccaatggctaccatcttgtccatcctggaaatccgggtgatctcatccaatgtatccttggtcatcttgtctgcatcatccggatgcacacctactgctccatatatgaacggatatttcgctgtaagctctactgtacggtggaactgtcctatggaagcacatacattcacaatatgcccgatgccctgcttctccatatggcctagaagttcttccctgtcagaatcaaaagcttcatcgtcataatgggcatgtgtatcaaagatcatctgtactgcctcctgcttcttctgcctggatcctcaggtcatctcccacacggatcgttccgcctttcaaaacacgggtgaacaccccttctcttggcatgatacaatctcccattttctggaaaataacacatccatgatggcactccttccccacctgagtcagctccagcaccacatctttacagcaaaatctggtacctataggaagagcggcaaagtcaaacccttccactaccagattttctccaaacgcaccatcttctacttctgcgcctctggaacaaaatgcctgaatcttatcataggataaaaggcttacctgcctgtgccatttcccggcatgggcatctcctttgattccccagtcctctataaattcagcctcagggatactgcgtttttgtgtaccccttttttcactgatacagattgcccgtattttacccatgtcagcctccacaattcccagtctctccggtaaggatctcaatcccatgcccaagagcgctaataatatattccagactttcccgtacagccttaggactgcccggcagattaatgatcagtgtctgcctgcgtatcccggctgtggcccggctgagcattgccctcttggtaatggtcatactgtatgtacgaatcgcctcagggatccctggtaccctgcgttctatcacatcttcggtagcttccggcatcacatcccttgcagaaaatccggtgccgcctgtggtaaggatcagctctgccaggttttcatcagcaatctgagccatacgtctggccagcatatcccggtcatccggaagaatatccatggataccacctgatatccttctttttctgcaatttcttttattgcaggaccacttttgtcttcccgctctcctgcataaccagcatcactggacgttatgatcgctactctcttcataataaaaatccccgcttttaccgccttttttctctacaagatgaatgtctgtcatcaccatatgcttgtcaatggctttgcacatgtcatagatggtaagaagtgttacctgtacaccagtaagcgcttccatttccacacctgtcctgccctctgtctttactgtacagaaaacctggatccggcttctctcaccatcaatctgataatcaatgctgcatttctgtataggaagaggatgacacataggcaccagctctgacgttcttttcaccgccatgatccctgccacccgtgccacgcccagaacatctccttttttcactgtaccagcagtaaccgcctccaggatctccctgccaaccaagatagatcctgtggctactgcagtgcggcaagtaatggcctttccggacacatccaccatgatcgcattgcctttttcatcaaaatggcttaatttaccttccatgatcagcagatctcagctcctgcaggcatttctctttcaggaaccataagggaaagcttgccttcctcatcttcagcgcaaaggatcattccctcacttaagatacctgccagcttggccggcttcagattggtaacaaccataaccttcttcccaaccatctgttccggtgtgtaatgtgccttgataccggacacgatctggcgcacctggctgccgatctttacctgagagcacagaagctttttagatttcttcactgcttcacaagcaatgatctcccctacctggaactgaagcttggaaaaatcatcaaaagtgatctccggctttgcctcaagatcaatgcctttctcttcttcttttgcaggctcttccggcttggacggatgaagcacttctacctttgccataacctctttcagatccagacgtgcgaaaaggatctccggcttttctgttactttattgcctgaaggatacaatccaaaggtcttaagatcttccagtgtacgctcttttgcatttaactgggcaaggatccttgctgcagtgtccggcataaaggactgcagaagtgtagcgcctatgcagatcccttcaaccagattgtaaaggactgttgccagacgatcctgctttgtctcatcctttgcaagtgcccagggcattgtttcatcaatatatttgttacatctcttgaacagtgtaaacacctccgtaatagcatctgctacacgaagcttctccattttggcatctacttttccaggtatggacaggataaaggatttcagatcctcatctacaggctctgcaactcccttattctctacaacaccgccaaaatacttatttgacatggaaatagtacggttgaccagattgcccagtgtattagccagttcagaattaaggcgctccaccatcagttcccaggtgatcactccatcattgtcaaaaggcatttcgtggagtacgaaataacggacagcatccacgccaaagaaatctaccagctcgtctgcatagatcacattgccttttgatttactcattttaccattgccctgcaaaagccatggatgtccaaatacctgctttggaagcggcagatccagagacatcaggaagatcggccaataaatagtatggaaacggataatatcctttccgatcagatgcaggtctgcaggccacattttattaaactgctctgtactgttgccgtcacagtcatagccgatcccggtaatatagtttgtcagtgcatccagccatacataaacaacatgtttcggatcaaaatcaaccggaattccccacttaaaagaggttctggaaacgcaaagatcctgaagtccaggaagcaggaagttgttcatcatctcgttctttctggattccggctgaatgaaatccggatgtgtattaatgtaatcgataagcttgtctgcatatttgctcattttgaagaaatatgcctcttcctttgcgggcacgcaaggccttccacaatccgggcatttaccgtctaccagctgggattctgtaaagaatgactcacatggagtacagtacattccctcataatgccctttgtagatatcgccctttgcatacattttcttgaaaatcttctgtacctgcttctcatgatcagcatctgttgtacggatgaatttgtcataagaggtattcatcaaatcccagatctctttgatctgaccggaaacattatccacaaattccttaggtgtaactcctgcttcagctgccttcagctcgatcttctggccatgctcgtcagttccggtctggaaaaacacatcatacccctgctgtcttttgtatctggcaatggcatctgccagaacagcctcgtaagtattgccgatatgaggttttccggatgtgtacgcaatggctgttgtaatataatacttctgtttttccatttcttgattcctcctctttctacaacaaaaaacgccttcccaacctaccattgagaagacgagtccttgggttttcttctttatgaatgcatcgtaacacactttgccgtttttgtaaacacagttttgccgtattttctgcctgttgcttgttccgatacccaaattatgataggataaaataagattataaaaccatgaaatggtacctgtcttttcttgcaggatactattggtaaacggttgaaactattaaaaaaataaggagtgtgagcaaattgaaatatgatgtgattattgttggtgccggtcctggcggtattttttctgcctatgagctgatccaccgaaaccctgatctgaaaatcgcagtttttgaagaaggccatcctctttcccgacgtcactgtcccattgacggagataaggtaaaaagctgtatcaaatgtaaaacctgtgccattatgagcggttttggcggtgcaggcgctttttccgatggaaaatataatattaccaatgattttggcggcactctgtatgaacatatcggcaaaaagcaggccattgaccttatggaatatgtagattccatcaatgtttcccatgggggagaaaaaacaaaaatgtattccactgcgcagacaaaattcaaaaagctttgcatccagaacaagcttcgtctcctggacgcttctgtccgccatctgggtacagatatcaactatattgttcttgagaacctgttcaatgagctgaataacaaaatggatttcttttttgatacctcagtagatcatattgaagttctggatacaggctaccgcatctatcatggtgattcctatgacgactgtgagaagtgtatcgtctcagtaggacgaagcggcagcaaatggatggaaaaaatatgtaaagaactggatatccctaccaaatccaaccgtgtggatatcggtgtgcgtgtagagatccctgctgtgatcttctcccacctgacagatgaactgtacgaaagcaagatcgtataccgcacagaaaaatttgaagataatgtacgtaccttctgcatgaatccctatgggatcgttgtaaatgaaaatacaaacggaattgtcactgtaaacggccacagctacgaagatcctcagaaacaaacagaaaatacaaactttgcacttcttgttgccaagcacttttcccagcccttcaaggatagtaacggctatggcgaaagcattgcccgtctctccaatatgctgggcggcggtgtgatcgttcagcgctttggcgatcttgtccgaggccgcagaagtactgtcagccgtattgatgagggcatggttcgtccaaccctggctgctactcccggagatctgagccttgtgcttcccaagcgaatcctggatggaatcattgagatgatctatgcccttgacaaaatcgctccaggtactgccaatgatgataccctgctttatggtgtggaagttaaattctataacatggaagtagacatcaatgaaaatcttgaaaccaaatataaaggattgtatgtgatcggtgacggaagcggcgttacacactctctttcccatgcttctgccagcggtgtatacgtggcaagacagatcacacagtaaagatcggatcaaacaaatcatacattcaataacaaataaaacagtacatgtcatcgacaacgaataaattcgtaaattctgttaattacttattgacatacagaagaaaataggttatattaatttcagtaacagttatcattatcagaaaggagctagttttatggcagccatgaaattcagccgtcagcgagaatccatcaaagaattcttgagaggacgtacagatcatcctactgctgacactgtatatgagaatgtaaagcttatatatccaaagatcagccttggaactgtgtaccgcaatctttctcttctttctgatattggagagatccagaagcttgcaagctttggcggttcagacagatttgacgcccggatcgatccccactgtcactttatgtgcaccagatgcggcagagtccttgatatggatgaggagcattttgacaagcttatggcagaggcggctatccattttacaggcggtgagatcactcattataacgccagtttttacgggatctgcaaggattgtaagggaaaagagtaactattccttattaaaagccaaaaattttacttattaaaaaccaaaagttttacttgacaattcagcaattacatgttacattaaaacagtaataattactattattaaaaattaaataattaaattatagaaaaggagatatgaattatggcaaaatgggtatgtagtgtatgcggttatgtttatgaaggcgagaatccaccagaagcctgtccacagtgtaaagcaccagcatctaagttcactaagcaggatgaaggaaaccttacatgggcagctgaacatgttgtaggtgttgctcagggcgtgagcgaagacattcttgcagacttaagagcaaatttccagggtgagtgctctgaggttggtatgtatcttgcaatggcaagagtagctcacagagagggatatccggagatcggcctgtactgggagaaagcagcttatgaagaagcagagcatgctgctaagtttgcagagctgttaggtgaagttgttacagacagcaccaagaaaaaccttgagatgcgtgtagaagctgagaacggtgcaacagctggtaaattcgaccttgcgaaacgtgcgaaagcagctaatctggatgctattcatgatactgttcatgaaatggctaaggatgaagcaagacacggaaaagcattcgcaggtctgcttaagagatacttcggagaataattttttccagaaattcgcatagaatacagattattacaaaggggttgccgcactgatatgctcccttctaggtagaca

SEQ ID NO: 13 - DNA, 2101 bp, Unknown
  gut microbiota DNA sequence
atcaaagagtatagcaacacgacaatgaggcttgtaagagccggtaaggtagtagacacatttagacgagtgatagagtgggaggatgagccatgttgcaagaaatgaagttagaggacgcaataaaaaatacttaaaaggcagaaaggtgctgccagatcagagaacagcaccagacacaacaggcagaagctgcattactggatgtagtgtggcagctggaatgtctggcaaagaaaaaagatagtcaagcgagaaaggagccagcctccggccggggcaagggtataccgggcttcttgaaaagaaaatgattcatggagaattaattgtggacaattttgccggtggcggcggtgcatctacaggtattgagctggcaacgggatatagtgttgacatagcaatcaatcatgatcctgaagctattcggatgcataaaactaaccatcctaacacgaaacattactgcgaggatgtatggcaagtggatcccgtagaagcctgcaatggacatccggtagggcttgcatggttctcaccagattgcaagcatttcagtaaagccaaaggtggaaaaccaaaggacaaattcatccgcgggcttgcctgggtagcatgccgctgggctgggcttgtaagacccagggtaataatgttagagaacgtagaagaatttaaaacctggggaccacttaacaggagaaaacatccgatcaagaccaagcagggaaagacatttgagaaatttgtgcagcagcttacagatcttggctacgaggtgcagtttcaagagctgatagcagcagattatggtgcgccgaccatgcgaaagagattctttctgattgcacggtgcgatggcaagccgattgtgtggccagagccgacacatggggcagcggacagcgaacaggtgaagaatggcagcctaaaaccttatgtcggtgcatatacccagatagacttcagcaggccgtgtccttcaatttttgatacatccgaagaaatcaaagagaaatacggtatccgggcagtgcgtcctttggcaccaaaaacaatggacagaattgcccgaggattgaaaaagttcgttctggaaaatccagatccgttcatcatccaatgcaaccatggagggaaacgcaaggcaggcgatatacgggatccgcttccgacgattactggaaaacacgggtacggtatagcggtgccgaagctggctccgataatcgataaggcctacgccgggaattatgccggcggcgggagccgggtagacaaacctatagataccatcacgacagtagatcacaatcggctggtggaagtgagccttgcaccgtgcatcatgtgcaacaacaataataatgttggagctaacgtagaaaatccgttaccgacagttacaacgggcaatccaaactttgtagtagcacctactctcattcagtatcattctgagacaactaaggatggagtgcgagggcaaaatattgaatctccaattatgactgtggatggttcaaaccgttacgggttggtcacatcgttcttaagtaaattctataaatcaggaactggacaggatttgagggagccactgcatactgtgactacatcacctgggcacttcggagaggttagggcgttcctgattaaatattacggagttggaacaggtcagaaagtggaggagccgcttgatacagttacatcaaaagataggttcggtcttgtgactattaagggggtagattaccagattattgacattggtctacgcatgctggaacccagtgagctgtatggttgtcagggattcccagaagattacataatcgatcatgattatacaggaaagacatacagcagaactgagcaggtgcggagatgtgggaatgcagtatgtcctccgataccggcggccttggtaaaaagcaatctaccagaactttgtgtagccacccgaaatcctatctgcagaaatgaccgcatgaaggaagaaaccacaggacaattaagatttgcgtaggaaggagagatgcttaagatggatatgccaaaatataaaacctgtaaacacagtaccggagagtat

SEQ ID NO: 14 - DNA, 1559 bp, Unknown
  gut microbiota DNA sequence
atccggtgaaaaggtatccataaacggtttatctgttgcgccggtattatactccaccgcccggtacagtcttttcttgcctgccggatactcaaagctgtccgtatccttccggtactttaacagactctgcgcaatgtgtacggccgtctccttactttcgtactcccagttgatctgcgaataccgacggtctgcctcctgcagatgttctgctgctctcgaaaacacagctgcgcctagcgggctttcagaatcctggttgtttccaagcggaaccctgaaataaccaaaaggcagcttgtcagttcccgcaatagtgatctcctgcgccagatctgaccagcgggttacagatcccacaggtatctctgtcccaagcatgccttctgtctttgaaacaaatgccctgttccggatattcaaagtaccttctttcagggtatgtacctctatcctgctgtatatctcattgtttttccggaattggtccaggaatgcacattttgtgatcttttccgtgtcaaattccagagggaaaaagttgtctgcctggatgtactggatagatattccgtctgcatttacataaggtttaaagaccagtccgccttttgcatccgcatattccacctggatccgcagcttctctatgactttctggtaaacctcgtccatgtatgaagcctttgcgcttccagatacttcgctttttacttctaggaccgtcagcctggcgatctccccagcaaccgctgccgcaatccctgcgctctgcgttgtttcgttgacccacggcggtctgccttcatacatctttgaccacagttctatgtgtgctgcagtcctgctgctcattgcataatcaatctgctcatccttatccaggatcttccgcaatgcctgatacatatttgtataattcatattcatcacccgtacctgatgagctggctgatctgccgctcgatcgtatattcaaaactgtctaatgagtcaatatcactggtcccatcatcaagccttacattcctggtcagttccttgggatcccacactgcagtacacagggcatttacaaggctgtcacattccccatccatgtatgcgaagcgtccctgcgccatcaggatagaggttgcattgatacggtcattgatctctgttttcaatgcgttctcaaccctgacccagccaagaccgttcttcctaagactgctgcggatcccggcaatcaaggtctgttctgcactgtccgcatagaccactgttacatatccgtaacggctcagtatcctctgcacaaaattgcagaacatcctgccaagcatgtccggatcaatctctatggcattaccgctttcatccttgcagctgatccactcagaagctaatgggacaaccatctggaagcctcttgtgatcgctgtggctgtaaaggaatgaccggaaccagatccaccaaagtcaatgccaagattaatctccatgatatcctttggcttttccttcatggcaaaaccaaatttcttggtactgatatcgtctgcaaaccgccg

SEQ ID NO: 15 - DNA, 153 bp, Unknown
  gut microbiota DNA sequence
tttatctcagtcgagaagactcccacctctttcaggtggtgagtaacagcaagttcgtctcagtgggagtccaatctccgactgagataaacgctccgcgaggatgcgcagtgattctgtaaagaatatgtcagcttacgctgaccagaatca

SEQ ID NO: 16 - DNA, 25519 bp, Unknown
  gut microbiota DNA sequence
gctggagatggaagtgcagtaatgtacggagttgaccagtactaatcggtcgagggcttgaccaaaaagcgagaaagcggccatggcacagggatgtggacagaggcaggtttacctggtgatggacacagagactgtggcaggggcatttgcgaagcaaaaggcatcgagcaacgtagttgcgagatgaccgctttcgagaatagttaattgcaggatttcacgattccaaaggatgtcagcatgtatgtggttttgaaggtacaaaagcatttgagcagtggacttggttcattgcttttttttatgcaataaaatattgctccgtgctttgcaattccactataggctatatgaaaaagaaactgtagcagatttcagagattaatgatacaataaaaaaatccaggatgaaaagcatcactaacggaagagaaaaagagaaagaaggaaaatgcatggacctgaataaagaaaatatgactaagatcagatatctgatcacttttgccattatcctgtatcttggagttcagaatattcatgtagtacttggtgtattggggctgggctggggattattgtttccttttattgtaggttcagccatggcatttgtattgaatgtaccaatgacatttatagaacgtcatctttttggaaaagcaaaagaaaatcataaaaaaagtgcagagaaagcggcaagacctgtaagcttgttcctttctattgtatttatcattctcctgatcatgcttgttgtactggttgtgcttccccagattggtaatgctatggtcagtgttgtaaagcgtgtggaagagcgagttccacagatccagcagtggttgggaagtacatttcaaaaggattcccagattgtaaaatgggctgactccatcaatattcagcctgaaaagattctgaattctgtaatgaatacacttaaaaatggtgctgataatattgtggcctctaccatttcctttacaaaggggatttttagtacagctatgaatgtaggtattggttttgtatttgcatgctatatcctgctgactaaagaacgattggcacggcagatgaaaaaggcattttatgcgatttttccaaagaggatcgtggaaaggatccttcgggtagccagactttcaggcaaaaccttttctagcttcattaccggacaatgtatagaagcggtgatcctgggggctatgttttttgttaccatgaccgttggcaatttcccttatgcaatgctgattggtgtactgatttcatttacagcgctgattcctatgtttggtgggattattggctgttggactggattttttctgattctaatggtaagtccggtaaaggccttggcttttctggtactgtttgttgtgctccaacagattgaaggcaatttaatctacccacatgtggtaggcggatctgtaggacttccggcaatctgggtgctggctgcggtgactgttggcggcagcttgatgggaatcgtaggaatgctgatttttattccgctggtttctgttttctatgcattgtttaaagaatgggtaaataaaagactggatcagaaaaaaatcactgtaaattaaataagctgttaagaataatgacaaaaacaggatttcacaaaagtacgttaatttaagcaggaaaaagctccctcgcagtatctttaagggagctttttatgttatgtaaatttaccaagggcagatcattcaccctgagtgtttttctttacttcagcaagcttcattgcacgaactttcatcggaagaccaaagagagtgatgaaaccgtctgcatcatgatgatcatacatatcaccggttgtaaaggaagcaagagattcgttgtaaaggctgtaaggagaagttgtgcctgccttaataatgttgcccttgtacagtttgaacttcacttcaccagttacatatttctgagtggactcaacaaaagcctggagtgcttcacgaagaggggtgaaccattttccttcatatactacctgtgccagctggcttccaagctttttcttggtttccatagtttcacggtcaagaatcagttcttccagctgatcatgagcctccataaggatagttccgccaggagtctcatatacaccacgggatttcataccaacaacacggttctcaacgatatcaacaataccgattccattctcgccgccaagtctgttcagctctgtaataatttcagatactttcattgctttgccatttaatgttttaggaacaccggcttcaaatgtcatagttacttctgtttctttgtcaggagcctgctgtggagtaacgccaagtacaagcatgttatcataatgtggtgcctgggaaggatcctcaagctcaagaccttcatgactgatgtgccacaggttacggtcacggctgtagctgtgactttcatcaaaaggaagatgaatgccgtgagcctggcagtaagcaatctcatcttcacgggactgcatggtccatacgtctgtcatacgccaaggagcgatgatcttcagatctggagcaagtgctttgatggaaagttcaaaacgaatctggtcatttccttttcctgttgcaccgtggcagatagcagaagcaccttctttacgtgcaatttcaaccagctttttggcaattgcaggacgcgccatagaagttccaagaagatatttgtgctcataaactgcaccggcttctacacatggcataatatattcatcacaaaattcatcaataatgtcttcaatatataatttggaagctccggaaagctttgctctctcatcaagaccatccagttcgttaccctgtccgcagtttacacagcagcagatcacatcataaccaaaattttctttcagccaaggaattaatgtggtggtatcaagacctccggaatatgctaaaacaactttttctttcataattttttctcctgacatttttaatattcaatattcaaaagcgagtagtaaggattcaaagggcggtgagtgaaaaatatgcataatatgtaattaaatatgaatatttattcgcttacatctcacctggttttctacttgacccattgctggaaaataatatacaacattttaaataaatatgcaataggaaatcaagaaaaagtcaaattttttttgcataaaaatgcagcataatatagaaataaaagggaaaatatgcacaaacaaagaaaaaaggtgagaaaaataaggaaaaaaggctattgcataatatgcagaaaagatgtataatctacggcacaggaggtagaagtgatgataaaagcaggtattataggagcgaccggatatgccggcaacgagatcgtaagacttcttctgggacacaaagatgttgagattgcctggtatggctccagaagttatattgataagaaatatgcagatgtgtacaggaattttttccagatcgtagatgcaaaatgcatggatgataatatggcagcactggctgatcaggttgatgtgatttttacagccacacctcaggggttatgtgcatctcttgtgaatgaggagatactttctaaagcaaaggtgatcgacctgagtgcagatttcaggatcagggatgtagccaaatatgaaaaatggtatggcatacagcacaaatctccacagtttgttgaagaggctgtgtacggattgtgtgagatcaatagggaagatatcaaaaatgcaagactggtggccaatccagggtgttatcctacctgttctacattatccatttatccattggtaaaagaaggaatgatcgatccaaacactattattattgatgcaaaatcaggtactaccggtgcaggaagaggggcaaaggttgataatctttactgcgaagtaaatgagaatatcaaggcttatggcgtagcaggacatagacatacccctgagatcgaggatcagctttcctatgcatgcggcaaggacgtggtgatcagctttaccccgcatcttgtgcctatgaatagaggcattcttgtaacagcttatgcatcccttaccaaagatgtttcttatgaagaagtaaaggctgtatatgataaatactatgataatgagcagtttgtacgtgttctggataaagatgtgtgtccacagacgaaatgggttgagggcagcaattatgtagatgtgaactttaaactggatccaaggaccaatcgtgtgatcatgatgggggctattgataatctggtaaaaggtgcggcaggacaggctgtacagaacatgaatctgatgtttggatttaaagaaaacgaaggattattacaggtgcctatgtatccgtaaaatcagggaggattatattattatgaaagaaatagaaggcggcgttacagcggcgaaggggtttcaggcagcagcagctgctgctgggatcaaatatcagggacgtacagatatggcaatgatctacagtcagacaccctgtgtggcagctggcacattcactacgaatgtagtcaaggcagctcctgtgaaatgggatcaggagatcgtatatcatcatccacatgctcaggcagtggtatgtaacagtgggattgccaacgcatgtactggtgagaaaggatatggttattgtaaagagactgcgcaggcagtgtcacaggctcttgggatttcagaggacagcgtgctggtagcttctacaggtgtgatcggcatgcagatccctattgacaggatcactgcaggtgtgaaagcacttgtacctggactggatggcagcattgcagcaggtaccgaggctgcaaaagcgatcatgaccacagatactgtgaaaaaggaagttgcagtacaggttcagatcggcggccagactgtgacagtaggcggtatgtgtaaaggctccggtatgatccatcctaatatgtgtaccatgctttcctttattacgacggatgcatgtatttcaaaggaaatgctgcagaaggcacttagtgaggatattaaggacacctacaatatggtttctgtagacggagatacttctaccaatgatacagttcttctgttggcaaacggccaggcaggcaatccaaagatcacagaagagggcgaggatttcaaagttttttgccaggcacttaattatgtaaatactacacttgcaaagaaaatcgcaggtgacggagaaggtgcaaccgctctttttgaagttaagatcatcggggcagagtcaaagcagcaggcagtaacacttgccaagtctgtcatcacttcgtctcttacaaaagctgcaatttacggacatgatgccaactggggacgtattctctgcgcaatgggatattccggagcacagtttgaccctgagaaggtagatctgtattttgaaagcagtgcaggaaagctgaagatcattgagaatggtgtttctactggatataatgaagaagaggcgacaaagattctttcccagagtgaggtaacagctattgcagatgtgaagatgggctgtgcatctgccactgcatggggatgcgacctgactcatgaatatgtaaacattaatgcagattatcgttcctgacaggaggagtacttcagatggtaaatcagatgtatttggacaaggcagaggtgctgatcgaggcgctgccttatattcagcgttttaacagaaaaatcgtagtgatcaagtatggcggaagtgctatgctggatgaggaactgaaaaaaaatgtgatcaaagatgtggttcttctgaaacttgttggttttaagccgattatcgtgcatggcggcggcaaggagattagccgctgggtaggtaaggttggaatggagccgcatttcattaacggtctgcgtgttacagataaggataccatggagatcgctgaaatggtgctggcaaaggtaaataaagaacttgtaaccaatgtgcagtcccttggagtaaatgcagttggtatcagcggcaaggatggcggccttcttgaatgcaagaaaaagctttctggtggtgaggatataggttatgtaggagatattacccatgtaaacccggggatcctttatgatcttctggaaaaagatttcctgccgattgtgttcccagtaggatttgataagaattatgattcttataatattaatgcagatgatgcggcatgtgccatcgctaaagctgttcatgcagaaaaactggcgtttctttcggatattgaaggtgtttacagggataaagatgatccatcatctctgatttcagaactgcatgtccatgaagcacagaagctgatcgctgatggttttgtaggaggcgggatgattcctaagctgggcaattgtattgatgccattgaaaaaggggtaaaccgtgtacatatcctggatggaagaatcccacacagtctgctgttggaaatctttaccaataaaggtattggaacagccattttaagagaagacggagaaaaatattacaatgaacatgaatgatcagatcgaagaagctgaagttagtattcttcatacatataaccgtttcccagtagtatttgaaaaaggtgaaggtgttcatctttatgatacacagggaaaagaatatcttgattttgcagccggaatcgcagtaaatgcgctggggtatcattatcccgggtatgatgaagcattgaaagaccagatcagcaagcttacccatatttccaatctgtattataaccagccggtgatcgaagctggtgccaagctggtgcttgcaagccaaatggataaggtgttttttacaaacagtggtacagaggctatagaaggcgcactaaaagctgccaaaaagtatgcttatgtacgtgacggacatgcagaccatgagatcattgccatgaatcattctttccatggaagaagtgtgggtgcactttccgtaacagggactgctcattacagagagccctttgagcctttaatgggaggcgtgaaattcgcagactttaatgatcttgaaagtgttaaggcgcagattacagacaaaacctgtgctattattacagaaactgtacagggtgaaggcggtatttatgctgctgacaaggaatttctggaaggccttcgcaggatctgcgatgaaaaggatattctgctgatcctggatgagatccagtgcggaatgggaagaaccggttattattttgcatggcaggcatatggggtacagccggatattatgacctgtgcaaaggctcttggatgcggtgttccggtaggggcttttgtactgaacaaaaaggctgcttctgccagccttgagccaggagatcatggcactacttatggcggaaatcctttcgtgtgtgcagcagtaagtaaggtgttttctatttttgaaaaagatctgatccttgcacatgtacgggaactgactccttatctggaatcaaaactggatgcgcttgttgcaaagcatgagtgtgccgcatgccgtcgaggtatgggctttatgcagggaatcgtgatcaaaggacgtccggtcggagaagtggtgcagaaagctttggaaaaaggccttcttgtgatttcagcaggaagtgatgtactgcgtattgtgcctccgttagtgatcacaaaggaaaatgtggatcagatgtatgagatccttgatcagtgtatggaataaacaatgagaaaagatatttttatgtaacaggaatgttacagagtaattttctcttacaaaagaaatcagccccgggtcggatacctggggctgtctttttttgtagtacagaactgaaaatataattcagaattgaaaattatttaatgatggtgccagttttctcacgatagccgtctttggcatgggcaaggtctgtgattacggtacgacgtccttctcctttttcaataaaagagataccagcctggaatttaggaagcatggatcctggagcaaattgatcctcatccatatatgtacgtgcctcatccacagagatgacatcaagatatttctcatcatcttttccaagattcagacttactttttcaacgctggtaaggatcatcagtgtatcagcaccaagttcttccgcaagaagtccggctgtaaggtctttctcaataatagcactggcaccgtgaaggtcgatcccctgctccataaccggaataccgcctccgcctgctgcaatcaccacttgatctgcattcaccaaggcacggactgcttcaatctcgatgatcttctgaggcttgggagaagcaaggatcctgcgaaatccaccctccggaagctctgttacgaaattacccttctcttcctctgcctctgcctcatctgcattcagcacacggccaatgaccttttctggttctgcaaatgcatcgtcatacggatcaattactgtctgggtaaggatagtgctgactggtttatagatgcctcttttgatgaattctgcacgaatggcattctgcaggtcatagccgatataaccctggctcatggcagagcagacagacataggtgcaaaggtatagtccggatgtgctttaccaaattcattcatggcagtatggatcatgcctacctgtgggccattgctgtgggagattaccacatgtgctccatcttcagtcaggtctgcaatggctttggctgccatcttggtggcaattttctgttctggaagagtagttcccagggctctgtgccctaatgccacaactacgattttttcactcataggagatacctcgctttttttaattatatggtatgatccagggtcaaaacacccaaatcatgtgatattgctaaacctcaataaattgaatccgcaacgatgttggtattgaatggaataattacgaatatcttacattataaaagacatggagagtaattgcaacaaaatttatctgggaagtagtagcatagaaacagctatttcgccaggaagccgtaaggctgtaacagtcatttatctatggagccaactgtacatgttagaataaggaaaagccatcaggatacacctgatggctcatttcctatactttttgagggggggagatagagagtggtatttcatctatccaagacatattatatatggcaattgtgtgtaaagtgtgtcgtatttataaaagaaatcgaaagtttataaagaaaaattaaagaaggattataatttttaaaccctcttgtatttggaaatcggttgtgatacagtaggaacaatctatcttgacagccgatcataaggctgcatttctttttttcttcaggcatcctgtcgatgcgatatccagtaagcatatacagttttaagcaggtacagcgaaaactaagtcaagtcaatatggcagttacttaatattcactgtattagtacatcgtgatcaaaatatgggtcaaagagctgactttgtgggaacagggggattccatgtgagaggagggatctgtctgttttttttcgctccgcaaggatgcgttatagaatcattgtaactgtgatacatggataaacatgaaaagacaggaggtttgaaaagtatgaagaaaatcaacatgaagaagtatacgccaaaagaatttagaaaaaagaaaagcgttcataaaagttacatcaggagaatgtccagaaggattgtaaatgaaaatgtggggattattctggctggtactattctgggagaaattttgctgtcggctgcttttgtatcagccagtgaaaatgaatttaatataaatgaaagagaaactataaggatagaacaaagggctgtatggacagatgaagaaaactataaaggaatcattgagattaattttaatggcctgtcacaatggaaagaagaaatacaaaaaagagaagtacagacaaagatggatacagatatatttttgagccagtgcagtgaaaaaggaacggaagttacggaagagcagcctattgaagaaaatggtgcagaaatacaggaaaatgatacggtaacagaaactgcagagaaaatagcagaagaaaatgacgagataacagaaattacagaggaaacagaaataatagagggaacagaaaatacaggaggaatagcaggagaaaatgttattggaacagggattgaagaagaaaactacgtagatacaaaggaaacagatcgtaatgagatgtcaagccaggacggaaacgagaacttacaaaatgaaaatgaggaattgcagaggacgctgtgcttttctacatatctttcagagtatttcatattggatcagacagggggtggtctgccttatggaatatatacagaagaaatcccagtgatcactcagataggtgttgagactacgatctcaaaattgtattacacctttacagaagcagatctggagcaggatcatgtaattatttctattcctgttacactgcgagaagaatacaggtatgcagaaacaaaaaccttatttcccgtatttcaggatagcccgcttactgtgaatttaaatggtgagcaggcatcgggtctttatgcgtctgttgtggaggaagtggaaactaatctgttttcaggagaagaatccaggaaactactgatacaaagtaaaggtcctgagcttttggcacgggccggaaaattggatttttctatggaacttagccaggaaaaagaaaatcccaaagcaagggaaatcgtatattatcatgtccttttgtgtaataccggagaaagagaaatagaaaatctggtcctgcaggtacaggcgaaggattattctgttcattggcagcaaagtcaggagcactttattattgacgagaacagtcaggcagtgctgggaaaacttgcagcaggccagacacaggagctgatcttctggctgcaatctgaggaatctgaagaaggagtcatggaaataaaagtacaggcatatatccaaaatgaagcagagccagtaaaaaaggaaagagtcataagtacaatgatccagcctctgaaagctgattttacagtggaaaaaacagcagactgtattcttgcaggaccgggggatacaattacttatcagatatgtatccgaaatacaggcgagcgaactttacattctgttctgagtacagagaaattcctggattccaggataaaagccagatttttggaaatggagggagtacagctgaataagtctgggactaaggctttgattccgaagatattgccaggagaatcagtaggtctgaaagcagttgttgttcttcctgaggatattgagagcagtgaactgatcaaccaggtgacagtgtcttctgatgaaacaaaagaaaagcagatccggtctgaagcagcagtgactgtgcagggaattacacatacacctgtagaagggcaggaagataaccagccaccatatgaaacagcatacattacagaacatgattcgccaaaaacaggtgatcctatgtttaaggaggagtatgaacatttgatgctccttgcttttggaatctctattgctgctggagtacacatgctttacaaaaaacgcaaaagaccttaatccagagttaaaaaaccgccggggcattcccattgaaaaccaaccttgggtgtgctattctatagtggagcaaattttgatttttctatatatgatgatgttagtacagtgaatattaagtaaccaccatattgacttgcctgatttttcatatgctgtgttgtcgtcagtcgtcgtagccaccgctacgcctccatcctccgccttgcatatgagaaaatcattctgcgccaatatagcagatacttaattttcactgtactagatatcatcaagtatagaaaacaaggaggaatgtatcatgcgattatcatccttattagaagaattgaaatatacctgtatccagggtgatctggataaagatatttcagaagttacctatgattcacgcaaagtaaaagaaggtgcactgtttatctgcataaaaggagctgtagcagacggacatagatttgttccacaggtatgcgaaaaaggagccgctgcacttatcacagaagaaccggtacaagcaccagccggtgttactgtgatccaggtagaaaatacaagatatgccatggcatttatatcagctgcctggttcggacatcctgccagaaaactgaagaccattgggattaccggtaccaaaggaaagactactactacatatatggtaaagtctattcttgaaaatgcaggctacaaagttggtttgatcggtactattgaagcaatcatcggagataaggtgattccagctgccaatactactccggaatcttatgtaatccaggattatttccatcagatggtggaagctggctgcgattgcgtggtgatggaggtgtcctcccagggtctgatgcttcatcggacacagggatttgtatttgatttcggtatatttaccaatattgagccggatcatatcggacctaatgaacataaggactttgaccattatctggcatgcaaggccatgcttttgaaacagtgtgtggtaggaatcgtaaacagggacgatgagcattttgacaggatcgttgaaggacatacctgtaaattggaaacttatggattctcaaaagaggcagaccttcgtgcagaagatgcgaagcttattggtgggaaagggtacctgggtatttcctatcacctgacaggtcttctggatttttcggtggagattgatattccaggcaaattcagtatttataattcacttacagccattgcgatctgccgtcattttaatgtatcagaagagaatatcctgaaagccctgaaggtggcaaaagtaaaaggcaggatcgaaatggttaaggtgtccgatgaatttacccttatgatcgattatgcacataatgccatggctttggagagccttctcacaaccttgagggaatatcatccccacagactggtttgcttatttggatgcggcggtaatcgttctaaactccgtcgttatgaaatgggagaagtgtccggcaatctggcagatcttaccattattacttcggacaatcccagagatgaggatccccaggcaatcattgacgatattaaggtagggatttccaagaccaatgggaagtatgtggagatcattgaccgtaaggaagccattgcttatgccattcatcatggagagcctggagatattgtgatccttgcaggaaaaggtcatgaggattatcaggagatcaaagggaaaaagtatgctatggacgaaagggttcttattcgggagatccttgaagaagacaaggaaaaaaacagatagaatatgatttatgcagatgttattattgatatttcccatgaaaagctggatcggacatttctttatcgtgtgccggaagaaatggaagggcagatacaggcaggaatggtagtttctgttccctttggaaatggaaacaagcttcgaaaaggatatgttacaggcctttcgggagaagctgactttcaaaggggaaagatcaagcagatccaggcactgttaagtgatgaagaaacaacagaaagtcgcttgatcgtacttgcagcctggatgaggcatagatatggatctaccatgatccaggctctgcggacagtattgcctattcagaacaaagtaaaagcaaaagaaaaaagatatctggtactgaccatcgaagcagaagaagggaaaaaacttcttgatcagctttcatgcaccagatataaggccagaacacggctgcttgctgcgatgctggaaagaaaagtgatacctgcttctgaggctgcaaaagatctgggagcatctgcttcagttttgaaatattttcaggaaaataagattcttgaaatacgacaggaggagatcctgagaaagcctgtagatatcaggaagatccccctgactggaaaagcacagcttacggatgcacagaagcaggctgtatgtaaaatacgcggggagtgggagtctgacaactcaaggactgttttgcttcacggaataacaggcagtggaaaaacgcttgtatatatagaactgatccaacagatgatcgaggagggaaaacaggcgattgtactgatcccggagattgcacttacctatcagacagtacacagattctgctccatatttggagataaagtttctgtcctgaattccaggctttcccagggagagaggtatgatcagttcaaaagggccaaaaaaggcgagatccagatcatggtaggacccagatcagctctttttacaccttttccaaatttaggattgatcattatggacgaggagcatgagcctacctacaaaagtgagaatacacccagatatcataccagggaggcagcagtaaaaagaggggaactggaaaatgcccatgtgatccttggttctgccactccttctttggaagcatataagaaagcacaggagggagaatattttctggtcaccttaaatgaaaggtatgcggacagaccactgcctaaggtatccattatagatatgaggggagaactgaaagcagggaatcggtcagccctaagccgcagtctgaagcaggcattggaaaagtgcctggaagagaataagcaggcaatgctttttttaaaccgcagaggatatgccggatttgtcagctgcagatcctgcggccacgtaatgaaatgtccacactgtgatgtatcactttcagagcatcagggagaaagactgatctgtcattactgcggatatgaaatcagaaaacctcaggtctgtccggtgtgcggctctccttatattggaggctttaaagccggtacacagcagattcagcagattctccaaaaggagtttccagaggcatctgtattgcggatggattatgatactacaaggaataagggaagctatgaacagattctggcttcattttcagcccataaggcagatattctggtgggaacccagatgatcgtaaaggggcatgattttcctgatgttacgcttgtaggagtgctggctgcagacatgtcactgaatggttcagattaccggtgcggtgagcggacattccagctgcttacacaggcagttggccgttccggcagaggacttcaaccaggaactgcactgatccagacctacaatccggatcactacagtatacaggcagcagctgttcaggattatcctgcattttaccaggaagaaatgggttacaggatgcttttggattatccgccggctgctcatatgatggcagtgctaggcgcatgtgaacaggaagaattacttacccaggccatgcattatacagcactctttatacgcagagtctgtacggatgcagagcttcacatgatcggaccagccccccagtctgtgggaaaagtcaaagatatgtacaaaaaggtgatttatttgaagcatcaggacagcagagtactgattgcacttcgggaaaaattggaacaatacatggagatcaattccggtttcagaaaaatatatatacaatttgatttttcataaccgaaatgattcgggatataataatcagcaggaaaggaagaatagtaatggcacttagaacaatcagaacagagggagattctgttttaacaaagaaatgcagacctgtagacaagattacaccaagaattctggagcttattgaggatatgctggacacaatgtatgatgcacagggagttggtctggcagcacctcaggtgggcatcctgaaaagaatcgtagtaatcgatgtaggagaggggcctattgtgctgatcaacccggagattgttgaatcatccggcgaacagactggtgatgagggctgcttaagtgtacctggtatggctggtcaggttacaagaccagaatatgtgaaagtgaaagcccaggacgaagaactgaatgagatagaatatgaaggggaaggacttcttgccagagcattctgccatgaacttgatcatctggatggactgatgtatacccgtctggtagaaggagagcttcaccgtacaacttatgatgaggatgaggattgatatgaagattgtttatatgggaactccggattttgcagtaaagcctttacgggcacttgcagaagccggatatgaagtggcagcagtagtaacacagccggataaagcgaaaggaagaagcaagaatctggttcctacacctgtcaaagaagaagcgttaaagcatgggctgacagtatatcagccggcaaaggtaagggaacagagttttgtagatcttctccagcagatcgcaccggatatgatcgtagtggctgctttcgggcagatcattcccaagagtatcctggatctgccccaatatggatgtattaatattcatgcatcccttctccccaaatacagaggggcagcaccgattcagcaggcaattattgacggtgagaaagagtccggtgttaccattatgcgtatggaagccggactggacacaggagatatgattgcaaaggtggtggttcctattacagatgaggatacaggaggaagcctttttgataagctggcagatgcgggggcagatcttttgatcagaactgtgccgcatattctggatggaacagctgtctatgagaaacaaccggaagaaagtccaactccttatgccgggatgatcaccaaacaaatggggagaatcgattttcacaaatctgcaacagagctggaaaggctggtacgcgggttaaatccatggcccagtgcttatacctttgtaaacggaaaaacattgaaaatctggaaatgcaaaacagaagatgataatcagggagcagcaccgggaactgtacttcaggcacaggaaggcggtattttcgtggcctgtggagaaggtacactggtacttacagaagtgcagctggaaggaaagaaacggatggatacagcttcattccttcgaggctataaaatagaaaaggggaccctgttaggttaaagcagatgtgcttatgagaggagctgaaggcttatgtacggatatccttatggattttattttgaccctacgtatattttactgataattggacttgtgatctcgctgatcgcttctacaaggatgaaaagcactttttcaaaatatcgtcgtgtgagaagtgattctggccttactggtgcacagactgcagagcggatcctggctgcagccgggatttatgatgtgaagatcgtacctgtccagggcagtctgacagatcattatgatccaaggactaagacagtatctttatcacaggatgtgtatggacagacatctgtggcatctgtatgtgtggctgctcatgaatgtgggcatgctattcagcatgcagtgaattatgcaccactgaatatccgttcagcgattgttccggtggcaaacttaggttccagcctttcatggccgattttcctggcaggactgatcttttctatgcgttccctgctgatgctggggattgtccttttttcgctggcagttttgtttcagcttgtgaccctgcctgtagaattcaatgcatcctccagggctcttaggctgttggaaagcacagggattttaagtacagaagagaatctgggggccagaagggtactgacagcagcggctttgacttatgtggcagcattggcttcatccattctccagctgttaagattgattattcttgccggaggtagagatcgtgactaatggaattaacccaagagagatgatcctggaaatcctgcttcagatcgaggaaggagagcacagtcatattgctattcgcagtgccctttccaaatatcagtttctgccaagacaggaacgggcctttatcacaagagtttgcgagggaactttggaatacaggatccagattgattatattctggattctttttcaaaagtaacagtagataaaatgaaaccgcctatccgggaaatccttcgcagtgccgtatatcagctgcggtatatggacagtgttccggatagtgcagtatgtaacgaagcagtaaagctgacccagagaaaaggtttttataatttaaagccttttgtgaatggagtgcttcgtactattgcaagagagatggatcaggtgaaatttccttccagagaagagaatctggtaagaagcctgtctgttgaatattccatgccagaacagctggttgaacgctggctggaggcttatggtgaggagattacagagaagatacttaaagattttcttgaagaaaagcctttgactgtacgctgccgtacatatttgaattctcagaaggctattgtgaaaagcctgactgatcagggagtaaaggtagaacctgccccctatctgccctatgcctgccatatctcagggtttgaccatatcctggcactggatgcatttattaatgggaagatcctggtacaggatgtaagttccatgttggttgcagaggcagctgatccgcaaaaaggagattatgtgattgatgtatgtgctgcgccagggggaaaaagcctgcatgtaggagataagatggaaggttttggcacggttgatgccagggatgtgagtcaatacaaggtgaatttgatcgaagaaaacatcagacgcaccaattctatcaatgtacaggcaaaggtgcaggatgctacgatttttgaccaggaatcagagttgcttgcagatattgtgcttgcagatgttccctgctccggatatggagtgatcgggaagaaaccggatatcaagtatcgtgtaacgccgcagaagcaggaggagatcgtgattcttcaacgaactatccttgatcgtgctgctaattatgtgaagcccagaggtactttgatcttcagtacctgtacgattgcaaaagaagaaaatgaagaaaatatgatgtggtttttgcaaaactatccgtttaaattggaaagtctggatccatgtctgccagaggaactgcattccgagacaacagcacttggatatcttcagcttttgccgggagtacataagacagatggattttttattgcaaaattcagaagaaaataaaggaaaaagagtatgacagacattaagtcgatgagcatagaggagttaaaggatctgatggtgcagctaaaggagaaaccttttcgagcaaagcagatctatagctggctgcatgagcatctgatcacgtcctgggatgaggcgggaaatctgcctaaaagcctgaaagaaaaattgtctgattatcccataaccgttctggaaatggtagatcagcagatttctgccattgatggtaccaggaaatatcttttcagactgtccgatggtaatgtgatcgaaagtgtgttgatgaagtacaagcatggcaattcagtatgcatcagttcccaggtgggctgcaaaatggggtgcaggttctgtgcttctaccataggaggctggaccagaaatcttctgccttcagagatgctggaccagatttaccggatccagacagtgacaggagagcgggtttccaatgtggtagtgatgggaacaggagaaccgctggacaattatgagaatcttcttagatttatccatattcttacagaagaaggtggacttcatatcagccagaggaatcttaccgtttccacatgtgggattgttcccagaatgtatgaactggcagaagaaaagctgcagatgactcttgccctgtcacttcatgcaccgaatgatgaaaaaagacaggaattaatgcctatagcccagcgctatactatggaacaggtattagatgcatgtaggaattattttgaaaaaacaggcagaaggatcacctttgagtacagtctggtagcaggagtgaatgacggggatgaagatgcagctcagctggcaggcaggatcaaggacatgaactgccatgtaaatctgattcctgttaatccggttaaggaacgttcttatcggcgttccacccaccaggcagtggagaatttcaaaataaaacttgaaaaatatggaattaatgttactattagaagggaaatgggcagcgatattgacggtgcctgtgggcaattaagaaaaagctatatggagaaaacagaaagcgagaagtagaatgaggatatattcagcgactgatgttggacagaagcggaagatgaaccaggactatgtgtttgtttcccaggagccggtcggaaatctccctaatctttttgctgttgccgatggcatgggcggacacaatgcaggagattatgcatctgcacatgcagtacagactctggtgtcccagattcaggcagatgcggattttaatcccattaaggtgatccgtcatgccattgaagctgccaatacagaaattattgatcaggcgcagagagatgaaggacttcgtgggatggggactaccatggtagttgccaccattgtagggaattatgcttatgtggcaaatgtaggagacagcagactttacgttgtacagggacagattcgccaggtgacaagagaccattcccttgtacaggagatggtaaggcttggagagatcaatgcagaagaggcacgcaaccatccggataagaatattatcacaagggcacttggtgctgaaaagacggtagatgttgatttttttgacctgaagctggagccggggaacacgatcctgatgtgttccgatggtctgagcaatatggttgaagatcgtaagatggaagagatcataacaaacccggataaggatattacctggaaaggggatacactgatacgggaagcaaaccagaatggcggcaaggataatattgcagttatattgatagaaccattcacgaatgaggtggaaacatgttaaagacaggtatgattatagcagaacgctatgagatagtaggaaaaatcggtaccggcggaatggcggatgtctataaggcaaaggatcataagctgaaccgctatgtgggagtgaaggttttgaaaccggaattccgtgaagatgcaacctttgttaaaaagttcagaagtgaagcccaggcagcagcaggacttacacatcctaacattgtaaatgtatttgatgttggggaagatgatgggatatattatattgtcatggaactgatcgagggaatcactctgaaagagtatatttccaagaaaggcaagctttccgtaaaggaagctaccagtattgctattcaggtatccatgggactggaggcagcacacagccatggtgttgtacacagggatgttaagcctcagaatattatgatttccacagacggaaaggtaaaggttacagattttggtattgcacgggctgcatcctccaataccatcagttccaatgtgatggggtctgtacattacagttctcctgagcaggtacgtggtggatacagtgatgagaaaagtgatatttattcacttggtattactttgtatgaaatggttacaggcagggttccttttgacggggatactacagtcgccattgctatcaagcatcttcaggaggaaatggttccgcccagtgtatatacaccggatcttccctacagtctggagcagatcatcttcaaatgcacacagaagagtgtagaccgccgttaccagaaaatggaagatgtgatcgcagacctgaagcattccctgatcgatccacagggggactttgtgaagcttacatctgtggataatgatgccaaaaccgttgtgatttctgacaaagagcttggtgagatcaagcatacaccaaagcagaagacagatattgaagaactggaaaaagagatcaatgaaacagattatgatgagccggatgaaccggtaagccgcagagagcgggagagagaaagagagcgggagcgggaaagggcacgaagaagaaagaaacagagaaacagcggactgatcattacgatcctggcactgatctttggtgcagcccttcttgtagtcctgatcattttcattggccgtgcagcagggcttattggcggcagtgacaatacagaccagcagcaggaagcacaggttacggaagcaccggcagatgaggggcaggtagcagttccggatctgaaaggcaagacagaagatgaggcgaagactcttgtttctgacctgcatcttggccttcaatctatgggagaagaagcatctacacaggaaaagggccggatttcttcgcaggatcttgatcctggaacaatggtagaccagaatacaacgattaaatattatatcagcaagggaacacaggatgtaagtatcccggatgtatccggtactacagggattgatgcacagcagcagctggaggatctgggactggtagtgcaggtacagaaggtatacagtgaagcagatgacacaggaagctatcctcaggtagatcctggatactccatgtatacagagccttcatccggcacagatgccaagtccggtgatagtgtgacattgtatgtaagccgtggactggatttcggtgacagtgcagaagttccgtatgtagtgggcatgcagaagaatgatgcacttacaactcttggtaagtttatcgatattacaataaatgaacagaagagcacagatgtggcagccggggaagttatttcacaggatccggttggcggtgaggcagcagatccggatcagccaatgactattaccatcagtacaggtgaccaggagcctggtgcacaggcagatacatctacagacagtgtagcttctgcagataacagtacatcagacactgcatcatcaagcaatgatacagccagccaggcggcagctgcaggagaagtatggaaatgtacacagagactgaatacccctaccggttataatggcggcgctgtccgtctggaacttgtacaggaggtaggaggagtacctactgcttccgtgatcgtagagggtcagaagatcactttcccatatcagcttgacattacaggtgcacctggtgtgagcgaaggtacgctttatctgtcagaggaagtggacggaagctatcaggaactgggacattatcctatcacttttgaaaaggctgaataatccatgcagggaaagatcataaaaggaattgcaggcttttactatatttatgcagaagacggagaaacctatgagtgcaaggctaaaggaattttccgtaaagataaccagaagcctttggtaggagatgatgtacagatcagcattctggatcctaaggaaaagaccggaaatataacagcgattcttccaaggaagaattcgctgatccgtccggcggtagccaatgtggatcaggcaatggtgatatttgccatggaaagccctaagcccaattttcttcttcttgacagatttctgatcatgatggagcagcaggatgttccttctgtgatctgttttaacaaaggagatcttgcagaaccagaagaacagcagagactgtgcagaatttatgaggattgtggatatcaggtgattcctgccagtatcaaagatggtatcggagtagatcagatccgcagggtactgcaggataagaccactgttgtggccgggccttcaggggttggaaagtcttcgctaactaacatgcttcaggatgagatttgtatggagactggcgagattagccgtaagctgaaacggggacgtcatactacccgacattcccaggtgatccctgtaggaaaggataccttcctggtggatacacctggattttcttctttatacctgactgatatggaagaagatcagctgaaggattattttccggaatttaccaggtatgcacagcaatgccgttttcagggatgccgacatatccatgagccggactgccaggtgaagcaggcattggaggatcataaaatcagcaagcagcgatatgaggattatttggtattatatcaggaattaaaagacaaacgtaaatattaaatgaaatataaaaataagcgtaaatactaaatgaaatataaatattaagcgaaatataaggaggattattaaaactatgtatcagttgtgtccgtctattttatctgcggattttaaccgcctgggcgaacagattaaaatcttggaaaacgagggagtaaaatggcttcatattgatgttatggacggcgattttgtgccaagtatttcctttggaatgccggtgatcaaatctatccgcaaggaatccggtatgttctttgatgtgcatctgatggttacagagcctggtcgttatattcaggattttgtagactgtggtgctgattccattactgtgcatgcggaggcatgtgaggatttggaacgtaccattgaattgatccatgatgcaggcgtaaaggcaggcatatctatcaaaccggctactccggtaaatgatatcagccatatgcttgaggatgttgacatggtacttgttatgactgttcagccaggctttgggggacaaaagtatatagatgagtgtacagagaagatccaggagcttagggaactgatcgaccatgaggggctggatgtggatattcaggtagacggcgggatcaatgaggatacccttgtaactgtaatgaaggccggagccaatctttttgtggcaggctcctgggtgttcaaggatgatattgcaaagaatgtaagaaatatccagaataagatccatgaaatagcagatacactggaataaggaagcatatgattgatacagtagtagttagcgggggcaatatccaggttgattttgccctcgattttttaaaaaaactgaaaaaagaaacaaacagaaaaacatcaacacagacaagcacttcccatagtaaagatttgcagctgatcgcagcagataaaggcctggaatttttcataacagcaggcataacgccagatctgatagtgggagattttgacagcctttcctcggagggaaagatatacatggaaaaactgccacagacttctatccgcaggttaaagcctgaaaaagatgattctgatacacagtcagctgtgaatctggctatttctcagggagcaaaggacattctgatccttggagggacaggtaccaggctggatcatgtgatggccaatctgggactgcttttgtcaggcaaagaacggggtatgaatatccggctagcagacgtgaataactttatcacccttgtggataatggcacagttcttcacaaagaccggcagtatgggaagtatgtatcttttttctctgtaggaggagatgtgaccggacttaccctggaaggctttaaatatccgctgcatgatcatcatctgcggttcgcccaaagcgggcttactgtcagcaatgagattaaggagcaggaggctaggatcaccttttccgggggcaatctgttaatgctgatgacaaaagattgatattttcatgtgtcacttgtccgttaaaag

SEQ ID NO: 17 - DNA, 6928 bp, Unknown
  gut microbiota DNA sequence
tttaacataaatatagcaagaattctccttcctctgcaggtgggagatgaattgcgaaaaaatgaaaagaacacttgttctatgacacaatccgtggtataatagagtcagtcgaaaatataaattgttagaaaaaggactgatttgtatggggaaaacagatcataatgcgcattcagtatatcagctgggagtaaatcccccagctgatatagccttcggcaggattgcagaggtgcgcgtcatgcaattgcatgacgcgcacctcgcagcaagaatgcctcggcattcttgaacggatgtattatcatctgatcatggtagtgaaatatcgatgaaaagtgattgataatccaatttcagaaagagcaaaagagatatgggaatatattgttccacggtagggaaaagttctggaagaatggagtcagagtttctgcctactgacagctggaggtgctccggtagaagtaatccgtcaatgcattgaaagccagggagagaaaaagtattgaacatagcatatcgtttccgaatttatccgacagaagaacagaagatacttttgggcaaaacatttggctgttgtcgtttcctatacaatcagatgcttaatgatagaatccaggagtatgaaaagacaaagaaaatgttaaaaaatacaccggccatgtataaaaaggaatatccatttttgaaagaagtcgattcgctggcgctggcaaatgtccagcttcatctggaaaaggcatataataaattttttcgggaacctaagattggatttccaaggttcaagtcaaagcatcattccagaaacagctatacaacaaatgtggtcaatggaaatatcctggtggaaagtaagcgaatccgacttcctaaattaaaatggattgccatgaaaaaacacagggagccagcagaagaccttcgtctgaaatcagtgacaatcagtatggaaccatccggaaaatactttgcaagtctgttgtatgaaggatacagctgtgaaaaccaagcagctgaaccagattacagtactgcaaagatacttggaattgattatgcaatgcagggaatggcagtattttcagaaaagattgagacgggagaagcaggtttcttcagaaaaaatgaaaaaaggctggcgagggagcaacgaaagttgtcaagatgcgtacgaggaagccataattatgaactgcagaaaaagaaagttgccagatgtcatgaaaagatacgaaatcagcgaagagattatctgcacaaacttagtcgaaagatcgcagacagttatgatgcagttgcagtggaaaatatcgatatgaaagcaatggggcagtgtctgcatttcggaaaaagcgtacaggataatggatatggaatgttcagggaaatgttagactataaactggcgtggaaaggaaagaaaatggtaaaggtagaccgtttctttccttccagtaaaaaatgctgtaaatgtggaaggataaagaaagaactgaaattatccgaaagagtctatcgctgtgcgtgtggaaatgagatggatagagatcgtaatgcagcaatcaacatccgagaagaggcaagaaggatgttgattgcataaactgtccgtatccggacaatagaaaaataagaaaatatgcccgtgtccgggcaaaagaatcgcggggcacgcgaggatagcttgtagatacttggctcagtagagccattgagcaagaagcccccacttcaaaattagagatttaagtggtgggagtatgtcacggtaaatcctatattagttatggtattgtgtggagtggcaaatgtggctttttctatgattgcaggtgtgtgaacaggctgtattaaacaaaaggaaggatatgaggaaggaagtgtatgatatgaaggttctggaaattattatgcctgtgctggttatgatcctgcttggcatctggtgcagaaagaagaatgtattaacacaaagcggtattgacaatataaaaagcctggttacaaatattatgttgcctgtggctattttccatgcgctggcaacagcaaaatatacagggaaaatcggtatactggtaggaatcatgtttgtgatgctgctgatttctttttcggttggatttttactgaagccattattggaagcgccatataaaaaatatctgccctacatggtctgtgtatacgaagggggaatgatggcctatccattatataccagtttgtgcggcagtgaacatctttctcagattgctgtattggatattgcaggactgctgtttggcttcagtgtatatatgggaatgctgggacagacggaaaatggaggaaagattagtgcaaaggcactgtttttcagtgcagtaaaaactcctgcatttgtagccagtgttttgggaattgtagctggattaaccgggatcatttcacggcttgttgaaagctcttttggaggtgtttatcttagcgttgaaaatattcttaccacttctgtaacttctatgatccttcttgtggtagggtacagtatggaactgacccgagaactgatcagcccatgtataaaaacgatcatacttcgtatttgcgtccaggcggtgatgatggctggggttctacttgctgtccattttcttgtaggcagttcacagcttatggatcttgcaatcattctgtatatgtctgcaccggctactttcagtatgcagacattcctgaagaaaaaagaaagcagtgcatatgtatctactacaaattctttgtactgtattgtgtcaattctggtatatatggtgctggcgttgataatttattagagagatatgttaaatgacagattaggttaacttgaatcgtgtgttactctctcattatttggggagtgatgaattagaatttgaatgaaaaattatattttggataatttaggactatattgtaccaaactgaattgtatcattccagttccgtaaacagtaataaaaagaggaatgccttttggatagatttcacaaagcaaatgtcattagttcagagatttatataaaatattgtgcaaaatgacgaaaatgatttgtaattacacaataaaataaaaaaatgcacaatattcttgacaaaacaaaaaggaaagaatataatgtgaacaagatatggtagcggtaccaataaaagagaaggagagaaggagagaaggagagaaggagagaaggtgataagttgaatattagtgacattgctgtgaaagcaggtgtgtctgtcagtactgtttcacgagtgattaataatagtcctaatgttaatgttgatacaagaagtagaattcttcaaattatggaagaaacaggatatgttcctagcagtatagcaagaaatatgatgtctaaatctaatcgttcgattggcctttttataactgatattttaaatccgttttttaacgaaattattaaaggagttgaaaatgtagtaaatgctgaaggctattcacttttgatatatgcaattggaaattctgtgcaaaaagaagaagaaagtcttgaaaaactaattcgtgatagggcatgtggattgattgtaactagttgccgcatgcatagcgaaaaacttctgaaacgtgcaaaaaaatactttgatatagtttcaattcaatcaaatttggataatgttgataagattggtgttaccgatgaaaaaggaacaagtgatatgattcgttatttgatcggactaggacattctcaaattgctgtgataggatataatgaaacacttcctacttctgatgcaagatttttaggatttgaaaaggcgatggttaatgcaaaattaccgataggtgataatcaagtaataagagttgagccaggagaaggaaattgttataaagtaatgttagaattattgcgaagacggaaccgtccgaccgctgttcattgcttaaatgaatatattgcatcagaagtatacatggccattaaggatgtcggattatctattcctcaggatatttcgctaacaggattcgatgatttatttgtttcaaaattaatggaacccaggttaactacagtttcacagcctattcgccgtatgggagaagtggcagtaaagcgtataataagaagacatcaatatccagatgaggaaattcaaaatatcatatttccgacagaattgattattcgagattcagctacaattccttgcgttatgaagtagttgatactacacatgatatagcgtaggttatttatacccaaaattggtaccgctaccattgagacgatttataataagtaagtaggaggataagcttatgaatgcttggcaacaaaatagccccttaggagggttaccgtttgtgaaaaatgctcgatccagaagagaatcaagttatgatcgaactggaggaaacagagattttgtagtagtgccgcctaaagaaacaaaagtgatagcagatattcgaggggcaggaataatcaaacatatttggattacgacacgctgttatgaacctcaatatcttcggaaaattattatagaaatgtattgggacgatgaaaaaaatcctagtgtaagagcacctttaggtgatttttttggaataggtcatgcaacatgccgtcattttgtttcattgcctattaatatggtgtttacaaagcatcggggaccggcgggaccatttgctgcggcaatgaattgttatttcccaatgccttttgccaatggcgcgcgtattcaagttattaatgaatgtagtctgcctattgagaatttgttttatatgattgattatgagttgattcaagaaactccgccagaagacatgggacgtttccatgcaacatggaatagtgcatttccatgtaagaaaatagtaccggaaaaacatgaaccagaaggaccttgggatttaccaggagtgaatgtaacgggaaaagataattatgtaatattagaggctgagggcaaaggacaatatgtaggatgtgttttgaatattgataatcatgatgtaggagaacagatatacacctggccaggagaaggagatgatatgatttttatagatggagaaatatggcctccttctatgcatggaacaggaacagaagattatttttgtgcagcatggggatttcccagtggagaatatgatgcaccttatcatggaatatcacttggaagtgatcctcaggagcacttcggaaagtggagtttatatcgttttcacatagaagatccagttcattttgacaagtctattagagtaacgattgagcatggacatgctaatgatcaaggaaatgattattctagtgttgcatattggtatcagattgagccacatgcaccgcttccggacttaccgaaggtggaaaaaagacttgctcgtagatggcctgaacatggactttggtggcggtaatccaaaaaccgatttgaaatttaatagaatagaaagagataaaggattcaaaagaaactttatttagcgtaagcctatataaaagaaaaattagaggtgatgtttatgcagaaaaaaataatttgtacaatgataactacggcgctggtaatgagtctgtttacaggttgtgggacaaaagaatctggaagcaatacagcaaaaaaggatgactatataactgttttggtgcagggaggaagccccgcatttgaggcaacgcagaaaacagcagatgcttttaaggaacagacaggctatgaggtaagagtggaatcggtaccatatacaggagtgtatgataaattgaaggcagatattacagcatccacaggtgcgtatgatgttgctacaattgatattctttggatggctgaatttgctcagggattattgccaattgatgatttaatgactgatgaagtggtaaatgatttaatgcctggaatgctggctggtggtcaggttgatgatgtcaattacggaatgcctgtttggacaaactgtaagatacttatgtacagaacagatctttttgaagatccagatgaaatggccgcttttaagtcagagtatggatatgagttagcaccacctactacatggcaggaatatcgtgatgttgcaaaattctttactagagatactaatggtgatggagaaactgatttgtatggtactggtatttttggaaagacagatggagatacagcgtgctgttggcttgaggaatcagtacaggcaggtgctaaacctgttgtattaggtgatgatggagaagtattagttaatcagaaaccatatgtagatgcgttaacatttcttagtgatatagtgaatgaagataaatcttgtcctccaggagctatggaaatggcatcgggtgaagtatcagagatgttttatcaaggaaatttagcaatgatgcttaattggggacatttctatcttgcagcaaataatccggaaacatcaaaagttgcaggtaaagtagcaactgcacctcatctttctggaagtgcaggagtaggagcgattccaggaccttggtatcaggtaataccagaatcttctaagaaacaagagattgcaaaagaatatgtgaaatttatgtatgataataatgaattgattatgcaaaatttaggaaccgcagctagaaaatctttatttgaagaatatggaaagaaagaaggatatgagttcctagctgatattcaggcaactttagagggaccggcaacgcagaatagagcaccaattgttgaatggaatttaattgaaacagaggctttggttcctgctatacagcaggcgctactgaaagagaaaactccgcaagaggcattggatgatgcagcagaaatgattaaagatcttttaaattaagtgttaaattaaaggggctgtcgcactaacgtgcggcagctcatttta

SEQ ID NO: 18 - DNA, 59750 bp, Unknown
  gut microbiota DNA sequence
gtaaaaacaacaaaatttaaagtgctgtggaatttacttttgcactggaatttactttttcaagtcacaaagttcttttattgtaaaaaaaggactcgatgcatcaggatccttacatttgtactatttctgaacttttaattaaaacacaagctttcttttttttgagcagttttggtaaatgaaaaatggcgagatgcttatcgtaacaccccgccgaacagccgatttgcataagatccgcataatcaggacaatttttacattttatactggtaataacttagcattttttataatatcttgaatctgcttttcatccactccagccacatcagcaatctgagcagttgtataaccctttttgtacatacttataacaaattttaatgttgttgcttttgtcgcagcttcagttgcatcttctctaattcctaagctcaaattacacataatactcacatcctctctaaaatccttttccattggaatcgcatattcatttccaatgatgtcccgtttttcgtttaccgttaaatcttgagataacaatgctcccagtaacctatgtaactcatatttctcctcatgcttcggaagttcttcggcaagcccaatcattacgatattaatcaaatccatatttcccttccacgtataggaatttacaacactgtctttttatttttcggcatattcatacagacccaaatggaatagactcgcttgatatcattataatttgaatttgaaaaatctctttctttctgtgaggaaatcattcggcttacataaaagattgcccgattcaatatatcatatccgttcggttcgtccttctgggcttccacattaataataatctgtgacaatccatctctcatcctgacatagaatataatgtcaaatcgtatcattccctcatgaagctcaggattttcagaattaagaccaatcacacgagattcatcatttttaataacagtattagtaagacctgtatctattggaacagagttaataaatggttcgccttcaatataaggcaccacatctttcggatccattcctgcaaattcatcaacagtctttactaatatatgagccaggatacctttctggccaagtaatcgtttcgcactttcatcatattgtgcgtctttatctgtcgtaagaatcgtatttttgatttctgtattcaaaagtctttctccttttctacagcacttctaacactattcttcggctatatatgtattatactctaaatctgtattttcaacaacagccaattttcctgcactgcgcatcctcgcggagcgtttatctcagtcggagattggactcccactgagacgaacttgctgttactcaccacctgaccacctgaaagagacgggagtcttctcgactgagataaaaatcgagcagaaagtctgctgttaatggctttctacccgattttcctgtaagtatgtatattaaccttttacacttcctgcagtcaatccttcaatgaagaatctctgacaggaaataaaaactacaagtattggaattagactcagcacagaaagagcaaaaacatatccccactgtgtaaactgatgctgtccgaaaaatcctgaaatagcaatgggtaaggtccttttcaggtcatcattgatgaccgtattggcccagggaaactcttcccatgcggtaagaaaattaaaaatggatacggaagcaattcctggtttggttaatggaagaataatctgaaaaaaaacagtaaatacgcttcctccgtctatataggttgcctcgtctaactctctgggaatattctctacaaatccttttatcataaatgtagaatatggaataacccatgcgacataaaacggaatcaatccagataacttattgatcaccttcaatttaacggctaactcatactgaggaacgattaaggtagttccaggtatgatcatggttaacatgatgaatgtgaataaaaatttacgtcccggaaatctaaacctggcaatacagaatgccattgctgcggcaacgacggccgctatggcaactgttacagtggaaacaaaaatactgttaataaaattgtttccaaattttttctgtcgtaaaatgtactggaaattttccaaagtaatttcttttatttttggaaaaaatctgggaggatattcatataatgcgccatttggcttcaacgcagtactcagcatataaatcattggaagaacaacaatgataagtcccagagtgagaatcaggtatatgattcctttataagccgctttcttggatattttcaaactcccacaccccctaatcaagtttactgtggtccatcatccgaaattgaacaattgccaatattcccaatactactgcaataataaaggaaagcgctgcggagtaaccaaattcacctgtgctgaaagctttatagtacatccaggttaatacactttctgtcttatgccctggatttccatctgtaatcattttgatagatgtaaatacattaaagccaccaatggtgagcattacaagtgcaaacagaatcgttccttttatggacggaatcgttacatagaaaaatttagcaatgcttcctgcaccatctaatgctgcagattcatataagtcccttggaaccgtctgtaaagcagctaaaaatactaccatattccagccaattcctttccaggttcccaatagcattgcaacactcattccaccccatcgactgtccagccaatggatgtttccgctggtcagatgtattactttggtgagaaaatagtttaacagtccttcggtgttaaaaacatatttaaacactaaggatgcaattacccaggaggtgataacgggaaggtaatatgccactcgataactaatagaaaatttattaatattgtttatgagcatggcgatcagaagtcccagtatcatttgtgcaggtactgttatcagcgtatacacaatagaattggaaaatgccaggtgaaaatatgaatctgttaatacctctttataattggcaaatccgatgaactcctgatcaaacatagagccaaaatcccatttgaaaaagctggtgataaataactttacgattggataaatggtaaagaatccaaaaatcaaaatacctggaaggagaagaaatccaatctggatattctggcttttctttgttttcatacgatccctcccgttaacttaagagtctgttcttttattcttctgctaataaatcgtctactttttctgccagttcatccatggcatcctgtgcgctcttctcttcgttcataacagcacttacagcagttgcaagttcactgtcgatttcagaccagcaggatacagtaggtctggattccgcagatttaatggcttcgataaatggtgcaaaatctgcattctttacggtatcactttcgagagtagctttatttaccggaatctggctgcattttgccatttcttcctgagcaaactccccagtcataaatttcatgaatttccatgcagcatctttgtttgcagtattaaacatggaaatatcctcgcctccaagaacggaatgagaaccgccctctccttttggcattggggctgtagcatattcaaaacccggataagagccttccatttcggagattttccatggaccatccatgatcatagcatatcttccagttccaaaaccgtcagtcattggaatatcgccactgttccatccagtgatagcaccctctttatacaggtcagccagtgtctggattgcgttgacggtttctgtgctgtttaaatatcctgtggctttagtctggtcttcattggttatggaaccacccatgctccagataaatgggcataaattccatccagccaaagcaggttcatcatagccccaaatttgctgaccgttttcattttcgcctgccagcttcttgcaatcttctataaattcatccatagtggttggtgccaaaagaccggcatcttcaaaagcttttacattataaaataatattttcgtatttgtatttaatgcaagtccatatgtatcctgcccaatttgcgcagtactcatggcactttccagaagaccgtctgcaacttcctgataatcatccatctcctggtttagcggtactaaaattcccattttttcaaactcaggtacccaggcactgtcaaggcgtgctacatcgggaagtgtttcagatttggcactaatcagaatcttttcatgaaggtctgaccattcatgggaaactgcatttaccttaatatcaggattttctttttcaaattcaggaatcaaaacattattcaatgtctcgttttcagcagactgctcactataatgatgccagaaattaatggtaacctcttctgcataacagggtgctgtgcccaatgctgtcacaaacattgctgttgataaaatagcgaataatttactgctttttctcatctttcattcctcctgttttcaatacgataccttcaaatgctttcaaagataattttatacttccccggcagggaatcatgtcttcattaaaatattttgtgtttaccagcttttctgcctcataactttcgccagtcaaaagattcttatacctggcaatttccagaacaggaagccgcacctcatattcctcttctgtcccattcataagaacgtaaatctgctgattttctgactgacataaatacccatatatcatttttttacatacaagtggtataatgtttcctgttcgtagacaggaatatgcttttcggatactaattatttttttataaaaagataatacttccgtgttttgtttttctttttcccattccatgcatcttctacaatcaggatcattatcaccatttaagccaatttcatcaccataatagatgcttggagctcctggaaaacacatctggaacaaagcggccagcttcaatcggcgaatatcacctttacagttccataaaaaccgttccgtatcatggctgtctaatggctggaaaagtgcttgtctgatttcttccggataatgggaacgcatctggcaaatcctgtgattaaacatttttgcgtcaatactgcccctggcaaaaaaatctcgcacactatcccgaaatacataattcatgatactatctacggattttccatctagcaatgaaaacccgtctccccatgtttctcccaaaaggagacaatccggatacgctgatttaattctgtatctaattctggcccacaaagagggatcaatttcatcagctacatccaggcgccatccatcaatatgatattcgttcagccaaaaggccatcacattgtaaatatatgattgcacttccggatttgctgtattcaatttgggcatgtatccataatctccaacacattcataatccgcatcagtttcagatacttctacaggaaatctcttgatataaaaccagttacaataccgtgataattcctgtttttcaattacatcctgaaacggagcaaaatgaatgccacagtgattgaatactccgtcaagaatgatttttaacccatatttatgacaggtctcaaccagttcccggaatgtttcctttgatccaaacgaaggatcgatctccagataatccgttgtagcatatttgtgattaaaatcccctttaaatataggagtcagatacaggcattctactccaagagaatccaggtattccaatttttccaagattcctgccaaatctccgcccatataattctctctattaggagcagttccccattcctggcatccgggaggattattagaaggatttccgtcagcaaagcgttccgggaaaatctgatagtaaatcacacctttcgcccattcaggaatttttaaaacattagtttcatttgcatagagaaattcataaaaaccatctctgggttcattttcactggtgtcccatgcattctgaaaataaagctttcctgtgttgtcaatcaacctgaaataatatttcaaatatcttaacgtatctgttgtaatcacttcagctgtaaaatggtctctcacttcatctctgatcacacgctgcataggataactgctgattttctccggtgcagttcttgggaaaaccagcaattcacaggttttgatatcaccagccgcggcatgtatcgtcaccactaatctctttctgctggcaagatacacatctggatagcctgcgtgatgttgtactgccggtatattcattttttctccaattctgcattggttttgatatactttcgttattatatattttgagtagaagctcttacaattaactctgtagaaatcaggttctctctttgtatataatcttgatcttttattttattgatcaaaacctctgctgccatttccccaagcttgtaggtatcgatatccactacggtaagtggcggatccatatattcagcaaagggataattatcaaaagttacgattccaatttccttgggtacctgttttccaattttcttcatagcctgcagtacgtgaaaagcaattatattgttagaacataaaaacgcgtctacattttcctgttctgttgcttttataatttttctttccagttcttccttattcttctccttgaaaataatacaggtatcttttttatccaaagttttctcataaccctgaattcttcgtttggtaaacatggcatccagatcatctgctgcataagcaatctttttatagccacagttaatcaaatgctcaactgcttttacgcttccctggaaattgtccatatctacccagttcatagtttcatttttttccggtttttctcccattactatccatggaatattttcatttttcagggctgataaaatattctggttcaattctgaagcagtcagaattaacccatccactctgtgtccaaaaatcagttcacatgccggagaacttttttcttccacatcatttgtgatcaaaagactgtaaccgtttctctgtgctactttttccattgcataaacacttcgtgtgaaaaaggtattggcaaatgcattctcattgtcagcatctacaactaatccaatcgtaagagattttcctttcgcaaggtttcgtgcaaggctgttgggatgataattaagctctttcattgctttataaactttatttttcatctcatctgaaataggtgctgttccattaatcactcttgatacagttgattgagaaactcccactttttttgcgatatcatttaatgttgccctcatatgcatcctccctgatataagattattcttctgatctttatgtaatcatgattttggtgttttaacaccaaaatcatattattgaattaaccctgttgttttatcgttattataaccttatatccagcattgtgcaagcggttgcattccatggtaaaaaaatatattttgcaatacctcctttcatctttttgttatgcaagcgcttgcatagtttggtaattatatgcgccttcttatgaaagcgcttgcattaactatgctttattaataccacttcttatcagaaatgtcaattcaattttaaaagaaactgatattttgtgtattctacacaaattcatgctcttattattgtgataccaggattatgggagtgcatagcacgaaacagtccgtaggtatcatagcctcgggcttttgtccgaggcatcattttctaacatacttaagtatgattcagaaaaatacagagtagttatacaaaatatgtgtaactaccctgtatttggtgagttttctcctgtgtttcaagggaaagcaataattctgttatctgttatatcttcttctgttttactttctcctgaattaccctcttctgcactactttcttctgtactgcattctcctgttttgctttcgtcttttatgctttcgtctgctttgctttcgtctgttacactctcttcggttctgttttctcccggtgtactttcctgctctgacatctgagtcttttctgctatggtatccttatcttccgcagcaaccgtagtatcctcagttgcaaatgctgttgcaggcatcacagacaacaacaggcagcctgtgagcaaaacagacaagcaccggacctttcccttctttcttttttcatttttcataaccagccaccattcttcctttcattcatagctatacttttttgtctactctaattatggcattagctctgctggttggaaaagtgttttttagaggttgttatgtaaaaagaaaaaatatttcacttatctcttaatctgtccataataggcatttttgccatgcttcctgtaataatgcttatcctgcagttcctggggtgccggttttacatgcggattgatcagctcacagcgacacgccatcttagcaacttcctcaagcacaacagcattatgcacggcttcatgagcatccttaccccaggtaaaaggtccgtgattcttgcagagcacagcaggtacagcttcataatcaagttgtttgaaatgctctgcgatcagaacacctgtatttttttcataagcttcatcgatttcttcttttgtcaggttacgtacacatggaacctctccataaatataatctgcatgtgttgtaccatagcatggaatggatctgccggcctgagcccaactggttgcccactcagaatgtgtgtgcacgattcctccaatattcgggaattcattatacaaaaccacatgggtcggagtatcagaagagggattatattcaccttctattttatttccctcaaggtctactactaccatgtcttctggccttagcttgtcatactctacaccgctaggcttgattacaaagagtcccttttcacgatcaataccactaacatttccccaggtaaaagtgaccaatccatatctgggaagatccatatttgctttgtaaacttcttcttttaatttttcaagcatactcgttctctcctttacacaaaacgtaagccaccgtttccggcaaatacatggttatcttgaaaatcctaccctccaaaaaatatcagcatcttttcaccccgtttcatatcttcatgtaaagtatttgttatatactataccagtttctcttttttcagacaaggctttgtaatactggatatgatttcaattcataaaaaacaaaaagttaaatactgaacgttcttattcaacgcccaccaatggatttctgttacaagaagcaatacaatacttagaatcaagatgggcaccctgaatttcactattttcttccccaattttaccatcataaaattttcacttccttttatatttgtctatatttttcttgattatatcttaggctttctcttaacaaaaacaaacaatccccctgttttgtcaaaaaaccagacaaatatatatggttttcttaataaaaatatttctgatcaacctgccttttatgtctaacataaaaagagccgctgtgtttttacagcggccttccaattctcttatattatattacttttatctggcaagccttcatagcctccagcgcctgctcatggctcttgggcgtcacacctgcgcagcagagggaatccacaataattggcacctccggcaaaaatgctttcagcagcatagcattggagatcacgcagatatctgtgcaaagaccaaccagggtaatactgtggatggtctgggatttatgaaattcctttagaacctttcctaaggtttcgcttccaaaagttggcttatcaataggaccggattccagaagctctgcgatctcatccctgatctcccagccgtatgtcccacggatgcagtgctccacaggaagcattcttccctcctgggtctgaagataatcaccgctgtgagtatctctggtagccagcaccagaccgttgaaattctttatcttgtccaccacattaggcacgattgcttccgcttctggtgtgcctagggctccgtcaataaaatcattctgcatatcgatcacaactaaaatgtccatattcatcctccgtgtttcacatgccatcccagataccatatgcttcctggaactgctgtctgccaatcctatctgcagctatctgtctgggccattttgcggatgcctggattgccatcaagatgctgtgtattcaatgtttttcttttcagtctttcctgctcagactgtttaaggatgtaatctttgatttcttttgcgtgcctgatatgcagcagtttaagatccggatctgttacatctccggtgaagcaatgaatggtgccaagtccaagcatccgttcaaacagacgggtctcaagacgaacatcgatcaccttatataaataacagtcattctcttctttttttaataaacccgaatctatagttatgatctcatctgttacagtataagaagtaaaagtccagggtaaacccaaaaacaaggaacgctttttttctttgtaagtcatagtcatatctcccttccattgccattgaatcaatctcgtaaatattaaaatgccaagtacatcactgcacccaaagacgaatcgtaacggtccattacccttacaattaccttctgaatagttacagcaaatcaatggatcagtaaaaatgtaccttatttttgatgaactgtcaatgcttgctgtataagctccaatgttttttgtgagtattgccatattctcacctgaattttcgtaaaggattctttgcgatttaggcttgacttttctctgaaaacctgtaatatagatattgcaacatttgcactatatttagttgccgatcagacaattatacacaatatataggtatataaaagaaaggaaaggaaagcatgaaaacagagatcagaacaaatgttatcaagcgaaatggcgaagaagtgatcttcgacaaaagcaaaatcataaatgcgatcaagaaagccaatgaagaggttccgaagattcatcagctcagcgaatttcagatcatggcagttgccgagactgtggcttccagagccctggctgcctctcatgcagtcaatgtagaagatatccaggatatggtagagactggcattatggagatgcgtggttacgaagtagcacagaaatatgtacgctatcgttacaaaagagaacttacccgcaaatccaatactacagatgataatatcctctctctgctggatcagatcaatgaaaacgccaagcaggagaactccaataagaatcctactatcaactccacccaacgtgattatatggcaggtgaagtaagcaaggatcttactatgcgtgtgttgcttcccgaagatattgtacgtgcacatgaagaagggattatccatttccatgattcagattattatgcccagagggaacacaactgcgatctgatcaatcttcaggatatgcttcaaaacggtactgtgatcagccagaccatgatcgagaagccacacagttttttcacagcatgtaatgttaccacccagatcgttgcacaggtagccagcaaccagtatggcggtcagtcctttaccctggctcatctggctccatttgtagatattagtcgtcagaagcttcgcaagaaagttgtagcggaacgtatcgcctgtggagagtccatggatgaagagatcattgacaagatcacagagcgcagactgaaagacgagatccagagcggtatccagacgatccagtatcagctgatcacactgatgacctgtaatggacaggctccatttgttaccatcttcatgtatttggatgaagtgccggaaggccgcaccagagatgaccttgccatgatcattgaggaagttatggcacagcgtatgcagggtgttaagaatgagcgtggtgcctggatcactcctgcattccctaaactgatctatgtgttggatgaagataatattacagaagattccagatactggtatcttacagaattagctgccaaatgtactgccaaacgtatggttccggattatatttccgccaagatcatgcgggaactgaaaggaggcaatgtctacccatgcatgggctgccgctctttcctgacagtagaggactctcagcgtaatgcagatggttcttacaagttctatggccgttttaatcagggtgttgttaccatcaatctggtagatgtagcctgctcttccgaaggcaatatggaccgtttctggcagatcctggatgaacgtctggagctttgccaccgtgcactccgctgcagacatgaacgccttcttggtactgtttcggatgtagcacctatcctgtggcagtatggtgcacttgccagacttcaaaagggtgaaaccattgacaagcttttatatggcggctactctactatttcacttggatatgcaggtatccacgaaatgtgtgtacgaatgacaggcaaatcccatacggatccggaagcccgcccctttgcccttcaggttatgcagcgtttgaatgacaaatgtgcccagtggaaagcagctgagaatatcagttattccgtatatggtactcctatggaatctaccacttatcgttttgctaaatgcctgcagaaacgctttggtatcatcccaggcgtaacagaccgtaattatattaccaacagttatcatgtgcatgtaacagaggaaatagacgctttcaccaagctgaagttcgagtccgcattccagaagttatctcctggcggtgctatcagttatgtagaagttccaaatatgcagaataacatccctgctgttttatctgttatgaaattcatttatgacaacattatgtacgcagagttaaatacaaaaagcgattactgtgacatctgcggttatgatggggaaattctgatcaaagaggatgataatggcaagctgatctgggaatgtcctaaatgcggtaaccgtgaccagaataaaatgagtgttgcccgcaggacttgcggatacattggcacccagttctggaatcagggtcgtacccaggagattaaggatcgtgtgcttcatctgtaaaactgattatctgttccaaaggagattatattatcatgcattatggtactattaagccatatgacattgccaatggcaccggcgttcgtgtaagcctgtttgtttctggctgccgtcatcattgtaaaggctgctttaattccgaaacctggaactttgattatggacagccctttacagaagcaacacacagatccatcatagagtttatgaagccttcgtatatagaaggcttctctcttcttggcggtgagcctttcgagcctgagaaccagcaggttcttgcaggtcttctgaaggatatccgcaagacctatccggacaaaaccatctggtgttacaccggttatctctacgatgtggatctgatcccgggaggtaaagtctataccccatttacagaagaaatgctttcctgtatagatgttcttgtagatggtgaatttgtagaagccttgaaagacatttcccttgctttccgaggcagcagcaaccagcggatcctgcatttaaaagaaatccgtaagtaagcaggcataagcatcacatatgaagtatcagattaaaaaagatcctgtaccaactccgcagtttatcatttctgcgaactgatataggatcttcttttatggtcaaatgattgttccctctgacctttaagccatccccagtcttcttgcttctttgatcaagtcaaacaggcgatggttacaggttccttctggcacttctgtaacgatcacacgctggcatttcttcattagagccagtgccttctcataggtttcctttgatatgtcagaaaaaggctgctctgtaactgtttgtgctgccagttctttggctaatcgataatcaatatcattggtataaaggatgcctgctgcaaatggtatcccctctttttgaagggaacggtaaaccggaatcccgcttcctgcccctgagatcacaaacacctttggctccccttttggtcttggaagttcaatacttccaaaaacaggatcataaaagccattgttaatctcatacaaatccctgatgatctcttctttaaaaatctcctctggaaccccgtaatgggaaatctgctctccctttacacagatgatcttatctgcaattttctgggcaagatcgatctcatgaagggacataaccactgtgatccctttttcctttgccatagaacgaagaatggataaaagatccagcttatggcggatatccagaaatgaggtaggctcatccaaaatgatcatatccggttcctgacagattgcccttgcaagcagcactctttgtctctgaccatcactgatagcattaaaatccctgccgcctagctccactgcatggacagctttcatcgcctgatccactttgtcttcatcttctcttgaaagcacgccaagtcttcctgtataaggataacgccctgtagcaacaatatcatgacaggtcatcagttccggacggatcctttcagtaagtaccactgccatttctgtagacaaggtcttataagataatccctgcagatccctggaggcaatatagactctcccgccgatcagttccagctgcctggtaatacttttcaaaatagtagatttaccagatccgttaggcccgatgagagtaacgatctcacctttttcaatgttaatattaatatcatggatcaggggctgtttgtgataacctactgccagatccttcatctgaaaataataattcatcaggcctgccttcctttcttgcggagcatcattacgattactaccggtgcaccgaaaatggacgttactgtactgatattcagttccaatggtgaaaaggccattctggcgatcaggtcacacatcatacagaacacagcgcctcctaggaacacgcctggaatcaccacaagcggcctggccgttttcaatgccagctttaccagatgaggcactgcgattcccacaaatgagatcggtccggcaaaagcagtaacacatccggaaaggatactggataaaaggatcagggcgatcttaaatactttaatatttacacccatgctctgggcataagcctccccaagctggaatgcaccaataggctttgccatgaaaaacaggatcaaaaaggtaatccctatgataatggcagaaacctgcacattgctccagctcatacctgaaaagctgccctgagaccatccatgaagatttacaatatccgaatcctctgcaaaggtgatcacaaaatctgtgatggcagaacagatatatccgatcatgatcccggctaccagaagggtggccatgctgtgcagccttctggaaaacagaaggataaatgccacagatataagcgaaccgataaaagccgccacaaccagtgtataggaagaaaccacatggaatctttgaaggaatacgatcatagtcaaagcaaccatcatcttcgctccggaagaaatcccaagcacaaacggacctgcaataggatttgaaaaaaaggtctgtaataaaaatccggaaagagaaagccctcctcccaggatggctgccatcaggatcctgggaaaacggattttccaaataatattgtatgctgtagcatcaccgcttttggtaaaaatgatcttgaaaatatccgggactgatatgtgtacacttcctgtgttaatattcagtacagtgatcaggcaaaatgcaaagatcaggcctataaaaaccactgcatatctggatcgtctccggaaattttccatatgaaagcttgtattttctgttgatctctccatcagctcacccttgtaaggaaggtcatatccttctcatctccgtctgtcagcatcagatgcacatccttgatcagttctcctacaatgtctgtagcctgatacagctgtttgcctgtacaccacacattgccgtcttttactgccttgaaatctgcaaacaaatcgctttttgcaagaagatcgtcaatgcttgtaatagggctgtcaatggatgcattataaataaggtagtctgcattcaccgcctgattatagaattcctccatggtaaggcggacagaagatcctgtgccttctgtatttttcagatcaggaaaaatatatcttccccctgcaatctcgatcatcttgggaatatagtcatcactggtacgaactactgcggatccatccgtattgatatagaaataagcaacggttttctctgtgttggtaaacccgcttaaatcctcgatcacctttgcctgatcatcaaagaatgccgctgcttccttctctttaccaagcagcacgctgtaaagcttcacccattccgttcttcccaacggatgtgtttcataactagagtgatcaatcataaccgggatccccagttctttgatcatctcagccacctttggagaatgaaggatcatggtagattcaatagcaagatcacaatcctcattgatcagaagctcataatccggttcatcatattttcctgcaaaaaggatctttccatcttccatagcctgagctgcatcatccacataccagccggaggcctgtgtgcctgaaaggcggatgctatccagcccgtcaatggcattaaacagagccatggctgaagttgcagccaggtagatcctggaaaccggcttctggatcacagtaatgcttttgtccatatctgccggagcttctttgccttccggaaccacaaggaactgaccgtcatctttaatatcaatcagtgcatatccgtcattataataaaacacatgaaaacactgtgcatatttcagctccatttctgactcataggtaagtccagggatctgaggtgcctcatccttaaactcctcatccgctgctgtgtctgaagcaatttcttctgccattacagggatgcctgctgtagtaaatgccatcacagcagtaagcaagacagcacatatcctctgtttcatttttttattaaacatggatctgtctctcctttcgttgttatttcacatcaaagattgtcttgtaaacttcttcccattctgccactgcctcatcattttcttcatctgaagatcggtcaacgatgaacgggatctcaagaagtgcaaatctctgggcagtgctccttagttcttctgtttttgcatccagatcctcttctgtcttaggaaggatatcggatggcaggatagcaagggtgcactggcttttcagcatcgtcttataatccaggtctgtataagttcctgtgctttccaaagttcctgcttccacagcagatgacagagtttcaggaagatcggtaaggtctgatcctatcatggaaatcttgtctgtcaatcccagcttatccatggcctccgctgcatttgcagagtccacataagttttctctacaggcttccggatcaggatcacatctttatcaagacctgccggaacatctgcatcttccggaacgatcagatatttgaccacatttcccatataaagctgttcgatcttatcccctgtagactctgcaggagcagaagaaccgctttcctcttcaggagctgctgccatggattgttcctcatcagaagtcacagctgctgtttcttcgtcctcagatactgctgctgtttcttcattgcctgctgctgtttcttctgtatttgcttcgccttctgcctgaacagattcttttgtacgggcagtatcagtggtcatatccacctcaagaagtgtaatgtcattttcataatgatacactttcaggtgttttgcatgttccaaagtagtttcatccttgtactcaagaccggtgatctccggtgctttgtcgtccagttttttattaccagtggaaaccatactgtcagaagaagatggattttctttgtctttgtcgcttttgttgtctgcaccattcaaatatacaaatatactgtattggatctcatgaggcacagacattctggtggtcataccaatgatagaattatttttatttaaggctacaggaatcacaaatgtggaacctccgccgctgtgatccggatagtacatatttccgttagctttcacatagccgtatgcatcactgctgaaagtaatggtcgcatatgcctgaccacctgtaatggataccttgctgcagctgatctgcaccttaccggttccaccggaccaggaaaacttatccggtacataagaaccatccttcagacctgtagagctgtccaccttagatgtaccgccgctaagatcggattcgtatttagattccttgtccacatcctttcccggtgtttgtaccttattgtttttcttgtttttatcttttttgtcttttttatttttatcctttttattgtttttctttttgtcatccttctttttgttcggatcactgctattatccttattttcctgatctggattagatggatcctcctgaacattcagatctgcgatcttttccaaagtaccggaattaaaagtaaggatacggtcataccacagattatgactcttggaatgtccggctactgcaatgcctgtatccagggcagaaacaggtaccggatatgtgtatttgcctgctgcatttggagtaaaaggaatccaggtggagcgatcagcctgatctgcttcttcttttgtgcccataaacagataatcatagcctacgccgctaagtgtaaggattgctgtcatcacaccatctttggaggtaagctgacagtctaccacacggaacataaatgcgctggaggtaacattgatcttatatactccatttggaatagccggagctggtgtctgagttggggttggagaaggtatctgggtcggctctgggatagcggtcggttccggtatggcagtaggctggggactatctgtgggctgtggtatactggtgggagccggcactacatccgggactgtgatggtacagtctttggctgtataccatttgatctctccgccgttgttgctgtttcccggcacaacagaaagagcctgatttttcatttctgcaggaacatcaaaggtaaaacgataggttccatctgtatcagcagttcctgttattacctttgatttatctgcatcttctttttttcctacatacagtctgtcaaacacactgtcattgcctttcaccaccagggtaatcttgccttcagctgctgtatattctgtaatgcttgggctgaactctttatccttgaaaatatcttcctcttccggatctttttcttccgggtctttttcttccggatcttttttctctgtatcttccttttcaggatctttcttttcagagtctttagattctgtatctttcttttcaggatctttcttttctaattccttttcctgggaatctttcttttgcggatcttctccttcagagtctttagactcattaacagcttcctttttatcggtttctgcattatttagtgcttctttttctggcacaactgtaggtgaaacagatatctccggcatttctgatggctggggagctagggaaatggcagggatctgatcactgttctcctgattctcaccaaaagctgccacagctggagtgacggacatggcagcggttaaaaaaagtgcaagaaatcttgttgaattacgtttcatatgaatctcctctgttaaacaggaatctgccctgcaaaatattgtgccacacaatgcttcacaggacagttttctttatctgtatctactattgtttatttgtaactgtaaaaatacggaacagttacatttattttacttttactgtgcaggttgctttctgcttgcctacagtaactgtgatcttagcagttccttttttcagggcttttacttttcccttggaatctacggttgccactttcttgttgcttgacttaaatgctgctttctgtccagttgttttgggagtggtggttacttttaatttggcagacttgccagcctttaaggtaagagtgctctgtacctttacactggtgcatggatccacaacagaaaccttcacggttgccttcttgccgtttgctgttactgtaatcgtagctttgccggctttctttgcaacgatcttacctgtctggtctactgctgctacattcttattggaagatttccatttcagggttgtggttgcacctgttggattcactttataagaaacataagtctgagttcccttattcatggtaagggctgccttttttatcttaagggattttacttttactgcttttttggttactgttacagcaatggtcttttccttagatcctgcttttacagtgatcttggtcttacctgctgcttttgcagtgatcttaccagcatcgtttactgtagcaacggaaggattctgggaagtgtataccaccttgtctgtggtatttgcaggtgctgcaatggcactgactgtcctggaggctcctgcctttaaggtaagtttggaaacagaaacctttaatgaggttgctgcaactgctgcaggtgtgggggctggtgtctcagtaggtgccggtgtagctgtaggtaccggtgtagctgtaggtgccggtgtctcattcaatgttacatgaagagtataggcgatctcatgtgccatgctcatacctgtagtcagtgcaaggatcttcacatcttcattcaggtcaaccgggatcctgtatgtaacgccggaagtattcactgtaccgttaaataactgattatttgcctttacataaacatatttcttgctgctgaatgtaacatctgcaaatgccttgccattttcaacaataacctgtggacaggtaatggtcactttacctgtaccgccggcagctgtgaaattctccggtgtataagtaccatccggaagtgctgtgctgttatctacaggatctgtagcagctgcaagaagcttggatgagttgaaggtgatcgttttatcctgccaaccactcttattggaatgtgcagccacattgataaccttatccagtttggcaactgcaaacggtccgaatacatactgttctttaccattactatcctttactacagatgaataagtcatctgattagcagtatctgcctctgccgcctctgctgttccaaaataaagcttatccctgccagtgccggaaagagtaatggtagctgtcattactccatctttgtcactatataaagtagctgctactacccggaacattgtgccagtacaggtaactcccggtgcagctgcatcagaaaaatcaaaggtataatatccctgtgctgcaacagttcccggattctctgcatcttcagctaccggtgcggcttcctccggataagcggtaaatgcaccatctaatacatcagaggtcacttcctcctggtctgtaaactcagcaaaatctgcctcctcagactcatcaaaaacctcatcctctgttacatcctgtacatccactactgctgcaagatcttccccaaatgcaggaagcacactccctgttgtcattgcagcgcaaagaagcattgcaagaatgatttttcgttttttcatgatctttatcctcctgttatttccaatcaatttgaatgaagacgtgtactgttgtacaaaaaagaagcctgcttccggcttggaaacaggcatcacaattgctcatattattatatgcatagcccaaaaacatatgtgcaataaaacaatacaagaaatagcaatgaatcgctttcgtcggaagcttccatcttcagcattcacagcaggtttcctggctcacagatcaacagatatctgctccttctcaagaagagacggcttccatgagtcctatcggatccaggcttcttctcaatggtccctgcagtatcctccctgctcacagtgaccggatcgttcaggacttccacctgattccctttaacagccggaatcgttgcctcctggctgacactgtaaacggtctttattcatttcctgtattatagcaaaagcattttttgaaatcaatacgatttcctttaaaattgtgaaaaatcaaacaaaatcacacattcttatgatgcctgtttacagctctgtagccgccacgcaagatcagctgatgtaatggctgctgcagatttcctccgtttccagcagatttccatcctggtcatatacatgacgataagttttgtagctttgtgcatccagctgctgggtagtcacctttactgtattggaatttgtttttgtaccatagatcttcacattaacggaaccatctgcataagtggcagagatccggataggatactcagtattattgcaaaactgaaagtcaggatctccccaggatacagcagcatccagcccagccggcacataatctaccctgccggaatgattggtacgctttacaatttccagatctgcatataggcatgcattaaacaaggtggtggaaacctgacagattcctccgccgattccttctgcatgctgtccgtttacaaacacaccggcagccttataccctctttcggctgtacgctctcctaaggtttcattgtaagaaaaggtctcaccaggcatcagttcaattccatcaattgcctttgcagcaagagtcagattggtgatccggttgtcagtaccgcctccataagtattatagcttcccagcacatcccggaatacccggctggtcagatccccggtcgtcacctccggcaggatctgttcaaaagccactgtaaacacactgccttctttggcctgtcgatattctttgaccgcctttgcaacatcaaaggatatccctgtcttggaaggaacgatctcataatcattcttttcatccatatatgcatcttccggctcctgatagatctgcctataataagccttgaaatccggctcctctggtgtaacactgatggttgcacactggatctgtgtatcaagatccaggctggcagctgcatgcaggagctgctcctttaaagcatctgtatctgccttaataccagtttttcccttctttatgatcagactgtcgtctgttatccggcatacaggctgtaccactgtatctaccttttcgatttccatataagaaatcacagaaaacactgtctccggatgggtcacctggggaagaagcgtgatctcttctgcattatcatctgtcatcagacgtatccagtccagacctcttttataccaggcaccatggccaagctgataggcctgctccaccacttccccgggatctatgccaagcataggaaatatgtaagcttgataaacttcgtcggacaggttcacctggatagccttatcctcataagtctctttaaaatctgccaggatcgcttctctggcctgggcttttgtctttccctggatggaaatcccattgacctgaacatttttccagatcacggaatcatttagaagtacacaccagaccagatacaatacggctgccagaaacactgcagccgctgtaatactgaaagctttttttgcttttcttttcatatgtaaatcaccgtctggcaagttccctggtaatgtcctcccaggtaacgcccttctccaccattaataccattgcatgatacaaaaaatcggaaatctcgtatttaatctcctctttatccggattctttgcagcaataacgatctccgtacactcctcacctacttttttcaggatcttgtcgattcccttgtcaaaaagataattagtataagagccttcctttggatgcttcttcctgtccatgatcacatcatacacatcctgaaatacatgaagtggattggtgtcatcatactcttttttcataagaggctggaagaaacagcttctgctgcctgtatggcatgctgcacctacctgatccacctttgcaaggatagtatcattgtcacagtcaagggtgagagactttacatactggaaatgtccggaggtaaggcctttcgtccaaagctcatttctgcttctgctccagtaagtcatccttcctgttttcaaagtagtttggaatgcctgctcattcatataagctaccatcagcacttcatctgtcttataatcctgaacaaccacaggaatcatcccgtcactgttcagcttaaattcactccaggcaatattgctttcgtaggtatttacaggaatccccatacctttgcatctgtccttaaaatccaacagttccttttctatattgcttacaaaggcgccacaaacaccgcttacagcgtctgacccaagaagcttagtaagcttctcttcatcctgttcatcagtatgaaggatcacagggatggaggaaatctcagccacctgatcctgcaccatatccagggcaagcactgcagatgcataattctcgatcagttctttatttgcagcaaattcttcaatggaagaaatacatacaaccatcttttctttcccaaaacgtttggatacctcttccagaagctttacattgctctccttggaaaagttcagcacagcacaggcacagcctgcgtagatcagctttttcacatcttccatacgcttaatattgccggcagccattaccggaacttcagaagctgcacaaatgtcgcggatcttgccgatggctttgtcatgctcttcgtcctgagaggagaagtcaaatacaagcagttcatcaccgccgttatcgctgtaaaaccttgccagcttttccacatctccgtcacctaacagatttctctgtccgaaaccggttactgccttttcagactgaaggtaaaggcagggaatcaattttttcttcatgatttatttttattctcctttttataggcttccttttgtagataaaacatctgtaatacggggatcaaaggatacagccatatccagggcttttgcaaagcttttaaacatagcttctgccatatgatggctgttgccaggggtaagtaccttaatatgaaggttcatctgtgcactgtaagaaactgcatagaaaaactcacgcaccatctctgtagacatgtcccctatcttctctgtggggaactgtgcatcccaggaaaaataaggcctgccgcacagatctactgcacaaagcaccaatgtttcatccatgggaaggataaagctgccatacctgcggatcccttttttgtctcccactgcttcccggatcactgagccaaggacgatcccggtatcttcgatggtatgatggtcatccacctgaagatccccctgcacacgcagctgaagatcaaaaaggccatgtcttgtaaatccctccagcatgtgatcaaaaaatccgatacctgtagaaatatctgaaactccggttccgtccagattcagcttcatctggatctgtgtctctttggtatttctctgtgccaaaacctctcgtatcataatgaatccccttcatcttctttttcaaaacgtactgctatagaattggcatgtgctgtcaactgctcagcagttgcaaactgtacaatatccttatggatctcctttaatgcctctctggaataatatactatactggatttcttaatgaaatcgtccacagaaagcgcagagaaaaacttggctgttccgttggttgggagcacatggtttggtcctgcaaaataatctcccaaaggctcggagctgtattctccgataaagatggctcctgcattacggatcttcatcatgacctcaaaggcattggctgttacgatctccagatgctcagaagcaatctcattagcagcttcgatagcctcatccatatcctctgcgatcaggatatagccaaagttctccagggatttctggataatctctcttcttgataacaccttcaggtatccttcgatttctgattgaaccttctttgccagctctgtactggtggtgatcagaatggcagaagccatctcatcatgctctgcctgggacaaaaggtctgccgctacataatggggattagctgtatcatctgcaagaaccaggatctcacttgggccggctacggaatcaatgcttacatgtccatatacagcctttttggcaagtgcaacaaaaatattgccaggacctacgatcttatctaccttagggatgctttctgtaccaaaagccatcgctgcaacagcctgggcgccgcccaccttatagatcacatctgcgccggcttcccttgcagcaaccagtgtggtaggataaaccttcccctctcttcccggaggggtacacatcacaatattaggaactcctgcaaccttagcaggaacaatattcatcagtacagaagacggataaactgccttgcccccaggtacataaacgcccaccctgtaaagtggagttaccttctgacccagcatagtaccgttttctgagctggtaaaccagctgttctgcctttgcttctcatgataggtacggatatttaccagtgccttacggatcactgcaagaagggacgggtctacctgctcatatgcttctttgatctcttcttccgttacctttatattctctgctgtaatattggctttatcgaattccttcgtatagccaaaaagagcctgatctttctcctgcttaactttatccaggatctgggcaactgccatctcatactttccgtaactggaaggacttctctttaacagattctcaaggatatctttggtggattcttttgttaatgttactgtacgcattggtttatcatttcctttcctatcagatcactttacgcaggtcatcgatcagcttccggatacgttcatcttccattttcatgcttacctgattaactaccatcctggcagacaaagggcatacctcttctaaaacctttaacccattctcacgaagagtgcttccggtctctacaatatctacgatcacctcagatagtcctacaataggagccagctcaatggatccgttcagcttgatgatctccactgtctggtgcttcttgttgtagaaataatccttagcgatcacaggatacttggtagcaacccggatcagctggttggaatccagaagcttccgtgcgctttcgggcccgcatacgcacatcctgcaggcaccaaatttcagatccatcacctcataaagcttcctgccttcttccataatggtatctttaccaacgatcccgatatcagcagcaccgtattctacataagtaggcacatccggtccttttgcaaggaaaaatttaagcttcagatcttcattgacaaatatcagcttcctggaatccttatcccgcatttcctcgcaggtaatgccgatcttttcaaacatatccattgtctttgatgcaaggcgcccttttgtcagggcaaatgtcagatatctcactgttctagtcctccttctcaggtctgagtgctatgtttttgccctggctgcgaagctgttgtgcctgccggatggcttctttgcgtccttccggtttgtaggtgatcacttccacagtatcctccacagggatctgcagcttctgtctggaaagagcagttaaaagactgtctacaacaatggcaaatccaatagatggtgcagccttcccgaaatgcctaagaaggtcattgtaccggcctccctttacaagcggctcgcctgtaccataagtatatgcctggaaaataatgcctgtataataatgatatttacttaccatagcaaagtcaaaagaaatatatttctcataaccgtaaatcttcaggatctggtaaatctcttccagtcttgccacagcctgaagggcttttggctcctgagtgagggcttttgccttctcaagtacatcagaagacccaaacatacgcggcagctgtgccagtgcattgccaaccttctggtcaatcccaagacgttctaccagctcttctacaccaaaataattcttcatggaaacaaggctgcgaagctgctcctcatcttcagggctcatcctggcctgctcaagaagagagcggaaataatccacctgtcccacactcacctgaaaatctgtaaggccggaagccagaaggcactccacagtcattgccagaagctctgcatctgcttccgcagaatcgtcacccattcgctcaacacccatctgagtggactctttcagcctgccctgataactggaattattaataaaagtgttgcctgtatagcaaaggcttaccacttccttttcaggagaaaaataagtggcacaggctcttgctacagacggggtaaaatcaggacgcagcacaagagtattgccttctctgtcaaaaaatttataaagatctttagaagggatcgtacctacttccctgctgaatacttcaaaatattcaaaaccaggggtttcaatatcttcatagccatatctgcggaacacgcagtgtagtttcttctgcaggctccgtttctggctgcattcgtcattatatatgtcccggactccttccggcgtgtgaaatatacgctgcatcttatatttacctccatttatgctttcacatgatgtatgccccaaaagatctgctatgtggagcatgatatgattttggtgcataataccaaactcatgattacacggattgttccgtgatatgcactcctacagtctttacgctttagtatgctaccatgttagcatactactatacgaaacaagcaagattataaaggattttctgcaggttgtcaatcccgtaattgcagatccttctggatcccttccagataaggaacaagaataccgctttttacaggcagataatattcctggcgaagctcatcctcacggaagcttttacgccctccctcttccatccgctgccagaaaaccagtaattcccgaaaaggcaaataatagaaaagatccctggagctgaagaaaataagaaagaatgcaatgcccccctgcttttcaaaatccttcatgaacgccacctgatgaggatggatattggccagaggaaaggtatgggcacagcattcttttgcatcgaagcagacagggatcccctgtactgctcctatataatctacggtacttctctggtcaaaataggccaatgtaatatggcggctgtccttgtccatcttcacaggtgtgatgggggtggggatcttctggatcaatgccagtcctttttccctgtattgctcattagtcctgtttacaagttcctccagggtggatccccgaaggcctctgctgttccaggttgccatcttttgtcctccctatagtctacgagtacagtaaaattaaggcaaatcaatatggtggtcacttataatcactgtactagcttaatggatggataataacgaattacagccttgcctacgatctgatcgaaacgtacataagtattcttccagtatctggaatccttagaattattccggttgtcacccagcataaaataacaatcctccggaacctgatatggcccgaaactgcccttcatggtctcaggaataaaggaatcatccagcggtgtttctgaaccgtcaatatataccttgccatctttgatctccacagtctcacctggaaggccgatcactcgcttgatgaacagctggctttcatcatccggatatttgaagatcacaatatcgaaccgctccgggtcttttaccttcttagaaatctcatggccaaacagatccaggttcacaccatatgccagacggaaaccaaagatccggtcgccggtcatgatcgtcttttccatagatgcggaagggatctttgcattgatcagtaccacattgttgatcaaaagaactacaacaaccacaataatgatcatttttatgtagtcccatatttcatgccacactttcataatatttcattcctcctggttatgtctattttctctccctgaagcacttgcccaaaaagtccgggaacgggtgctgttacagtcctgccttccaaagccttcagacggccgcagtcctttggaaatactatccgcctgctgtgaagcagttggtatttcaactgatatctgtcccggaaatattggttagccttcttatccccatatttctgatcacctgccacaggatgtccctcactggcaagatgggcacggatctgatgggtccgtcctgtgatcagttctacttccagaagcgtatacttcccattgtcacatacaggtctgtacctggtctttattggctgggaatcctctgttctgtcagcagatattattactttattacatttttcgtctttatgcaaatatcctttaatatatttttcattttttattacaccaactaccagacaaaggtaaaacttttccatattcctgttatggaacattgctgataagtcctgcagtcctgtaaggcttttacctgccgccaccaatccgctggtattccggtccagccgattacacacccctggcctgaaagtaaccagatcagcagcattcaatgcccctgtatccaaaaggtagcctgtaagatactccacaagggaaggcgtaccatcccctgctggctgcgaaagcatgcctgccggtttattgataaacaatacatcctgatcctcgtatatgatctgaagcttggctcttgcatgagatgcctgttttgcggatgaaaatttctcaaaagtttcatcacttaaaaacagctttaccatatctccggtacaaagcatttcattgccctgggctttttttccattaagggtaatgttcttttttcgcatcattttataaaaaaagctttttggtgcttcttccagcagcttggccaaatatttgtcaaatctttgccctgcttcattttccctgatcttaaattccttcatggcagctcctacagacaaagtgcaagcaatgtatgctttaccaactgatctctgttcagatccggatacttgctgtccggacggaatttgatcccttccctcaaggaatcctgatgaaggttcatggaatcaagtctttccagaaaaggccggatatccttcaaaatctttacatctactttatatccattaccccttacaatattctgggcatgctcttccatataagcagtatctacagccggatcactggtgtagcctaccactgtgttgccgcatacagcaaaagcatccagatatccgcttttttcgtaaaaagtcatatacatttcgtaggccatttccagatctccctggtgttttcgaatctttttataaagaacagaatccataggcttacgcatccagatcatgatcagtcctaccatagatttacagccaggcaggcatcctactgctgcgatcactgtccagatggtatttcttgttccatgatatgcccacatggttgcaaaaataaaaagaggcacgccaagaagaatggctgtaaggatcagtctccgttttttctcgcttttaaaatagccaaattcacctttttcgattttttttcgtttttttgtttttttcatgaaactgctccttttttctgttgctgttttcaggccttatcaggcatttggggccaaaccctaccagatccatacggcctgccatttttagtccctccagcaccaactccctgttggccggatttttgtactgcatcagtgcacgctgaatggctttttcatgggaatttttcggtacatataccttttcctttgtaatgggatggatccctgtataatacatacaggtggaaagggtagatggtgtaggataaaaatcctgcacctgctctggagtatatcccagatcccttacatactctgccagcttcaccgcctctttcatggtacacccaggatgggaggacatgaagtaaggtatggcatactgatccttttgtgcctgtttatctgctttatcaaattcttccaggaagcgcaggtacacctgatgagaaggcttacccatgtagtgaagcacttgatccgacacatgctccggtgccacacgcagctgtccgcttacatgatattttaccagctcccttaaaaaggttttatccggatctgccagcacataatcaaaacgcaccccagacctgacaaacactttttttactccgggaatgtcccgaagcttccggagaagaagcacataatccttatgatctgcctgcagattcttgcagggtgtagggaaaagacactgcctgttctggcacaccccttttgtcagctgctttttgcaggacggatgacgaaaatctgcagtaggcccgccaacatcatgaatataacctttaaaatccggtgcttttgtcatctttacggcttcccggataatggaatcgtggcttcttgtctgaaggatcctgccctggtgaaaagtaagggcacagaaattacagcctccaaaacatcctctgttgctggtaaggctgaatttgatttcctccagtgcaggaataccgccttttttcttatacataggatggtattcccctgtaaagggaagatcatacacatcatccatttcctgggtagataaaggcattgccggcgggttttgaatcacatagccacggttcccgtagctttctgccattgcctttgcagtaaaaggatctgtattcctatactgggtggcaaagctttccgcatacactgccttattttctttaacctcttcaaaagatggaagaataataggctcataggctcgtaaaagatcctttgtccggtagacagtgcctgcaatataggtgatctcttcaatgggaatcccgctatccagtgcttctgcgatctccaggatggaatgctctcccataccataagagatcaaatctgccccagagtcaataagaatactgtgcttaactttattctcccagtaatcataatgagccatccggcgaaggctggcctcgatcccgcccaggatcacaggactgtctttatagctttgacggatcaggttgctatataccaccactgcccggtcaggtcgaagacccatctgtcctcccggagaataagcatccttttgtctgtgctttttggaaactgtataatgattgaccatagaatccatgtttccggctgtaacaagaaatccaagccggggacgtccaaatacctggatactttctttcttgcgccagtcgggctgagggatcatccccaccctatatcctctgctttccaaaagccgtccgataatggccgcaccaaaagaaggatggtccacgtaggcatcgccacttacatagacgaaatctacctgttcccaccctctttttttcatttcttctcttgttaccggtaaaaaatcctgcatctggtgctccttatatgctttatgtgtgatttaattctgaaaatatacggcctgggcacgatacccttccgcaataatatccagctgtctgtgaaaacgttccagctgacgcagatcctttgtcttaaacacacgaagaaattctgactgtattttgaggacttcacgctgattggataacctgtaaagattctcaatattattcaggatatcttttaccagattagactgtacctgggaagaattctgtgcatccatgatctcgcttcgcaccagtgacatctccctgtcaagggaaataattgcttctgctgcattgctaagccgctccgtaacatggggcggcatatcccctttgtacttatactgcagggaatgctctatggttgcccagaaattcatggccatagtacgaatctgtatctctgcctgcagccttttgggaccgtctaacgtctccacagtataataaatgatcagatgatagctacggtatccgctttgcttaatatgcttcagataattcttttcacttttcaccgtcatatctgtccggctttggatcagggccgccaccgtctcaatgtcctcttcaaactgacagatgatacgaacccctgcgatgtcttctacttcctcttccatccgctccatagggatttgcttccgctgcatcttttccaggatgctggtcacactttttaccctgccgcttacctgttcaataggggaatatctgtcattttccctatgttcttctataatatgctggaattttacagtcagttctttgacagccagttcataaggacataaaatgcttctccataactgtatttccattcaaaccgctccttaatttaagaatacctcggcaatccctgccggaggctatatcagatgatactgccatacccttgcttccttatcttacagatcaaatctgcctgtactttcctgaagcattttcagaatatgatacggatcaacactcatctcctgtgctttaggcgtctttatatagattcccatatgaagatgtaccggaaatctgccttttgtacctttggatccatagccggtgttccccatataacctaaaatatctccggcatgaaccagttctccttctctgaagctgtggtcatattctgacaaatgagcataataaaaataaccaccgtgaggagaacggatccccatacgatatccgccaagaggcagccaccctgtcctttctaccacaccatccgtagcagaaacaacaggatagtatcccggctctgtaacagggccgaacaaatccgttccatcatgggtatgcgatccaccatactccctggatgcaccgtaggtatcttcaaaacagatatcctctcctgctacaggaaagcatttaagatctgcccatatggcctgataacttcggcacagctgcaggtatgccttctttttgtatttcagaaaaggctgataatctgcatagatcctgtccggtgcaaaggaaccactaatcatagtggcggtaaatacctcccacatatcttcggaatttgtttccatgatctgccgataaagtcctgcaggcatcttctgcctgcgaaaagcttcttgatagatgctgttttcattgaccccggacacacggcttcgttcttccagcactagcatcagtgccatcatccacagcatcagaaataaaaggaggatccatgatctgcatggtctttgcttcacccttgcacctccgaaaaaccatctttatcagagtatgcccacaggcaaagctttatgcatttttcagaatctcaggttttcagaatctctgatttaaaactctctgatttgagattctttgatttaagattctttgatttaagattctctgattttcaatccttcagatcttccagtgctttcagaagatacttccatacacgttcaacggaagctatatcaagaagctcctcacaagtatggatatccttcatattcggtccaatggatacacagtccagcccctccatcttttcatagaagagtccgcactccagacctgcatgaatagctacaacctttggttcttctttatagagtgctttataggcagcaaccatcttatcccttaatggggaatcctccctgtactcccaagcaggataagccccctggatctcatattcacctccaaggaattcagtcagatactccagcttgtcagacaatgcatcctttgcagagcctacagaactgcgtacactgcttacagattcaaattcgtctttgtgaagggcaacgatcccagggttagaagaggtttctacaagtccgggaatggaaccgctcatcttgcggataccataaggcatgttcatcaggaaaaaaattaccttttcaccactgaccggatgaagcacttctttttccatgtggccaagaagttccgcagaaatggtaatcccttcatccgtgcctgcgtattctttacgaagatcagcctgaaatctctgcgcaagctgctggatcttcagaacatcttccgatgctgccagaacctgaaattctgattctcttgtaatggcattgtcctttgtgccaccatccagggaaataatggcaaaatctgcctgcttcttcatctcataaagcattcttcccatcagaatattggaattggctctgtttttatcaatctcagctccggaatgtcctccagtaagtcccaaaatgcggaccctgataccttctccttcacctgctacccgctttacaggaatcctactgtatcctcccatgccgccggcacagctgacccacaggctgccttctgcctctgaatcaagattgatcaatctacggcctttcagcacgctgcaatcgaaatccatagcccccagaagtccgatttcctcatccactgtgatcagtacctctaatggaggatggggaatgtcctggctttccagaagggcaagaccataggctacagcaatcccgtcatctccaccaagggtagtgccattagcagttacatatccatcttctgttacagaaagattcaaaccgtctttcaaaaaatcatgtgctacatctgcacgtttctcacacaccatatccatatgtccctgaaggatcactgtaggtgactgttcatagcctgctgtaccatttttgtatatcaccacattgcccaggtgatcctgtacgtattcaaggctgtgatcctttgcaaaatcaacaagataatcgctgatggcctgtgtattcccggatccgtgtggaataccgcaaatctcctcaaaataatgaaaaactctggatggactgcaattttctaatgctgccatagttttcttacctccttaatttatgaatgatcattccccggcccccatatactaaaagaaaaaggggtaagggcttgaaaaaaaagctgttttttgcaggaatctgcttcctgcttgttttcctgctggcaaatcctgaaactgcccttcttgctgcaagagatggactttccctgtggtttaataccctgttgcccactttgctgccttttctgatccttacaggattgctgatgaatataaagatctcatgtcaaatcccgaaacctggcattcgcttgtgcaagactctgttcggactgtccccctggggaatgtatgccttccttttcggaaagctactgggattccctgtaggcgccaagctggcctctgaccttacatattcaggaaagatctgcagacaggagggagaatatcttcttaccttctgcagcaatccaagtctggtctttttgctcacctttctggggcaaacctgtttgaaaggacgttaccctgcgaaagatctgcttattcctttgtttctggcagatctttgctgcatgctgtttttcagattctttgtatataaaggctgtactgcaaccgatcacatgtggcctgatcctgatgcaatagcagaaaaaaagacatcccaggcatgctccaccggagcccttctggatgtctgtattatgaatggatttgaaaccataaccaggctgggcggctatatcctgcttttctctgtgctgtccccttgcatcagccagtgtcctcttatccctgatattttcaaagaaatcctgctatgtatcatggaactgactacaggccttaacaggattgcatcctcaaacctgcctgaacgtaccatatacctggcggcaatgactttatcctcttttggaggactgtgcgtagccgcacagacaaaaagcgtactggatggaagactttctttcttcccttacgcctctgccaaatgtctcagtacaatcctcaccctctgcatcctcctgattgggacatgacacagtgggcaaagaaacgtatccatttaatttactgatcttctccaagatcatccagtgtctctgactcctgctcaggtgcctgataggaattggagatagctgctgcctgtgctgtctgaggagcaagctcctgacggttgtgattaaccacatccagacaactctgaagagcttcgagaaaacctttatatttgccgcctgcatcttccagggtctgattcagtacagaaccgatattagccatcatatcatctgtataagtaatggcacttaaacgaatgctgttagcgtcctgtgtagcagaatccaatatctcctgtgcctggcggttcgctgcattaatggtctcgttagcctgagcatatgccttctgcatgatctcatgctgggtaacaagctcctgtgcttttgcctgtgcatctgcaatcagtgcatctgccttggactgtgcatcctccagaatagcatctttattgctgatgatcttctggtaacgtttgatctcatctggagtcttcagtctgagttcacgaagaagttcttcgatctcctctttattgacaacgatcttggttgtagaaagaggctggtatttacaactatctacatactcttcaatctcttcaatgatctgttcaattctgctgctcatagtacactctccttatttttctctatttcttaactggtacatcttcgctcttactgcctctgtgatctgaggcggggcaaacttgctgatatccccgtcgaacatggccacttccttcataatcgtagaacttaaatatgcatactccagactggtagtcagaaatactgtatccacatccggtgcaagcacacgattagtctgtgccatctgaagctcatactcaaaatccgtaacagcccgaagcccgcgaacgatgacctgtgccttattttctctggcaaaattaacggaaagtccgttaaaaggcttaatgacaacatttgggatatgttccgtagccttttctagtatattaacacgttcttctacagaaaacaacggactttttgcagaattatgcaaaactcccacgatcactttgtcaaaggaaacactggctctctgaatcacatccagatgcccataagttgccgggtcaaagcttcccggataaactgcaactaccatgtatgatgttctctcactctcttcaggatttacagatgtgttcagttctcttttctggttatgaatacatgcttattggtcttgtattccttggaacgcagctgtgcaaatcccatggaatcaagataatcaaaatcagtatccagatcagcctccacaatgatcagcgtatgctcatctacaagactactgtctgcaagataagccagaacctgctgctccagatcctgtctgtaaggcggatccataaaaatgcagtcaaaactctctccgccttccagggatcgtaatgcctgcagcacatccatggaaagcagtttaccactatctgcaagttttgtaaatgaaagattttccctgatgcatgcacaagccttgggattcttttcaacaaagactgcaaatgctgcgccacggcttaatgcttcaataccaatggctccactaccgctgaacagatcaagaaaacggcaatccgggatctcaggctgcagcatattgaaaagagtctctttgatacggtctgtagtaggacgggtctccatcccaggtactgtttttaagtttaaacgtcttgcctttcctgcgatcactctcatttcagattcagtctccaatccagatcacctcttgcaagtccaaggatcagaagctctgctgtagcgatattggtagcaacaggaatattatactggtcgcagcgtctcacaatagctgtgatatccggttcctttggatcgatcataacaggattgtagaacagaatgaccatatccagatcctggcgctctaccatctccataaactgtttgtcaccgccaatgcttcctgccaggaatttgtgtacatgaaggctggtagcctcctcgatcctgcggcctgtagtgcctgtagcatatacttcatgctttgccaggatattcttgtaggcgatgcaaaaatcttcgatcaaaacttttttactattatgtgcgatgattcctaaattcatggttactccctttctcatgtccaaatcttccaagacatacaggtctgcaaactgcagtctccatacagattctcatcacgattctttattaaaattcttcttttttgttttattataacaaatgtataaaagaagtgcaattaaatcttgaaaaattaggcaaatttttagctgttatttttcctcttcacagcgacaaattaattttagcatattatataaaaaataacggaatggggtactggttatcaacgtcacaatatgaattatcttttagtttttcactgtcacataaaccactgtttttttctttcccgaacgaatgttgattcttgcttttcctgcttttctggctgcgatcactccggttttgcttactcttaccactgatgtggacgaggaggtatattttactgtttccctggaagtaatcggcaagatcacaggtgttagtttgtgtctaaaacctttctttataagtagattctttttcgatatgcggatgcttgctgtttgcactggattttcctgcaccttcacctgaatctttgcctgaagtccactattcaatgttacggttactgttgctttcccggtctttttccctgctttcagaatgccctttttattgactgtaacaacttttttattgctggatttccaagattttacagaatctccttttgcatatgtaacctttaccttgtttgtggactgccctacttttaacggaacattttttacatttacacggatcacaggcttaaagtttgccccagaagttccttcctgcccctgggtttcttcattcgtctggctcttatccggtgaaatagctgactgtgacttatcagatggctgtggaactgcggtaggctgcggggctgcagtaggctgtgggactgctgtaggctgtgggactgctgtaggctgtgggactgctgtaggctgtgggactgtggtgggcttcggcgcactggtaggctgtggtgtatctgtgatctcataaaaattaagatccggcttctgtgtggtatcacgccagtaggtctcccctacactgtcataattagtggcgattctttttccctgcacagcttttagacggacactattacccaccaaaatcccttctgtataagctgctcctgctgtaatactgctgtttcccggcatctggcttgcgccaccctccagatatgcttctttcgtattaatggtaccgtttcccgtaactccatggcctccctgatcactatggcctgttcctcctacagcgatcagcttgccttctcctgttacctgactgttttccaggatcagcgcatttccgcctaccgaagtggtagcgatctttccgccgccaaatactgccagaacactattcttctcaatgttcaggcttccggaggatacctgtatggcaggctgtccgctgtagcttttttttgtagcaggatctgttcctgttggagcatcatctccacgtacataaacctctcctcggatcactgcatttccattcacctgtatcaccggtgaaatattctgacgtatccagctgccgttggccagaaagtttgtgtttgaatagatgatggagttttccagaaccccgcctgtatcaaggatgatctgtccattaatagaagttcctgtaagaaatttccctgaataatcatcgtaattaacagaaagccttcctccatccatcacttctacctgtccatgaagagaagaatcccgaagattcagcatcccgccgttttctaccaggatcttcacactgcttaggattttcatatttaccatggtcaatgtacatccattgggaacgatcagcgtctgtacaggatccttttccactgaatatcccagttctccatatgtaccacttgtatgggagccgtaccatgccttgatctgtgttggtaccgttacagtttcatttgttcctccgaaatttggaatagcccatggctccatatcatacatatatttgccatctgctgtctgtactgcattttccagtttcagataatcttccagcttttcatttcttgcaaacaccttaaaatataattcattacttactgcagttctgcctgtttcatctgtaactgttacacttaccgggtaggtacccactttatccggcacaccgcttaaagaaagtgaactgtcccagatagaatacacaccggacattccacaggaatctgtatcgatattaaccttagttcttttggaattaacacttacaaccgtgctaagaggcttccagtcatcttcagcaggctcatttccatctggcaggatggcagcctgaacctccacattactgtttttgttggaggaaaccgaggtagatgcaccactgattgcatcatatttctgctgtcctgtcagtgctccttcaaagctgcctaccaatctgacaaataaggtattctctccatctgaagggccttccttgccattacctgcctgttcatcataaacaactaccccaaaagtatttccctgcccttttacctggagcacaagatcttgatactgtggattggaaatggtgatcagatcaccgcttttcagcatgccgcttccacttccatcaaaatatattttattttcggaaggtgccagataataagcttcagacgaaaaaaggccaagtttagaatccgtccttctccattccttgccgttaacaagtaacttgctgattccgtctacatatccggattctccagcatataatacctgactgtcattgtatccggatccgtctacaataccagtaaactggggcggtgtttttaactcagaagaagcttcccctgaactgaaaagatctgaatcattatcttcaaatactatttcttcaggactttccatctgctcttttacaaacgactcatcctgttcagaaaactttgttgcatcaacagattcggatgcttctgaatcatctgtaaaaatctcttcatcctgtacatcaacaaactgtgtgtctgtttcctgttctgatgccagaagcagatcctgattgaaagaactgacaagcaatgccacagctccaaggaatgctattttcttcttcatttgttcgtacctctttcatagtgttagtgatttcttatatacattttataaagctaactagatagtatcatatcgaacttcatttcgcaatacataactttcagctgacaagaaaacaagtcattcattactaaaaacaagtcattgacatcactccccttgtatttgccaaattcaaatgatatactcacttatatctgaacagattgatagttatttctatcaattactatcaaaaaatcttaaaacagatcattacaccagcacccttgaggaactatgcccacaagggtgcttttttgtgtttctttttattttaagtgtgttttattctcattttgaatttgttagcaatatttatgcgcattatagaagtgctgtttgttttcatttcttttcatttttttgttttcacattaaattttaagacttttgattgtatttttatgcatattatgttatgcttaaaacaacttatgacaatatgtgtggaggcaattatgagcagagttcagtatctttttcgttcccgtaatattataccggatactatcaaatacattgtacgagaagacaaaagaagtgttatatattttatggataatcagaagatttctaccagcattcctatgaaagagatcatgacaatgctcccggagaaagattttgtcagcattcaaaaaggcgtgatcgttgcagtcaagcagatcttagatatctctaattcaggagtatatactatgacagacggcaagatcatccagggccgaaagcgttatcttagtgaacacaagaatcggcgtgctgctcttgcactgcatgtagcagatgcagaaggtaacttttatccccctatgggacttttggaaaaatgcagtcttttagacgatcttcctctgccctactgtgtgattgaactggtatttgacaaggcaggtaaggggattgattttattttccgctactgcaataaggccatgtctactcttacaagtttttcatccgaggccatgattgaccactcattttatgagattttttccaatggcgataaaaaatggatgatcacttatgcagatgttgccttaaatggcgggcagcgtgtgatctcggatatcggaccggatcctgagaagtccatgaatgtttactgttatcagcctgcggatggatactgtgcctgtgttctggtgcaggaatgatttgttttcacgtaaatcatcacttataaagaaacgtgcgctgctaggcgcacctgcacaaaagccgatgaaaggagctcccttccaccggctttctttttattgattattatcgattaattattatttatttggcatatttggacttgatatattcgtcaattcctcttgcgcctgccttacctgcacccatagcaaggataacagttgcagcacctgttacagcatcgccgcctgcatatacgccctctttggaggtcttgccgaactcctcgtcagcgataatacattttctcttattaatatccagaccaatggtagtggaagagatcagcgggttcgggcttgttccaagagacatgatcactgtgtctacatcaattgtaaactcagaaccaggaatctctacaggacgtcttctgccggatgcatcaggctcacccaattccatacggatgcatttaataccggttacccagtctttgtcatctgtaaggatctcaacaggattgcaaagaagattgaagtttacgccttcctcttttgcatgatgtacttcctctgctctggcaggaagctctgcctcagaacgtctgtaaataatatgtacctcagccccaagacgcagtgctgttctggctgcatccattgcaacattaccgccgcctacaacagcaaccttcttgccgtgtgcgataggtgtatcataatcctcacggaatgctttcataaggttgttacgggtcaggaactcatttgcagagaatacgccgttggcctgctcgcccggaatacccatgaacataggaagaccagcaccggatccgataaatacagcctcaaagccttcatcctgtaacagttcatcgatggtaacagatttaccgatgattacatttgtctcgatcttaacgccaagagatttaacattctcaacctctgcagcaactactttgtccttaggaagacggaactcaggaataccataaacaagaacaccgcctgctttgtgaagagcctcgaaaatagttacatcatagccaagctttgcaagatctcctgcacaggtaagtccggatggaccagaaccgatcactgctaccttatgaccatttttctcttttgcagctgccggcttaataccattctcttttgcccagtcagcaacaaaacgctccagcttaccgatggaaacagcttcaccctttttgccacggatacactgaccctcgcactgtgtctcctgcggacatacacggccgcacactgcaggaagggcactggactcactgatgatctgatatgctttttcaaaattgccttctttaacttcatgtacaaatgcaggaatgttaatagatacagggcatccctcaacgcattttgcttttttacaattcaggcagcgctctgcctcttccattgcttcttctttattataacccaggcatacttcgtcaaagttggttgcacgaaccttaggctgctgctctctgactggtactttctttaatacgtctcccattatttgtcacctccgcaatggccgcatccgccgtgatgggtatctccctctttcagcttcagaagggcacggccttcttctgtcttatacatctgcattctcttcatggcaaggtcaaaatcaaccttgtggccgtcaaactcaggtccgtccacacatgcaaacttcacttcgccatcaacgatcagacgacaggctccgcacataccggttccgtctaccatgatcgggttcatgctgacaacagtaggaatattcagttctttcgtaagaagacatacaaatttcatcatgatcataggtccgatggcaacacatacatcatactgtttgccctgattctgcacaaggtcactgagtacatctgtacccatacctttgcgtacataggatccatcatctgttgttatgtaaaggttacataccttcttcatttcgtcttcaaggataagaagatcttttgtctttgctcctacgatagcatccgcagtgataccatgctcatggagccatttaacctgtggataaacaggtgctgtaccaacaccaccggcaacaaatacaatacgttttttcttaagttcttcaatgtcctcatggacaaactcagacggctggccaagtggtcctacaaaatcttcaaaagcgtctcctgctttcagctctgacatctttgtggtagatgctccaatgggctggaatacgatagtcacagttcccttctcagaatcatagtcgcagatggtaagcgggatcctctcgcctacttcgtccatcttaacgatcacaaactgccccggcaggcaatgctttgctacccgaggtgcttccacatccataaggaaaacattggaagacagtttttctgctctcagaatcttatacataattccctcctggtataaatatttacaggggctggtgcgggacacacccaccctgaataagtatgcctgtaagatcagatgcatatttattcatggatgtgcatttatgcaacagttccttttctactctatccgtataactatagcacaggaaaaggaattagtacaacagaaattcgcaaaaaattacagattttcttttctttttttcttttttgtatctatcatactgtacaatttttgtaatgcactgtttatgccgcccacttcatcaatcaacccttcctttactgcttcctcaccctccagcatggttcccacatcctttaccagctgtgtagtatccagcatcagttcctccagcctttcctttgaaatgccggaatgccgggaaataaacccggtgatccggtcctggatcttttccatgttacgataggtctgagctaccccgataaacataccgctggaacgtaccgggtggatcaccatagtagcactgggtaccacaaaggaataatctgcagatactgccattggcacccctatggaatggcctcctccaagcaccagagacacggtaggcttgctaagggatgcgatcatctctgctatggcaagccccgcctccacatccccacctactgtattcaaaaggatcagaaggccttcaatactctgatcatcctcaatcatggccagctttggaagtacatgctcatacttggttgttttgctgtgtgaaggagctgactcatgtccttccacctcaccaatgatggtaagaagctccacacggatatcttcctgattttcagaaagaagcacctgtcccatttccctgatctgctgatcctggctgttctgattatccagctcatcctttttctcctgactatccaccggcttttcgctttttggttttttctccataaaaaaatacctcctgaatcatgatccagaagatattttttgcaaaaagctaattatttattcatcccagttgtgccatacgtctgtaacgtcatcgtcatcatccagaagatccagggtcttctgaagatccttaacagccttctcatctgtcagttcgaccgttgtctgaggaatcatggcaacctgtgcctcaagaagaggtactcctgcagcttcaagtgcttctcttactgcactgaaatcatccggagctgtcaggacttcataactgtcttcttcttcgttgaaatcctctgcgccagcatccagagcagtcatcatcagctcatcagcgtccatttcacattcttctttgtcaatgatgatctgacccttctggtcaaacataaaggatacgcagccctgtgtaccaatacttccgtttcctttagagaatgcatttcttacattacttgctgtacggttcttgttgtctgtcagtgtttctacgataatcgcaactccattcggtccatatccttcgtatacagctttttcgtaattgtctgcggaatcagctcctgctgctttcttgatgccacggtcaatggtgtcgttaggcatgttgtttgcttttgcctttgcgatcacatcacgaagcttgctgttgttgttaggatccggtccgccggctttaacagccataacgatctcacggccaataatggtaaatacctttcccttttttgcatcatttttttcttttttgtgctttatatttgcgaattttgaatgtcctgacatgtttccttttctccttttatctcattttttatcttctcggcctttactctgccgatggtcttattgccaagggaaagtatcttaaaagtgtaccctcctacatggatcactttgtccaggtccttttctgtagggatatgacccagaacagaagtaagatacccgtttaatgtttcaaactcactggtcttaaattctattcccagcttctcttccacatcctccaaaggagcaagtccctggatgatcatactgttgtccttcaaaaggcggaatgtaacctggtcttcatcatattcatccagaatatcccctacgatctcctccaggatatcctccatagtgatcacaccggctgcctgaccgtactcatccacaaccactgccatatggatcttctttgcctgcataaactggaacaggtcaccgatactgcgtgtctcaggaatcaatgtaacatcccttaaaagcccaggcagttcctttaatggcttaaatctggcccagggattcttggtaatgaacttcagtgcatccttataatgaactactcctataacattatctggttcttctttatatacgggatacctggaatagccttcctccagcataatatccaccatctcccgcagcagcacttcctggtcaaaggctgtcacatccttcctgtgggtcatgatatcatgagcttctgtctcattgaaataaatgatattctggatcatctccgcttctgattcctgaatcacacccttttcatgagcctcatctacaatagaaatgatcttctcttcgctcatagccttttcttcctggttccggtcgatcccaaaggctgctgccaccagtctggcaagcctggtagtcaacaaggtcaacggatataaaaagctgcaggcagtacttacgatccccagataacggtaggcatacttttcagaagaataagtacccaccctgcggaatgtaaggattccaagggacgcaagaagaaggatccctactgcaacaagaagaataagcacaggtacatgttttatgtacggatgaaatacccgggctgcccagggcataaagaacgctcccacacttactccggaagccataaccataagaggaatggcattcacatagcgggagggctggcggatcagcttcagaagccggatggacttctggtctccctcttctgctttcttctctacatcattctcgctaagattctggagtgctgcagcaaatccgtaaaaaataccattcagccacaacagaaaaaataaaattataatgccccataggggcagactactgccatcttccataagtataaatctttgtcctccaaatacaaaactgtaaaacttttttgcagctgtttttttaatataacactgaaaaccggtttcgtcaatacctgcaccacagcctcagaagccttgtgtcacagcctaaaaagctccaaagaccctgacgcaggtgttaaaaagtaagctccagactgatctccagagcatggttcactttgtcaagcagagcatcatccaggtgacataccttatccttcagtcttcgtttatcaatggtgcgaagctgctccagaaggatcacggaatctttctctatcccataagcagatgcatcaatctctatatgtgtaggcagctttgccttattcatcttggatgtaatggcagcacagatcacagtagggctgtgtctgtttcccacatcattttgtatgatcagtacaggccggatcccgccctgttcactgcctaccacaggtcttaaatctgcataaaaaatatcgcctcttttaataaccacacaattcacactccaactcacctttattatggtgtcaagcggatattccaggtccgcttcgctacttactcataaccgaatatttcataaccgttcagtactctcacagttattttctactgaatagttacagtatttccatatttttttcgtgtatacatgcgtggttttgtctgcttaaagaaacagtttatttttgcaactgtttttctgctgaattgttactattttcctatatatattctgggcacacggctggatatctggcagaggaattcgtaagagaaccgtccggacagatctcccaaagtgtctatatcgatcctctcctgcccgtcttttccaagcagtgttacttcatcacctgtttttactcccggaatctctgtaacgtcaaccataaactgatccatgcagactcttccgcagataggtgcctttttcccatggatcagcacccagccttttccggatagctgcctggaatatccatctgcatatcctaccgggatggtggccagctgcatatcctttggtgcaataaaggtgccgccatagcttacggccgttccctttgtgatcttcttcacaaaagaaacatggcttttcagttccataacaggtttaagctctacaatatgcttctccacctgctgggaagggtacaccccgtaaatggtgatccctgcacgtacagcatccagattggcctcctgcatccgtatcagccctgcactgttagaacaatgcttcataggaatatgtataccgttttcctctaaaagactggcaaaagccaggaaacgatccagctgagtctttgcaggacttacatcatactcatctgctcttgcaaaatgggtaaacatgccttctatctccagataaggaagcttgctgatattctttatttcttccaggctttgagatccatcatgaaatccaatcctggtcattccagtatctactgccagatgaatctttacagttttggaaagtttcctgcctgcttttgcatattctcttgccaggctgatgctgcttacagcaatgctgatatcattttttgcaagctcctccatacattccgggaatacaagaccaagcaccaggattggcttgcggatgcctgcctcccttaaggaaagagcctcctcctcggtagccaccgcaaagccccagatataatcatagtcctggaccaacctagcaatgggcacagctccgtgtccataagcatccgcttttaccacagcgatcatctttgtgcctggtttaatatttttatgcatggcttcaaaattataggcaactgcgtccaggtccaccagtgcttttactctactgaatttttccataatgttcctccctgtttcctgtttcaaaatcccgaagtaccagtgggatcgcatccaggatattgcgggcattcatccctcttgtaccagcagcatctgccgccctgtctccacatagtccatggagaaacacgccaagagctgccatccttgccggatccggtacctttatattgttcagatacatgcagaacacaccagccagcatccctgaaagcacatctccgcttcctgctgctgccattcccgcatttccagacatattaatatatatttcatccctgcagcctgcagtaactgtaccggcatcttttaacacacacacagcccctgtttcttttgcataatcagacgctgctcctaccgggtcttccttcaattctgaaatggaaagccctgtaagcctgcccatctcccccatatgcggggtcagcacagtatttcctttcagatactgcttccagcccggattcatggatagcaggttcaaaccatctgcatccaggattaccggcttccccgcctgattcccatgggccagaaaccaattagcccgttcccggctttcatcctggcatccaagacctggtccaatcaccagtacatcacaccagcttaacagctgctgatttatttcttctgaaaatacactttccaccattgcttccggaagcagagactgaagcggaatccggttttcttccactgtctgtacctttaccataccagctcctgtatttaaggctgcacaggcagcaaaatatgcagctccgcacatgccctttgagccagccaccaaaagcactttgccaaaagtccccttattcccccagggaactctctgtggcagctgcttcatatcttctctttccagctgccacaccggtctgccgtaattgccaggataatcatagatcccgatatctgctactacaactttcccggacagactcctgccgggatagaagcacattccctgcttcataaaagcaaaggtaacggtaagatctgcacaaaatgcggttccaagcactctgcctgtgcttccgtcaaggccggaaggaatatctactgccacctttttggcatctgtctcattcatcctctgaatgatctccttgtatcttccctccaccggcctggtcagacctacgccaaaaacggcatctactatagtagtatattcgtgccatgtcgggttattcacctcaggtacgtgataatgccttgcaatctgaatctgctgagccatctgagcagaatatttctgggaatttcctgtaagaaacagatctacatgatatcctttcagatacaacagcctggctacagccacaccatctccaccattgttgccgtttccgcaaacaaccaggatccgttccctgtcggcagaaatcttctggatctgagctgccacagccaaagcagcccgttccatcagcaccatggagggaatccctacatcatgaatcgtatacgcgtccagactggccatttctttgcttgttactacctttttcatatacgcccactctcctttgtctttttaaatggaaaaagccgccctgaaccgccgaatcatgcggcagcaggcagcagcctttaaccaaaagggaaaaactctttcccttaattctctgtttcctttttttcttctacatgctctttccgatactggcttaaattataagacagagtcatcaggctctcggaaagatgaacattttctacgatcacatcctccggagcatccagatcaatgtgtgcaaaattccaaatagcctttacaccatttttgatcagcacattggccatttcttttgctttatgcttgggaagggtaagtatggcaatctcaaccggattctccttaaggaactcaggaagtgtatttatcatctgtatcccaataccccttacagaaatcccctccagaaccggattcacgtcaaagatccccaccaggcgaaatcctctcttctcaaaatcactgtaattggcaagtgcctgacccagattacctgctccaacgatgatcataggatggatggtatccagtcccaggatcttgccgatctccatgtacagataatgcacattatatccgtagccctgctgcccaaaaccgccgaaattattaagatcctgacggatctgagatgcagtcacatgcatttttttactgagatcactggaggaaatcctttccacattctcctcgatcaactctcccaaataacgataataccggggcagccttttaataaccgcctttgatatctcctttgcttccaccaactcttcctcctgctgcccatatctaaaatttatatctcaattatactcaaatgatattttattgtcaatctaagttacttactttgtgactactttatttattttttgacacctgatgcctttttattatataatagattgatttgtggatttcttattttttggaggaacctttatgattttatcatgtcagaacatatgtaaagcatttggtgaagaagaaattatcaaagatgcatgttttcatattgaagaaaaagagaaagcagcactgatcggcaacaatggtgcaggtaaaaccaccctgctgcggatcattatgaacgagctttctgcggatagcggttctgtagtgatctccagggacaaaaagatcggctatctggctcagtatcaggatattcacggtcatcaaaccatttatgatgagcttagctccaccaagcagcacatcatagatatggaaaacagaattcgtactctggaacaggaaatgaaaaattcccagggcgatcagttagaaaaactgatgcagacctattcccgcctgacccaccagtttgagctggaaaatggctatgcctacaaaagccagattgcaggcgtactgaaaggcctgggcttttcagaagaggatttcaccaagcagatagaaaccctttccggaggccagaaaacaagggtcgctcttggcaagcttcttctgtcccagccggatatcctgcttcttgatgagcctaccaaccacctggatatggaaagcatcgcttggctggaaaattatctgctcacctaccctggagctgtactgatcgtatctcatgacagatactttcttgataaagttgtaacaaaagtggtagagatcgaagccggatatgtacggatgtacagtggcaattactcagcctatgccttgaaaaaagcccagcttcgtgatgctcagtataaggcctatctgaaccagcaacgagaaattaagcatcaggaagcggtgattgcaaagctgaagtcctttaaccgtgaaaagtccatccgccgtgcggaaagccgtgaaaaaatgctggataaaatgcagcgtctggataaacctgctgaaataaacgatcagatgcgtctcaccctggagcctcgcttcatcagcggcaatgatgtgctgactgtggaagagctttccaaaacttttccgggacagacccttttccagaatatttcttttgagatcaagcgtggtgaacgagtagcccttattgggaataacggaacaggaaaaaccacattgcttaagatcctgaaccaggtgattcctgccgattccggcaagtttacccttggttccaaggtacagatcggttactatgaccaggaacatcatgtactccatatggaaaaaacagtattccaggaaatctccgatgcctatcctactcttacagaaacacagatccgcaatatgctggcagcctttctgttcacaggggatgatgtattcaaggtgatttcctctctttccggtggagagagaggccgtgtttcccttgcaaagctgatgctctcagaagccaattttctgatcctggacgagcctaccaatcatctggatattgcttccaaggaaatcctggaggaagcattgaacagttatacaggtactgtcctttacgtatctcatgaccgttattttatcaatcagacagccacccggatcatggatctgaccaatcaggccattgtgaattatattggggactatgattattatctggaaaagaaagaagagcttactgccaaatatgctcctttaacaacccaggaagaagaagccgtccaggtttcagataacaagctttcctggcagcagcaaaaggaacagcaggcaaaagaacgtaaaagggaaaacgaactgaagaaaaccgaaaaaaggatcgaagaactggaagcccgtgatcaggaaattgatgaaaccatgattcttcctgaagtttgtaccaacgtagcagaatgtaccaaattaagtaaagaaaaagctgccattgcagcagaattagaggaattatacgaaaagtgggaggagctggcctgatggccgactcctcctttgttatgatgatatcttttttatcagagaagcttttccagattctcacggatggcaaggataaattctttgctgttcagtactgttacatccttcagggaagtgatcaaagccaggtcctttgtcatctttccgctttcgatagttgaaagtgtagccttgtccagcttgtctgcaaaatcctgcagttcctggatcccatccatctctcctcttttacgaagagcgcctgtccatgcaaaaatagttgccacagaattggtggatgtttcttttccttccagatgtctgtagtaatgtctctgcaccgtaccatgagcagcctcatactcatagtagccgtgaggggaaacaagtacagaagtcatcattgcaagagagccaaatgcagaagataccatgtcactcatcacatctccgtcatagttcttgcaggcccagataaaaccgccctctgctttcatcacacgggctacaatatcatcgatcaggctgtagaaataagtgatccctgcttcctggaatttttctttaaattcttcttcataaatcgttgcaaaaatctctttgaatttcccgtcataaatcttggagattgtatccttgcctccaaaccacagatcctgctttgtatccagtgcatagttaaagcagcatcttgcaaagcttgtaatggactcttcaatgttgtgcattccctggatcacacctggactgtcaaagtgatggatcagttcttttttagtctctccatctgtaccttcaaatacaagatatgcgtctcccggtttctcaatgttcatctctgtattcttgtatacatccccatatgcatgacgggcaatggtgatcggctttttccagttgcgtacacaaggctcaattccatttacaacaataggtgcacggaatacggtaccatccaggatggcacgaatagtgccgttagggcttttgtacattttcttcaggtcatactcgtccattcttgccttatttggggtaatagtggcacattttacagcaactccgtatttcttggttgcctctgctgcatctacagtaacctggtcatctgtgtcatttctgtgctccaggccaagatcataatattcagtcttcaagtcaataaaaggattcagaagttcatccttaataagcttccagagaatacgggtcatctcatctccgtccatctctacaaggggtgtgttcatctgaatttttgccatttagatattcctcctcttcttatttcaatgtaataccaagtctctcacaggtttctgcgatcacagcctccaactccttatcagacagtactgtaacacggccgtcttcatactggctgtctacccatgccttgatcattgtaacaagttcgctgttcttgtcgaccttcttatcgcctttcaaacggtaatgggtatcgatccagtgggcgatcccagctgctcctgaagtattggatactgctacctcagcagatctgttcaggaatttctctgtatcaaacacattatagatctcttcattcttcagaagaccatctgcgtggatacctgctcttgtcacattaaaattcttgcctacaaatggtgttctttccggaatatgatacccgatctctttctcataatattcagccagttctgtgatcactgtggtatccataccgcccagattgcctctaagctgtgcatactcgaataccatagcctccagcggagtatttccagtccgctctccaataccgaacaatgaggtattcactccacaggcaccatacagccatgcggtagtggaattgcttacagccttataaaaatcattatgtccatgccactcgatcagctcggaaggcacacctgcatgaatcataataccataaataataccaggtacagaacgggggatcacagcacctgggtagttgactccgtagcccatagtatcgcagcatcttacctttaccgggataccataatgctggcgcagcttcataagctccagacagaacgggatcacataaccgtaaatatctgctcttgtaatatcctccaggtgacaacgaacagaaacaccgatctccaaacattccttcacaatactgagataatgctccatggcctgcttacgggtcatcttcatcttataaaatatatgataatcagaacagcttacaaggataccagtctctcgcatacccatatcacgcacaagctggaaatccttcttatttgcacggatccagctggtcacttccgggaactcatagccacgttccatacatttttcaactgcatccctgtcctttttgctgtagaggaaaaattcggaagcacggatccttccctccgggccacccagtttatgaaggtaatcataaatccttacgatctgatccgtagtgtaaggagctctggactgctgtccatctctgaatgtggtatctgtgatccagatatcatccggcatatgatggggaaccaccctgtcattaaatgcgatcttcggtatttcagaataagggaaaagatttcggaatacgtttggtgtttttacatccaccagcggatacatatgctcctctaactgaagcagattcgtatgccgattcattgtcactcgtctattttccataatttcctcctctatgaacacgaatagtattcatactctatgaattgtattcacatcgtttccattgtactcaaaaagaggatctaagtcaacgcttttgtacgttacagtgataattttttgtcaaattcaaaaaccgttcacggttgaagcgaccccatccctggatattccttggcagctgcatatcgtctgcactttctttcagcatccttttaatagccacatttgttagggtgggattcttttccaaagcgcaggcaatggctcctgaaacaactggggtggacatagaagttccgcttttggctccatatccgtagatcccgggggtgcctcctgctaatggtttccattttgtataaggtatacaggaaacgatatgatttcccggcgcaaccacatccggcttgcatacgcactcctttgtaggccctcgtccggaaactgctttttttccttccaacaggtcactggaacctacagtgatcacctttttgttgctgccaggcgctgtaatgctgcctgaccttggaccctggtttcctgccgcagctaccactaccagtccttcctcccacagctgatccactgcatcaagaagcgcatcctgttcattagaagtattgcaggtagttcccacagaaatattcaccacccggatccggtactcctccctatagcttcggatccactgaaaagcctgcagcaaatcctctttgcttccgttcccatatctgtctaatacctttaaagcaataatgctgcagccaggtgctgcacctgtatacctgccagaggacattctgccatctcctgccaggatcccggtaacatgggttccatgtccattatcatcatatggctgtctgcggtaaaaaaggaaatcataaaaaaaacggatacggctgtcaaagtctgcatgggggaaaagcccggtatccagcactgccactccgatcccttttccagtatatgtcctgcctgtcataagcctctccggaaaggtcttcttattattatattcaaaaagttcccctgttgtgacctgcactgcatttcctgagtttttgtaaattcaagaat

SEQ ID NO: 19 - DNA, 9050 bp, Unknown
  gut microbiota DNA sequence
gaagacaaaagtaaagcgttgaaagctggaatggatgaatatcttaccaaaccactggagtcggaaaaattgatttgtgcattaagcagatataaacacaattaacaaaataagaagcctctttttcatactcaccaaactgttctgttggaaaagttcgctggcgtccattggcagaaaaaggtggtcgtattgcgacaaatgcaaaaacttttaaggagcttctggatttttaagtattaaaggaacaagatttctggtattggaatcagtttaaacgcattttatatagaaaaaataggatcggtacactataaaaccagcatcagaaaacctggtggctccagcagcagatgatattaacattgatttacaaaatgaaaccaaaattgtagtggaatttgaggaatcaaaacgacttccagatggagcgttcttgattcctttttctttacaaattggttacgttcgctgtactgaaactagtgtataattgtaatagtaaaaatcacgcacaataaagaaataatcggatttgtgtaaaatgaaaggaacattattatgaaagcaagaatactggtgatagaagatgaaatggcaatcaatgatctgctttgtatgaatctggaagctgtcggctatgaaacagtaggttatctggatggaaatgatgcaagtgaaggagtcgcacaggaccatgaatttcagtgcgcccttgtggatattatgcttccgggaaaggatggttataccctgttgccggaattaaaaaagtttggtattccggttatatttcttacggcaaaggctgatgttacaagtaaagtaaaagggttaaaagacggagccgaggattatatagtaaagccttttgaaatgctggaggtaatggtgcgtttggaaaaagtattagatcgttatggaacggcaccgaaacagattcagatagacgatgtcataattgatactgtaagtcacatagttacgaaaaatggagaagaaatatatttaaaacctatggaatataactgccttatggtgttcgtaaaaaatccaaataaagcacttaccagaagccagatcttgcaggaactgtggaaggaggaattctgcggagaaacaagaactgtggatgcacacgttggacgcatcagaaaaaaactaaactggcaggataaaatcaaaaccattcccagaattggttatcgacttgaggtggatttatgaagctatttatgaaaatttttttacaggtaatctgcatggtgcttctgctgtcgtctggaatctttttctatacaacttataggtggaaaaatcagggcatacagaatatcaacagttatgaaaatagcaggtttcaaacaaatatttctaagtttgaaaacatgctaatgcgaattaaaaacgaaatacaggactctgatgataaaatccgggaaaaaatgattatttatgcttttcgtcaggtattccacgacagcgctgttttatatcaggatggaaaagagcaatataatggaaccaaatatgagtttgatttgcaaaatatcagaaacctaacaaaaaacaaacacgatggattcggaaatgacatctattgtgataaaccactgatcagcaaaacaaatggcaacgtatttttgctcttttatttttccagttatatttctacagacataaactatcagatcgtcacctataaagatattaccagtgtacaaaaacagagtcagacactgttttatcaggcaggagggtttaccctgtttctggttctgtttgttggctttttcctgtttttaactttgcggaaaattatggaaccgctcacaaggctaaaagaagcggctgtttctgtggcaaatggaaattatgagataaaagtgccatcagaaggaaagacggaactggcacaggttgggaaaagctttaatcttatgacaggtaaagtaagggagcagattgaaaagctttcttccgtaaaccaggcacagagacagctgcttggaagtttggcccatgaattaaagacaccgatgactgcaatcataggatatgcagatacacttctaacggtacgcctatctcccaagaggcaggagatagcgcttgattatattagaaatgaatgccgaaggctttccaggctttcagtgaaaatgctggaacttaccggattatatgaaacaggtgaagcagaatttgttccagtggaaattcagatgaatcaatttctggaagatgtaaaaaaacttgttacttacaagcttcaggagaaaaatatttgtcttgagattcattgtaatccagagaatcttagaaaaacatttgatccggaccttatgatgagtgcagtgacaaattttattgataatgcagtcaaggcttccgatgagaattcaaaaatcgtactggaggcagcccaaaatcatttatccgttcaggattatgggaagggaattccagaggaggatctgaaaagagtaacagaagctttttatatggtcgataaatcacgttccagagtaaagggaagtgttgggcttggtcttgcgctatgccagaaaattgcagatatacatggatttcagctggaaattacaagccatttgggaaaaggaacgatcgtatctgttttatggtaaataattggaatttacagaacagttacaacttgcggaagatttggtgcaatgaaagatgctatacttgtggacataaacaggaaggagaatttattcaacatgagaaaaaacataaataaaattgtaggattaacactttgtataggaatgctcacaggatgtgcccagaccccggaatcttctcttgtaaaaccaaaaggaagcaaggcagaagatgcttatacagaagctgaaggcgtagatatagtgaaggaggattcttctgaaaatacaaaggataagaacacagcggtaagaacaactattcgagacctactcaatgctccggaaacttataaaagtcagactacagatgacagtgcaaaacttgtagtgaacacggatgccaccgtagaaataccggatgtagaaaagatatccgcaatttctgtcacgcctgcagaagttacacaggatcttcttgaccgtattacagatgcctttttctcagaggcaaagctgtatacatcggatagctattatacccagacaaaggatgaaatcaaaaaaacgttggatgaactaaaagaagatgtagcaaacggaaatctggatccctataactatggaacagatgaagatggaaattatatttatgacatttatggagaaattgagatgtatgagcaggaatatgagtctgctccggaaacgaagactctggtagaaggaagacctgttgcaggctcccaggagacagaaaatggtactgcggaaaatgacttctccggtgttgcacagatgccggatggaacggaatatttttacaggacatcttcctacggatccgataccttatctgtcaaaatccgaaaaacggcaaaatctggcggggaaaagctgcctgtggacatgacctggtctgagtatacttcttccagtgaaggagaaaaacctactgaggagtccattgggatttcattagatgaagccaaaaaaatggtacaggaaaaagtagataaaatggggattacagatctgcagttttcagactggagttatgcattgtgcaatagtcttgaagagaataatagtttaagtaatcttggaagcggatatgcgatttattacacacgtactataaacggtgttccgattactcagacaatggcagatggcggtgctttggaagatatggacagcactatggaaacctggtcttatgaaagtctttatttctttgtcgataaagatggaattgaaagcatgtcttattcaaacccttataccataggagagacaaaaacagaaaatttaaaccttcttccattttctgagattatgaaaacatatgaaaaaatgatggtagtgaccaatgcagataatatggaatatgaaaaatcaagagtttatgacattgaccggattgttctgggctatgccagaatttatgaaccatccacagatccgcatacaggtcttctggttcccgtttgggatttctttggaagcagaaaagtggaaggtgactatggtgggaatagttactcggacatcacagactatccaagctggagcttccttaccattaacgccgtggatggcagtattatagacagggatctgggctactgatatgaagcaggtacttggaattgtacattacaatttctttggttattttcgaaatccgaaagtcatttttaccttccttctggaatttgtacttagctttcttctcactggaagaatcatgattgttatggaaaactatgatacaccggtacaggccatagagccgtttctttggacctttggggacggaacagcagtactgctcagttctcttctgttgcttctgttgttctcagacctgccaaagatgacacccgttactccatatcagttaattcgaacaacaaagaaaaaatggcttttgggacagtttatttatattattcttgtgactgctctttatacagtattgatgctgctatttacatctgtactgtgtatgaaggacagttatccgggcaacctgtggagcgagactgctgccatgctcggatattctgaactggggaaaaacttgcaggtcccctctacagtaagagtcatggagagtatctctccgtatggctgtatgctgcaggtttttctcctgttattctgctattccctgacacttggttttgtgatccttattggaaatctttataaaggaaaaacaaaaggcatggtgtttggactgctttatagtgtatttggatttttactggaacccagtgtggtagccgcaattttgcataaggaaaaatatgaaatgtaccaggtgaatgtactgatctgctggatcagtcctttgaaccaggctgtatatggaaaacataaccttggctatgatccattacttccggccatctggcaatcctgtatgttcttcgcaggtattctatttgttcttatggttctggcacttcgcaggatgaaaaaatatccctttgaatttctgggagaaaaaacataatcagaaagggaaatatctatgcgggtagaaacaaaacggatgcttcttggcaggagttttctggcggcatggctgattgcctgcttttctattgcagcaggtcagacttatccaagtttgaaaaaagcattaacatgtggaacttttatcagcctgctggatggttccttgaaaagtcagatggtatcttttgccatccctgtagctgcggtactgccgtggagtgattctttcttacaggagtataaaagtggatttttaaaagcggcatttcccaggacaaaccgcaggctatatgtggaaggaaaagtcttttctgttatgacatcaggcttttgggtctggatatttgctataagcaccatgctgcttgttgattttgttatattctatcctatggaaataaaaggcagctttccaaaggaacagtttctggagctgcttatgaaagcacttaggatgggactgatcggaagtattctaagcacttttggtggaatctgtggtaccttatggaattcagcttacatggcatatgggattccttttgtcagctattattttggaattatacttcatgaacgttatttcaaagaccaaatctggttttacccagtggaatggattctggcagacggaaactggggaacggataaagcgggcttatggttatttctgctattatttttattggtgttaatgggaatttttggaggtgttttaaatggaaaagtggaagaaatctgaatttcaaaatacctgtgtgaaaatagaacacgtaaccaaaaggttcggggaagacctggtattaaaagaagtaaatcttaccttaaaggtgggacaggtttacggcgttgtaggaaataatggctctggcaaaacggtacttatgaaatgtatctgcggattccttcctgttaccacaggcaccatccgtgtattcggaaaagaaatcggtcgtgatgtggattttccagaaagccttggtgtcatcattgagacgcctggctttcttacccagtataccggtgcaaagaacctggaaatactggcagatatgaaaagaatgatttcaaaggcagatatccgcctgatcctaaaaaaagtaggactggatccggatatgaaaaagccggttggaaagtactctcttggaatgcggcaacgtcttggaatcgcacaggccattatggaagatcctcgcttcctgattctggatgaaccatttaacggtctggataaacacggcgtggcagaaatcagggaacttttgcttgatttaaagacaggtggaaaaaccattttattggcaagccataatgacgaggatatccgtattttatgtgatcacgtatatgagatggatggcggaattttaagagaaaggacagcctgaaaatggaaaaaaaatttgtgaaaaccacattcgcaatattaagtttcatgatgcttctgccgacatctgtttttgcagaagatgcaggggatatggaagctgcttttgtgggagagtctggtctggaagcagatcagtcagcttcttatattgatgtagacagtacattgccttcttatattgatgtagacagtacattgccttttgaagaggaaaaaaacaatcctacagatgagaagatcccgggaactgaggaacagactcctgaaaaaacggattcggaaaatcaaaattctgacctggatgaatttatatcaggagacgcttctgctgaggacgaaaagaagacaatccatgtcataatagaaaatggaaatactgatacagataatggaacacagatcacagatcctgttatagatagtggggattattctgctggagggtatagtggaggcggttcttctgccagctcgtctggtgagaaaatactacataaaccgcaggttcttttagaggataacaatctttccggacaaaatctaaaagcaggcactgtcacagaaatgtcatttacatttcggaataaaagccgtagccagaatgtatttggtctaaagatttctatttctgcggatacaaagggaattgaattcgagagaaactctttttatgttcagagactgactccaggagaagcaattaccctaaagcaaaaggttactatagcagaggactgtgctccaggtcaggcaacagtttctttttctctggattacgaagattcaaaagcgacgggagcggcaggtacagaaacgctgtcctttcagatcactcagcaggcgcgtgcaaaactggaagcttctgatattccttcagttttgtataccatggatacggtagaaattccggtgaaagcaatgaatcttggaagggataaaatatataatgcaagtgtacggctggaagcagacggattgaacccaaaagagtccgcttttttaggaacattagaagctggaaccgcagtacagggaagtctccgtgtgtatgtaaaaggaaaattagaagatgatgacggttcttttcccaacaggattaccggaaaactgattcttacttatgaggatgcagccggcaattcctataaggaaagtacagagtttgagtctgagatcaaagaagctaaaatccagtctttcaaaatagaggatgaccaggaagaaacaaacagctggtggtattccgttattgcagttattgcagtactgcttgtttctgtgattctacttcttttgggcaagcttcataagaaaaacatacttctggaagaaaccagaaaggtggatgcccattgaaaaagaatagaatagacagttttacctgttttgtaggttttcttctgatattggcattatttttctttataaagcttttttcaggaatacaggacgggaaaaaacaatactcagcactggtttcccttggagaccttacttatgatgatgattttttgaaaaaggcaaaaaaaatagaagggataaaagagatatggcccgttgtggaaattccagtaaccatcaagattgaagattatacggaaacagccacctttttaggaatagatctgaatgcgtttggagaaaatccggagcagaatagtttaggaaatacaccggtgttgttgcttggaagtaaatcattgcaaaacatgaaagactcaaatgatcattccatttcaaaaaaacaacaggaaaaattcctgcaaatgggagaaaatctaaccatttcttatgcacttgctggaaatacaaaagagctttctggcgcggcagatcatccggtatccttgactgggcacgaagaaaatgaacagcaaactgtttatcttccatgtaaagtaactgcagtaacggaaaatgaagatatctatattcctttatcacaggcgcaggagctttgcagtgagatgggtgagccgcttaaaattacaaaaatttatttgaaagtgaatggaaaaatgaatctggagaaggcaaaaaaattatttgaataaggtattcttggaaaattaattgtatcaatctctggtattcatttgactaactattgtattttgtgcatgttttatgtaattttatccatgtacttcttgtggaaacagccataaatacaaatcttccaaacgcggttccgcaggaatcgaaccccctacctcagaatgatctgcaagataacggatagatatttgattattgtcctcgccacgctgattgataatccgcagacgcatttcatagtccatcatcttatgagcaggaaccacacaacttcatactttacccgcgatttgttttaccaactcgtttgtcgttcccacatcaataatttttccagctttcataatcgcattacgagttgcgatatattcaatatcagaaacaatatgggtggaaatcagaacaatagcgggtggtcttgactatttatgcgttataag

SEQ ID NO: 20 - DNA, 2124 bp, Unknown
  gut microbiota DNA sequence
taattttccaaaggccggcatgatccagtcttctctggaggagcttgttccatctgaagaggctggctggaccaattatccaaagggagttatgtggacctttgaaaagagaggctataagctgacttgtggactggattttatgatctttggtaatattcctaacggttccggactttcatcctccgcttccctggaagtgcttacaggaactatgttaaaagatctgtttggatttgatgagatatccatgcaggatattgctattatgggacagtattctgagaataatttcaatgggatgaattgtgggatcatggatcagtttgcaagtgcaatgggtaaaaaaggctgtgctattttcctggatacgaataccctgcagtatgagtatgcaccggtaaaccttccagatgcaaagatcgtgatcacaaacagcaaagtgaaacacagtcttgtaagttccgcctataatgacaggagaaatgaatgtgagaccgcattagaagatctgcagaaagtgatggatattaagacactgggagatttaacagaggctgagtttgaagcacataaggatgcaatccaggatccggtatgcgtaaagagggcaaagcatgcagtttatgagaatcagcgtaccatcaaggctgtacaggcactgaaggaaaataacatcaaagaattcggaaagctgatgaacgcatctcatgtatccttaagagatgattttgaagtgtcttgtgaagagatcgatattctggtagatcttgcgtggaaaacaccgggagtgatcggatcacgtatcacaggaggcggatttggcggttgtactgtaagcattgtggaaaatgaccaggtacaggcttttacagagaacatcggaaaggcatacgcagaaaaggtaggccatgaggcagaattttatgtagtggacatgggcgatggtgccggaaagatggatataaaagatatgaatgtacaggttgaatgctaaggggtgacgggaaatgttaagtgagaatattaagaaactggtacagtatgggattgaaacaggtttgacaccggaatgtgagcggatctatacgaccaatcttctgctggatgtatttaaggaagacgagtatacagagccggaagaagaatatagtaatattgatcttgagcaggttttaaaagagttactggatgaggcagttgcacgaggactgatccaggacagtgtggtatacagggatttgtttgataccaggcttatgaattgtctgatgcccagaccggcccaggtaagaaatactttctgggaaaaatataaagaggatccggagaaagctaccgattacttttataagctgagtcaggacagcgattatatccgtcgctaccgtgtaaagaaggaccagaaatggacagtggacagcccatatggacagattgatattaccattaacctgtcaaagccggagaaggatccaaaggctattgcagcggccaagctgatcaagtccagcagttatccaaagtgtctgctttgtccggaaaatgaaggatatgcaggcagagcaaaccatccggcaagggagaaccacaggatcattcctgttaccattaatgatactccttggggctttcagtattctccttatgtatattacaatgagcattgtattgtattcaatttcagccatacacctatgaagatcgagaggaatacctttattaagctgtttgactttgttaagctgttccctcattatttccttggctccaatgcagatctgcctatcgtaggcggttctattttaagccatgatcatttccagggcggacattatacctttgcaatggcgaaggcagagattgagaagacagtgacgatcccaggttatgaggatgtggaagccgggattctgaagtggccgctttctgtactgaggattcgtcataaggattctgacaggctggtggatctggctactcatattctgaataagtggagaggctatacagatgaagaggcttttgtttttgcacagacagatggagaacctcataataccattactcctattgcaagaaagaaaggagatctgtttgaacttgatctgactcttcggaata

SEQ ID NO: 21 - DNA, 4944 bp, Unknown
  gut microbiota DNA sequence
ttaccatgatcgaacgtacgaagcatggtggtcatataacagatgtcgatggtaatatcaaggcattccctgattattagctggagcaaacaatcagctaactttcagagctttacacagcttgacagagggggtattcagaataactcaaattgaatcggaaacagtttttaatagtgtcccatatgggtttaccttacctcagattgacagagagtgacaatcggttggagctctcctaagcgaagggtcggaggttcaaatcctcttgtcgacggccaacgcggaatgattagcagaaatcgcgaaatcattccgttttttattggaaacgtatgaaaaacgcttcctttttcagcggaattgcaaacgaatgggtgaaataggcaaagctgattttccaacaaaaataggcccatttctaaaataaaaaaataattttttctaagagattatggcgacaacattgttttcgccgatacggttagcgttaagtagagtaaatcccagtcaaaaccggcattttcttagcagaaatcattgcttttataactctatataaatttttgaatgaaaatactcattcacagatctgtttatggtcttgtggatgagttttttttattgcaaatgaatagctgaaaaaggagggatttctaatgaattgcaaaaagaatgcgaaaagcagatcagatgatgaacaccgactattcgatcctgctgttgagaaggttgtagagatcggtctggagcgtctgaggccattcgagaatcatccgttcaaggtaaaagaggatgaagcaatggcacggctcatggaaagcattgagagatacggaattatgaatccgctgattgtaatgccaacaacggaaggattttatcggatcatctccgggcatcgcagaaaatactgtgcagaaaaacttgggtatacacaggtgccggtcataatccggtacatgaaagaagatgactcgatcatatccatggtagattcgaaccttcacagggaaaagattctgttcagtgagaaagcatttgcttattccatgaagaatgaagctatgaagcgtaaaaccggtaagagacgaaaaacacaggaaggtctgttggaggcgctgaaaggaaccaagaccatagatctgattggacaggaaacgggtgaaagtccaaggcaggtgctccggtacattcgtttaacgtccctgatcccggaattactggatatgctggatgaaggaaaaatctcatttaatccggcagtggaactttcctttttgtcaattatagaacagggatgggtggcagacagtattgaatatacgctgtcggttccttctgtatcacaggcaaaacgcatgaaagcactgagccaggaaaagcatctgagtccgcagaagatcaacgaaatattaaacgagatcaagaagacggatatgagcagagtgatttttaagaattctcagatgtataaatactttccaaagtattacagcacagaacagatgaaagaagaaatcatagaacttttggaaaaagaaagaaaacgtaaagaaagacagagaaaacgggaggaaaagaagaatgggtaaagttatttgtgtcgcaaaccaaaaagggggaactgcgaagaccacaacaaccgtaaatttaggaattggactggcaaaagaaggaaaaaaagtgcttttgatcgatgcggatccgcagggaagtcttagtgccagccttggtattggagagccggatgcccttaaagttacattatctacgattctgatgaacgtagtaaatgaagagaacattgatccggaagaaggtatttatcatcacgaagaaggcgtggatctgcttccaggaaatatcgaattatccgttatggaactgacattggccaatgtgatcagtcgggaaatgatccttcgggaatatatcgaagcgcagagagaacgatacgattatattctgatcgactgcatgccgtctcttggaacactgacgatcaatgcgttggtagctgcagattcagtactgattccggttcaggcggcatatctgccggttaaacgtcttcagcagctgatcaagaccatttctatggtgaaaagaagactgaacagacgactgatgattgaagggatccttcttacaatggtggatttcagaaccaattatgcaagagatatttcaaacaaagtaagagaaacctacggaaccagtatcctgatatttgagagcgtgattccgttatctgtgaaggctgcagaagccagtgccgaaggaatcagcatctatggtcactgtatcaattgtaaagtatcaaatgcttataaagaattaactcaggaggtattaagaaatggcaggtaaggcaagcaagatgaatgaaagactgaattttaagagcgtggaagaactgttaggtgttgtaaatgaagagtctgccatggatattgaaatctgtaagattagtagctttaaagggcatccgttcaaggtggtagatgatgagaaaatgcaggaactggtggaaagtattaaggcaaatggggtgctttcaccggtattaatccgaccggaatggatacctatgaaatgatctccggccacagaagactccatgccgcacagctggcaggactcactgcgattccttcaattatccgggaaatgacagatgatgaatcggtaatagcgatggtggatgcgaatattcagagggaggagttattgccgagtgagaaggcatttgcttataagatgaagatggatgcgatgaaaagacaaggtgcacgttctgatttaacttcgtgccaaaatggcacgaagttccgagctgatgaggcaatggccatccaaattggagatagtgctcgtaatattcaaagatatattagacttacagaattgattcctgagttattggaatatgttgatctgaggcgaattccattcacctctgcagttgaaatttcctaccttgataaagaaatccagaagtggctgtttgagtacatcagagacaatggccttgtaaagccaaagccgattgcattattaagagaagcatgtaaaaccggcattatgacagaaggcagactgatcgcaatcttaaatgacagtcagccgggcagaacaccaagcactaagaatcttatctccgaaaagaaactgagaaaatatttcccatctgattacaccgaagaggatatgagaagtgtcattgtggaacttctggagcagtggagccagggaaaggagcaggactgatatggaatttgattattactatggatcccaggcagaccagttcagttttatccggataccaagaatgctgttgaccgaagatattttttcctcattaacactgcagtccaagatgctgtattccgtacttctggaccgaatgtcctgatctatgaagaatggctggtttgatgaagaaaacagagtatacattatctatcagatatcagaaatccaggcggatttaggattttccaaaagaaaggccatggattatctggcggaactggaagcatttggattagtcaaaaagaaaaagagaggatttggtcttccgagtattatctacgtgaagagctttatgattcagaaaaactatgccagaagtatcgaaacaggaacttctgcagaaaagaagatactttccagaagtgcggatttcggcacttctgagcagatagattgtacctcaagaggttgcgatttcagtacctctgaggttaccaaatcgacacctctggaagtgccagaatcagcacctctaaataataagactaatataaacaatatttatcagagtaagattaaatcgaatcatatcgcatctgcagatgacggtgagaagagatgcgatccgggtcagactgagatcataaaagcttatggagaaatcattaagagcaatatcgaatacgatgcactactccaggcaaataagttcgatgaaaaactggtgcagggaatctttgaactgattctggaaactgtggtcattcaaagcgagacaatcctgattgccagtgaacgatatccggcggctctggtaaaaagtaagtttctgaagctgaattacatgcatatcgattatgtgatcagctgcatgaaaaagaacacgacgaaagtcaaaaatatcaagaagtatttactggctgcgctgtttaatgcaccgtcaaccatagatggttattaccaggcagaagtaaatgcggacatgccacattgggctggctgaaaggaggatttatgcgagtgattttatttatcttaaagctcattggaagagttttacttattcagctatggctggttctgtcctttatcggtgtatgtgtcagcgcagtagttaatctctactgcgttgcaaaatttattattggaggatgagacgatggaagaattatataaggtgatggatgatctgctggatctggaatttcagataaaagcagggatggatattctgaaggaactggaagaactttatacgttagatccagaaaaagaggagaccgaagcagagaaactggaagtgctgatgagaggatacctgcaatctataaagtcaaatctgagagaaattattcactatatcgacgagtcaacacttgaaaatgcgaagaatgaaaaagttcaaaagcaagagtctccctcaaaggtgtcaaaagacgtagaggagtctgttgataagatgatctccaatcgtatgagcaaagcatattctgaatggaaatcaaatcaagatacacggccatataatgaaaatatagagaaggaataccagaagcttttggaaacactgtctccggaacaagaggaagtgcttacgaagtattgcgatgaaatatttgccagcggagcagagaaagaagagtttttctatcgcctgggtataaaggatggactgagattaaa

SEQ ID NO: 22 - DNA, 19660 bp, Unknown
  gut microbiota DNA sequence
aggcagacataaaaaaagccagacagacataaaaaaagccagacagacataaaaaaaagccggaccatcaaaggagatgatccggcaggaaaaaacgattatggaaatttatgcgaaatatacattcacatcatgctctttaaaatactcaatgtactgggaaggcgcattcccattggtgatcacattgggaatactgtccaggctgcacaaatgggtaaatgcccgtttgttgaatttggattcattaagcagcatgtaaatatctttcacattctgaaggagataattatacagtggaagctgtgcccggttggtgatggagtaaccgtattccaggtcagcaccgtcaatcgtgaaaaacagcttgtcaaaatacagcttccgaagattctgtatgatggattcgtccagggtttcaatatggttgcttccaagatggatattgcctccaaggagaaaaacaccgatatcatgattggaagcaagctccagcgcaccggtaatgttagtggtaacaactgtgatccccttcttgtcacttttgttcaggtgacggcagagaagagaacctgtaaaaccggctcctacaaaaaggatatcgccggaatggataaggtcaatggacttctgggcaatagcattcttgcactcaaactggtcatctgccattttgatggaggagaaaacctggaaataattggattcgtccttttcgtcgatagcagaccgctccagcttctgcgcaccgccatgtgtacgcttaaggaaacccttctcctcaagttgtgcaaggtcccttctggtggtggcaagggaagcgcctgtaagatcgcaaagtgtctgcgtggatgcagtatggttctggtcaagataatccaatattaatttcttacgttccgtagctagcataaacatctccattatatatcccgtcaggaaagggatttttctatttttaccagcctgcttgtgccaagcctggaagcaccaagggaaataaatttctctgcatcatcaaaagaggagatgcctccggcagctttgatcttaacatctggtccaacatatttagcaaagagtgcaatgtcgtcaaaggtagcgccgccagttgagaacccggtggaggtcttgatataatctgcctttgcctgagtgacgatctcacacattttgatcttttcttcttcgtttaacaaacaggtttcaataattactttcaatattttattatcacatacttcttttagtttttcaatttcattttgcacataagcgtaatttttagcctttaatgcgccaatattgatcaccatatccagctcggatgcaccatttgcaatggcatccttggcttcatagatcttagcttctgtggtgtggttgccgtttgggaagccgatcactgtacagataggaagcttgccctgtacatactctgctgctgcagcaacataacaggggggaatacatacggaagctgtgccgtaacgaagcccatcgtcgcagatctgacggatctcctcccaggtggctgtctgtgccagtaatgtgtggtctaccatttttaatacttcgctgtgtgtcatgtaatactcctttcctttacatagaaatcatcttaattaattatacggattgcattgcgctttgcaatctcattacgatcattataaaccatgatgagcgattcgtcaattaaaaatgagcgaaaatgagcgataatatataatacataaaaataatgaacaaaaaaccaaaaatatattgatatttcacaggctttatgttaatatctaaaaagaaaaagtgataaaacaatcaaaaacaatcaaaatgaagcaaccaagacagaaagggggatatatatgagttttgacaaagtgcaggcagatcgtctggcagtcaaaatcagaaagaatattttaagggctattgcatctgaagggaagggccatataggtggatcgctttccattgcagacacttttgcagtcctttatagcggagtggcgaaggtggatccggcagatccggggaaagcagaccgggattttgtagttatgtcaaaaggacattgcggaccggctatgtatgcggtactggctgccaaaggcttttttccggaagaggctttggatacattgaacaaaggaaataccattcttccaagccatacagaccggctgaaaactcctggggtggatatttccacaggctcccttgggcagggggcatccctggcagcaggtgcagcactggcagacaagcttgatgggaaaacttcttatatatatatgattttgggagatggagaactggatgagggccaggtgtgggagtctgcattatttgcagcacatcataagctggatcatctgatcacttttgtagatgtgaatggcaaacagctggatggacctacagaccaggtgtgctgtcttggcagtattgaagataagttcagagcctttggttatcatgtggtttctgttcagaatggaaatgacaccggacagatctatcaggcgatccaggaagcaaaagcagtgaaggacaaaccttccgtgattcttttacatacagtgaagggagccggcatccgttattatgaggagatggcgaactgccattccacagaagtgaagaaagaaaatctgccggacttctatcaggagcttgacagaaggctgaaagaaaaggaggaggcgtaactgtggaggaactgagaaaggttttttataagacaatggcagaaatgatggatgaaaatccccaggtggtatacctggatgcggatctggccggagccatgggaacagccggactgtttcaggagtttccacagcaggcctttgatatgggaatcatggaagccaatatgatcggtgtagctgccgggatgtccataaaagggaagatcccatttgtacacagctttggaccttttgcttcccgaagatgtgcagaccagacctttttatcaggctgctacaataaggcgaatctgaagatcataggttcagaccctgggatcaccgcagaaaccaacggtggtacccatatgccctttgaggatgtgggaatctacagatcttttcccgggatgaccattatggatattgacgagccctatcttctccaggagatcctgaagaaaatggcaaatacctatggtgtgatgtatctgcgcttccctagaaaaggaaagaccgtttactattccggcacagaagaatttcagattggcaaaggaaatattgtaagggatggtacagatgctacagtgatcgcctgcggcattgaagttggttatgcactggaagcagctgagaatctggcaaaagaaaatatccaggtgcgtgtggtagatatgtttaccatcaaacctttggatcaggagcttgtgatccgctgcgccagggaaacaggggcgatcctgactgctgagaatcataatatttatggcggacttggcagtgcagtagcagaggtgctggcagagaactgtcatgcagcttttggcagagtgggagtaccggatacctttggtgaggttggaaataaaaagttcctggcagataagtttgggatttcagcagaatacatagaaaaggcagttagagaactgattttgaaaaagaagataggcctgggagactgacacatgagaaatgctttgtatatacaatccggaggacctacggcagtgatcaactgttctgccaccggtgtgatccgggaatgccaggagcttctggaaaaaggcgacaagctgtatgcaagcctgcatggaattgatggcctgcttcatgaccatttgtatgactgtacagatatggatgaaatgcagcttttgcgtctgcgtaatacaccgtccatggcttttggctcctgcagatatacagtgcgggaggatacggaagaggattatgaccggattcttgcaactctgaaaaaatatcagatctattacatttttattaatggcggcaatggctctgtagcagcaggccaccgtttgtgtgagcacctgaaaaaggccggttatccatgttgtttgatggtgatccctaagacagtggataacgatattgccattgtggatcatgcacctggttttccatcagctgcccgtcatactgtgatcaccatatcagaactggttcatgatatgtatacctacgatacagatctgatcatggcagtggaagtgatgggtcgtaatacaggatatctggctgcagctgcagccgcagccgggaaaactggatggggaccggatctgatctatgtaccggaagtggtttttgacccggaacagtttgtaaatgatgtggccgaggttgtacagaaaaaaggcaaatgctttgcagtagtggcagaaggagtcaagacagcagacggcagatatctttttgaggatacaactgttaataaagcagatgatccgtccaaaaatatgggagggatcaccccttacctgaatcatcttctgcggaaacattttacctgcaagatccgctgcattgacctgggattgatgcaaaggtgtggcgcacatgatgcttctgagattgacaaaacagaggcacagcagcttggaagcgaagctgtgaagcgtgcttttgccggagaaagcgggaagatggttacacttaccaggatcagcagcagcccatacagaaccgagatacagacactggatctggaacaggtggcagatgtggaaagagtgatggatctgtcctacctggaggataaccgccatcagatcaaagaagcttatatggattatatccttccgctgatcggtgatttgccagagtacgtggagctggatggaatcagccattaagacagggacagaaactgaatatagacagaatcaggacagcctggatgagcaggtctgtctgaagtatatgaccaaaacaaggaggaaacagcaatgtacacttatcaggaactggggcttgtaaatacgaaagagatgtttgcaaaggcataccgtgaaggctatgcagtcccggctttgaattttgtaaccattgaacagctgaatggcatgatcgatgcagtgatcgagaagaaatctcctgtgatcctgctggtatcacctaatcttcaccgtcagctgggacatgaaatgactgcaaggcttgcccaggtagcaacagaccggatcaaagaagccggattacagattccggtagcccttcatctggatcatggcatgacctatgaacagtgcgtgatggccattgaaggaggcttttcatccgttatgatcgatggaagcaagctgccttttgaggagaatattgcactgaccaaaaaggtggtggaatatgctcacgcacatggtgttacagtagaggcagagcttggcatattaaaaggaaaggaggaggatggaaccgaaggtacagatgaaagtatgtatacggatccggaaatggcagtagattttatccgccgttccggctgcgacagtctggcaatctccataggaacctgccatggattggtgaaaatggttcccaatgaagacggaaccctgccggaactgcgctatgatatccttcagtatatttctgacaaagaacctggcttccccatcgtgcttcatggatgctccaatatttcccagaaatatgtggatatgatcaatgagcatggaggacatattgaaaagacagtgggtatccctgatgatcaggtacgcaaggcgtccaagcttgctgtgtgcaaggttaatattgctacagacggatggatttgtgggctggcaaataccagacgtatcctggatgaagaaccgggagcgattgacagccgtgcgtttactttgaagatccgcccgctgatgaaggaactgtatctccataagatcgatattatgggaagtgcagaccgggcataacttttaggacaggtgtgaagtatgaaggatatggatgaaaagttttttctttgtgtggaaattggaggcaccaatctgcggtatggagtggtgacaaaggactatacattgaagcagtttgacaagattccttccaaaggactgtcagatgccagagataagggggaatatttaaagcagctgctggatccggtgctggaagagaacgggggagtttcaaactttatgtgcatttccctttctcttgcttccctgatgaaccgggaccggaccatatgctacaattccccaaatatccagggctttgataatcttccgctgaaagcaattctggaaagcctgtggggacttccggtgattatggagcgggatgtgaatacctctcttttgtatgatctgtggaagaaccatatggggcaggaagggatcgtgatcggcgtgtacattggcactggccttggaaacgccatgagcattgatggaaaggtatacaaaggctataccggttcatcctgtgagctgggacatattcctgtggacggtcttgaaaagatgtgcggctgcgggaaaaaaggatgcattgaattgcgtgcctgtgggaaagtactggcagagattgccagagagcattataagtgtcaggtttctgacatctttgtaaagtacggggatcagccggatgtgctggatgtggtgcgtatgtgcgcccttgccacagctacagaggtaacgatcctggatcctgtgtgtgttgtgcttggcggcggggtgacacagatgcccggcttccctatggagtactttatccggaatgtaaaagaaaacctgcgaacaccggagccaagggcttcccttaggatcgtccctgcgtcaccagatgcagaagcaggggtgatcggagcagctctcaatgcatacactgcactacagtaacagttttttgttgaatgtgaataaattcaaatgcaattaattgtaacattcgacaaaatggccaaatgaatttaaaagtttgttgacattattaattaaatgaattaagatataaacatcaaaggcaacgacatacaagatgccgtagcaaaaataaggagggtattttttatgagcaagaaggtattggcaacaatgttagcagcaacaatgttaatgggagctactgcttctacagtatcagcagcaggcttcacagctccggaaggtgttgatccatccgagtatcatctggcaatctgcatccattccatggataatgagtattgggcacaggaagctaagggcgctcagctggcagcagagtattacggagttgaggcagatatccttacctgcgacagcgatgacaacaagcagatccagggaatcaaggactatattgcacagtatggcgacaaggcaatcttcgtagttgacccttcttctacagcaaacacagtaaatattgctgagacatgtgaagatgcaggcgtttatgtatctatccttgcacacagggctgagggcctttatccggcagattatcctcactttgtagcatctctgatgctggatgatatggcaatcggtaaagctaccgcatctgcactgttcgaggctatcggtggtgaaggccaggttgcagagcttcagggacttcttggtgatgactccgctaccaacagacatgcagcatttgaggaagcattaaaagattatccggacatcgaagtagttgacagccagacagcaagctggagccagtcagacgctatggcacttgtagagaactggatcgttaattatccggatctgaaaggtatcttctctgcaaacgatacaatggcacttggtgctgttgaagctcttaagaacgctggaaagaacggtgagatcaaagtcagcggatgtgacggtatcgaagcagctcttaacgcagttaaagacggtgatcttgttatcacaaatgcaaacgatggatattgcatcgctggttatggcgcatcttacgcaatccaggcagctcttggcagccttgacgtagagggtatggatcctgcagaacgtctgatcttctgcaagactacacttgtaacagctgacaacgcagatgacattatctccaaattcatcgagactcaggatcctggatatgattattcagaccttagcttctgcatcgacaagtatcaggaagatggtgcagcagcagacgaagcagcagaataaataatcaagctgcccgggagagtttcggcagcaagataggattatgacaagagaggcgaaatgcatgccgcatttcgcctcatctgttaaaaactggatgtgaggatgttctatgaataataaacggcgtgacttaataaagaaaatgacagttagtcagcagttcgttacccaggcagaagacaatgcaaaaatggataaggtcagaagatatgctcctctgatcctgctggttatcatgactgcgatcggaggcatttcccagaaaaactttttctcctgggcgaacattgtaaatattatgttccagatgtctattccgctggtaatttccgttggtctgagctttgtccttcttcttggaagcattgacctttccattgaaggaaatatgggctttgccggatctttagttgcttttcttgttgttaataattcaaattcaaataatttcggtattttcggtgtgcttattgctattctgatcgggctggcagtgggtacagtagttggattccttcatacaaaaggaaggatcgcaagctttattgtttcttatgcagttggttgtattatgacaggcgcagcagtgttgatctacagaggtacaccaattcaggttaaggatcctatgtttattgctatttctcagggaaggcttttcgggattccatacattacattgatttcatttgctgtgtttatcataggagcgatcattatgaactatactgcattcggtcgtgcagtatttgcaatcggtgacaatgaagcggcagcagcttctacagggattaatattacacgtaccaagatcaaggtgtacgctttatgcggatgtacagcagccatcgcaggtgtacttcagtgtatgagattaaagcttggacagtctaaccttggattgaaccagatgttcccggttgttacagctatcgtacttggcggtggttccgtaagcggtggtaagggcggttcccttcagacctttgtaggtgtgctgatctatacggagctggcaaattggctgaccctgatgggcgttgatacaaaccttaaaaaggtcatccagggtattatcattattatcgctgttacgcttacagtagagcataacagaaagactgtagtgaagtaaacggagggatacatatgggtgaagttttatttgaaacaaaaggcgttggcaaaacatatggatccaatactgttttgcatgatattgatatgaagatccacagcggcgaggtgatcggcctgatcggtgagaacggagccggtaaatctactctgatgaagctgatcagtggtgttgagactccttccatgggagagatgttttacatgggtaagccttatgtagcaacatccattatcaatgcgaataagcagggcattggaatggtattccaggagcagtccctggtagcaaatcttacagttgcccagaacatttacctgggccgtgagaaaaagtactccaaagcaggacttgtaaattgggcagaaatgaacaaggatgcaaagaaagcgctggagcgtgtagacattaaactggaacctggtaaaaaggtccgtgatattgatatggcaaccagagagatggttgagatcgcaaaggtgctggatgttgtaacagaagcagcagaaggacatgcgatcatccttcttgatgagcctactaccgtgctttctgatgatgagatccaggagatgtatgtacagatccggaagatgaaggcagcaggaaatggtattgtatttatttcccatcatctggatgagattcttgcgatcacagatacgatctatgtatttaaggatggtgaggaaacagctgtttttcctactgctgaagcgaatattgatgttctgtatgagaagatggtaggaagagcgactacaggagagttttatgtggaggcacagcagagcgtgccatcagataaagtggttcttgaggtagatgatttaagtctttttggtgtatttaaccacatttcctttaaacttcatgagggagaagtgcttggacttgcaggtctggacggatccggcgcagaggatgtatgtaactgtctggtgggacaggtagcacctacagaaggccgtatcctgatggaaggaaaagaagtcagatttggcaattcctatcaggcaaggaaggcagggatcctttcagtacctaaggatcgaagagatgaaggaatggtcagcattctttctattgaagacaatattaccatatccagctgggagcatatgaagagcaaaggcttcctgtccggtaagaagatccgtcagacagcgcagaaatggatcaaggaggcaggtataaagtgtactagccctaaggaacgtatttcacagctttccggcggtaatgcacagaaagttatttttgcaagggttcttgaaagtggctgtaaggtgctgatcctgaatcatcctaccagaggtgtggatgtaggtgcaaaacaggagatttaccgtctggtacgtgagatgacagctgccggtcatgcgatcattgtaattggtgatactctggatgaatgtcttggtttatccagtaatgttattgttttcagagacggtctgatcagcggatcctttgactgccctgtagacttcaaaccttcccagcaggaagttgtacattttatgatgtaggagggcagaagagaaatgaagcagaaaaaattcagtttatccaatttatcacagtacatggtagttatcagtattgtgctggtattccttgtatttacaattttaaatcctacctttatcagtgcatacagccttcagaaccttctggttgaggtttctccgctgatcctgctggcaggaggcctgtcatttatcatctttacaggtggtattgatctgggatccggtgccatggtatctgctacctgcgttatttcaggtctttatgtaagccgtttcggcaactggatcatccctatcatggtggtgatcggtgtgttccttggcatgttgaatggtgtgatcgtaacaaaattaaagattccgtcctttatcgtaactctttgtactcagaacttatgggcatttattgctttgtatttctgccccaatggttctgtggcagtaggaatggaatatagaaaagaaattacctggatgacaagtaagattgcagggatccccattattttcttatttgcagtagttgtagtgatcctgctctatattttccagcagtatacaccatccggaagggcgatctttgcagtaggcgccaatatccgttctaccaggcttgcaggtgtggatacagataaagcacagatcatggcttttgtggtcagcggtgcatgcagctctctggcaggtgcgctttatgcatacaaacagaaatcagcggtgcctaccatcggtgatgcacttacactttcagccattgcttccatagcacttggtggaacatccatggcaggcggccgtggaagcgtgctccgtacaacgattggtgttattaccatcactgcaattacatcaggacttaacatgatgggagtagatcctctctggaaagatattattattggtgtcatcctgatcgtagccgtatatctgaattcagatactaaaggcagagatattattgtaaaataattttcttaaaagagcaggagaagtcttttctcctgctctttgcttcagcaataggaaattactttgtaatgcggttattacacaaataacatttcagcagacaggaaaatacttttgattttgagacatcggaggaattgcaatgaagaaaaaagttcggttttgtatcatttgcgctatgacagtatcgttatttggaactgtgcaggttccggcagcagggaaggcaaaggaagggcaggaagaacagcgacagcaggatgattcagaatcaaaggcatcttatctttcacagtttgatgcaggatcctatgtggagctggcagattacagttccatcccggtggaggccaatgaaggggataccagcgggatcgagaatgatataggagattacctgctgaagaacagtacctttgttaaagaacttcccactccttttgtgaaccggaatacttccactttaaaggatcagctgcagaattatgcagatacgtataagatgtcgctggctgattttatgaaatattatgattcaagtctgacagaggatacttatgaagaatatattcaaaagctgggggctgattacagtaaaaagctggttgccatgcaggcgatcgcagatgcggaagatctggctgttacagatgaagaacttaaggagcagatcaagacacaggcggaggcagcaggcttttcggatgtagatgaatacaagtctgcagcgaagatggatccggaagaattacgggaagtgatgatgagcactaaggtatttgaatttcttgaaggaaaggttacttttaataaaaagtaagggatagatcttgaaaattacaggacgcttgttgtagataccaatagtgttgaaatagaaataatagaaaaataggagattagttatgaactatttcatgggtattgatctgggaacatccagtacaaaaacactgatcatggatgaaaatggaaaaacagcagggataggaaatgccagttacgggatacagatcccgcagatttcttatgcggaacaggatccgctggaatggtgggaggctgttaaaaagtccattcaaaaagctttgcaggaggccgggctccagggccgggacatagctgggattggtttttccggacagatgcatggaatggtggcactggatgagaacaaacagctggcatgtaatgcaatcatccatcttgatcagagaagcagtgtagatcttaaggaaatccgtgctcttgccggggatctgatgacagaggaacttttgaaccagccaagtgcagggatgatgatcagcagtctgtactggctgaaaaagcatcagaaggaaacctatgacaggatccggtatgttatgtctccaaaggattatatcagcttccgtctttgtggagaaatcagcacagaatacacagatgcaggggctgcactgggattttctgtaaagaattatcattggtgtacagaattattcaaacgtctgaatctaaaagaagatatctggccgtctgtgcataaaagctatgaaattgcaggacatgtgacagcaaaggctgcagaggagaccgggctttctaccagcacgaaggtgatctgcggtgctggggacagtatggctgcccttacaggcaatgggattattgaaaaagggtttattacctgcaatatcggtacctcttcccagttggcggtggttgtggataggccgatttttgatcctcaaatgcggatccagacatggtgtcatacagttccaaagcgctgggttgttcaaagcggtacgctgaacggcggaagtgtattaagctggctgcggaataatatgttgaaaacggatcagagctttgcaaagcttgatcaggaagccggacttacgcctgcaggagcggatggcttatatttcctcccttatctggcaggtgaaaggacaccttataatgatccttatgcaaaaggtgttttctttggattgagcatgatgcatcagcagggacatctggtacgttctgctatggaagggattttgtttaatctgaaagaatgcctgtatatcctggatgaaatgaaggtggacagatccaggctgatcgcatccggaggggctgcaagaggagtgacctggaagcagatccaggcggatgtgctgaatatgccggtatattccacaaatgtgaaggaagaagcctgccagggagcagcgatccttgcggctgtgggagtgggattttttaaagatattaaggagggctgccaggcagctgtgaccatgagcccggaggttgtggagccaatccctgaaaatgtaaaaatatataatgaaaaacaggagattttccatgatctgtattacagcgtgaaagagctgtatccacggatcaggtaatacacgaagaattattgacacttaatgtgaaaggcggtatatgagatgatggatttatattctatcggagaaatggtgatcgatatgatacctggaagcgagcctgccagttatcttcgcagggccgggggagctcctgccaatgtagccattgcagtggtgaaaaacggattaaaggcttcccttacctgtaaggtgggaaatgatgattttggacgttttctcatggatacactgaaagaaaatcatgtgaaacagaatgtgccggagcttacagatcaggcgattaccaccattgcgtttgttacgcttcaggaggatggggaacgaacctttactttcgccagaaagccaggggcagatatgctgctttctccggatgaagtaaaagaatcggatattgcagattctgtgatcatacatgcaggttcctgttctttatcagcaagtcctgtggcagaagctacaatcaaagctttgaaaacaggtcatgatcttggaaaactggtatcctttgatgtgaattaccgcaatcttatgtggaatgatgatcagcaggcatgtgcagatgcagtaaaggctatacttccgtatgtggatatcctgaagatttcagaggaagaagtggaaatgctgggtggacaggagcatattcaggatctgatgaaagaaaaccagatcgcaatggtagtggaaaccctgggctctgagggagcttgtgcatatctgggagaggaagtgatccatgtagcaggccgaaaggtaaaggctgtggatgctaccggtgcaggggatgctttctggggcgcatttctctcttctcttcgtattcagggagtggaaaagaatacagacctgagtgcacagatcgttaaaaatgctatggaatatggtaacatttccggctgcatctgcgtacagagtaaaggtgccattgattcccttccaaccagggaaactatcgaagcttatatcagggaaaataaataacaggattacagaactggttcgtggctgtttcgtacccttacagttacaacggttcatcaaataaattcaggagggaaacctaatgtcagtttgggaagaaaaatgtattatatcaccgtctctgatctgtctggatatgtgtaatctggaaagccagatccgtattcttgagcagtcagggatccaggtgcttcatgtggatattctggacggccatttcagtccaagcatgcctttggggctggatacagtaaggcagctgcgccagaaaacagatatgttttttgactgtcatgtgatggtggagaatcaggacttttttgtggatgagcttctggatataggagtgcagcagatcgtattccatgcagagacacagccgcatattgacggcatgatcaaccggatccatgcgaaaggtgtaaaggcaggaattgcactgaaaccgtccacacctttatctaccgtagaatatgtattggataaatgcgacagtgtgcttttgatgctgatcaatccgggctacgctttcctgaaaggggaaaagcaggtggcttatgcagacaggaagatccgccagctgcgccagatgatcaatgaaagagggcttgataccaagatcgagttggatggacgtatttcaccggataatatccgtacctatggaaaggatttggcagatgtttttgtaacaggtacaacctgtctggatcgaaatgatctttcaggaagctttgccagattagagcagctccgcagagaaatcttatgatgtcagacttaaaagacccggtctaacataagccgactctgatcagtggataaattttataacataaaagagagggaacaagatgggattcaaagaggattatgaaaaaacctgtaaagaggtttttacagaattggaaaaaaccatggccagcattgataccgctgcactggaacgattgacagaggacattttaaacgcagaccaggtattttttgtgggagttggccgtgtgatgctggctcttcaatgcgtatgcaaaaggctggcacatttgggaatcaaagctcattatgttggtgagattacagaaccggctatcacgaagaaggatcttctgatcgttggctcaggctccggcggctcgctttttccgcttgggattgccaaaaaggcaagaaaaaccgtggattgcaagattgtacatattggctctaacccaaacagcgagatgaaagagattgcagattatatggtaaggatcccggtacgtacaaagctgtatctggaagatgaaatcgattcctgtcagatcatgacttccctgtttgaacagtgtgtactgcttcttggggatattctggcaaagatgatcgtggaaagccgtaatattgatatgaaggctctctggcagtatcatgcaaatcttgagtaaccgatcggttccgggaggtacaaaatgaaaaaagagaacttaatgaaatatgtaggcagcatgcagcaggttgcttatgtacgtcctatcacatatacagaaggcagaagtcatgggctttctgcttatgagatcaaaaatgggtgtatggaactgcaggtaatggcagataaagccttggatgtaaaccagttaagctataaaggaatcaatattaatttcctttccaagccagggctgcaggggagaaatcaatatgatacaaatggggatgaggcgatccgttccattatgggagggctgttttttacctctggtattgagagtatttgtgcaccatgtaccattgatcatgtggattatcctatgcatggccgtatgcgtaccacaccggcagagcatcttggggcggacgcttactgggaagatggccagtacaagctgttggtaaaaggtgaaatgcgggaagcggcactttttggggaaaatatggttctacggagaagtatttccaccacatatggaagcaaaacctttactgttacagatgaatttgaaaatgaaggctacagagatgagccattaatgcttctttatcatattaatatgggatacccgttcctggatgagaataccaggctttatatccctactgcaaaggtgactgcccgtgataaagatggggaaggacacgaagcagattatgataaaatggatcctccaaaggacaatgaaccggagtatgtatttatccatgatatgcagtcagatgcgaatggtgataccaaagtcctggtggtgaatgagtctcttggcattggccttcgcatttcttacaatatgaaatatctgccatactttatggaatggaagtctaccgcatccggagactatgtgatcggtctggagcctgccaattccagtgtatatggcagaccttaccatgaagaaagaggtacagtccataagctggcgccgtttgcaaaagaaaagaatgtgttggattttaccattcttgacggtcaggcagagatccagaaagcaatccgggagtttcaaaagattcagcaaggtgttttggattaatttagcataataaatattgaaaaggagagatataactatgaaacggtctgaaattaatgcaacaatcaagaaaatggaagctttattagatgagtgcagatttaaactgccgccttacctttattttacaccggaagaatgggcagataaaaatcacgaatatgatgagatccgtgagtgtgagcttggctgggatgtaacagattacggcgaagggaaatttgatacactgggtctggctcttatcactatccgtaacggaaatatccacaatcctaaatatccgaaaacctatgctgagaagatcatgatgtgtgacagcggacaggtttcccctatgcattatcatgagaataaaagagaggatatcatcaaccgtggtggaaacgatgttgtctttactttctacaatgcagatcagtcaaaggttcatcgtacagaggatggaagaaacatttacgaaaaggatctggtaaatgatgtgcttatttacagagacggtcgtcagtataaagtaaaagcaggagagccggtaaggatccataatggggaatccattacactggtaccgttccagtatcatgaatttgttattccagagggtggtccagccctgatcggagaagtttctatggttaatgacgaccatacagacaatttcttctatgagccactgggaagattcccaaccatcgaggaggatgagcctgcatacagattgctttgcacagaatatcctgctgcaaaagactgatagaaacagactaatagaaacagacaggtttgaataggataaagtaagtatcattctgaaaagagaaaagtatggcagaccagaaaattgacaatcttctcaatcttgctatggaagctgcttcagaagagcggatcaagtcaaagaacctgaatgtaggatatgatcctgagaaaaaattatgggacgtgatcgtaaagtacagtggttcccagagtggactggcaggagagcagatccaggcagtccctcttctgggaggctatgcagttgtaaccttgccggaatcagaaatagacagttattcccacagggaacagatcgaatttattgaaaagcctaaacagttatattttgaaacatttcagggaaaggaagccagttgtatcctgcctttgcaaaatggagtaagcgggcttacaggaagaggagttttggtgggaatcgtagattcgggcattgacttttttcacccggattttagaacagaggatggcagcagccggatcctcaggctgtgggaccaaagcattcctggcaatcctccggagggttatgttatcggaacagaatatacgaaagaagaaatcaataaggcgcttgcactaggtgaaatccagggcaggcgccttgttccgtccagagattacactggccatggcactgcagtgcttggaatcgcagcagggaatggcagggcatcacagggagccaatcgtggaatcgcttatgaaagtgatcttctggttgtgagaatgaaaaatgcaggcaaaaattcctttcccagaacaacagagctgatggaaggggtagattatctgatccgccagtccatccgtcttggaaaacctattgtagtgaatatcagttttggaaacaattatggatcgcatgaaccttataattaagggaaaacataagaaaacactgatatttcctgtgttttcaggcgattcagtgctttactcggattcatgtttggttgtcatttgggtcttataatactcggtcaggatcatgttaatctgctgggaacgtgtacgatagttcgctttcgcatccttatcaatctcagcaaccagttctttggacaaagtagtatagacctgaatattgttggaactgatagccatgtggcacctccgattcaatttaatagaattattctatcatacttcttcgggaggggcaatgtgaactgaaaattgaagaattattgttactgtaaaat

SEQ ID NO: 23 - DNA, 2588 bp, Unknown
  gut microbiota DNA sequence
tattacagtgctatgcttggactgatagatggcctgaaaagcggcactaccacattttttgatcatcaggcaagtccgaatgccacagatggggttctggatatcctggaaaaagcggtaagacaggcaggtgcaagagcatgtctgtcctatgaggtttcggatcgggacggaacagagcacagagacagtgggatccgggaaaatgaacgatttatcaaaaagacccaaaatgcagaggatccgcagatttcagcattgtttggcatgcatgcaggatattctctttccagggaaaccctggagcagtgtgcacagactggcaaggaactggattgtggctttcatgtacatattgcagagtctgaagcggatgtggcagaaagctatcgtctttatgatatgcatgtaatggagcggatgtataaggctgggatactgggagaacagaccattgccgcacattgtgtccatctgggaccggaacagtgggagcttctgcaaaaaacaggcacaaccgctgcttataatgtacagtccaataccaataatgcagtagggatctgcccggcagtatccatgttggatcatggggttaatgtggcgcttggcggagatggttatacatacgatctttatcaggaacttggatttggagtgatcatgcagcggatcagggaaaaggatcctcgtgttttttcaggggaacagatccgcaggtttgcctttgaaaaccctggaaaccttgggaaaaggctgtttggtgtacagcttggcatgctggagcctggtgcggcagcagatattgttctggtggattatcaggaaccaacacccataacaggcagtaatttcctgtcgcatatgacctctgcattcagcggaaaagtgacagatgtgatcgtaaatggaaaaacggttgtgagagacaggcactgtacccagattgatgaagaaaagattttggcagaatgcaaggtacaggcagaccagctctggaaaagtcttgactgaacataacaaatgtgtcccacgaaaatgaaggggcattcctgaaaggtgatcaatgaaaaaaagtaaattatatgagatacaggatgtggcgatccagattgccaatacattggcaaccatgctgcaggtagatgtggagatcattgattctgcacatatgagggtggcggcaaccgggcattttgcctgccgtgtgaatcaatccaatgtgggagatggccatgcttaccgggacacacttgagacaggaaagaaaatgtttattgataatccgggacagaatccttactgcgtgggctgtaaggaaatagatacctgtgatgcgcttcttgaagtgtctgcaccgattattgtggatgaccggatcgaaggagccatcggaatgacctgctacaaagaagacagggaacagtttatggcggagcatttgcaggaatctatgttttttctggaacaaatgtgcatgctggtggcaggaaagatcaaggaacgtaccaatctgcagaagcatctttctgcaagcaggatgctgcatgccatgatgggtatggtagacaagggcgtgctgatcctggatcaggagggcaagttgctggaatacaacgggattgctgcaaaagaactgaagctggatcctggaatcgtcggtcagcctgtgaatatcatcctgactggggatgtgatgatggaaaaaagggaatataaggtggtgatcggaagcactgttaccactgtagtaggctgggaagagcattttgaggattcagatgatgcatatggccttgttctggtttttgacagtatccggtattacagggatcaggtgtataacatggcttaccatgtagtgcctcacgacatccgttatattatcggtcattcggaatatacagtccgtatcaaaaaagagatcaatcaggcggcagcccataatggacctgtgctgatcgaaggtgaagaaggtacagggaaaaagaccataggaacggctatctggaaggccagccaaagagcggaaaagccttttgtatattttaactgtgcaagcgtagaggaaggtcttttggaagaacggttatttggtgccaccgggcaggataaggccggtatgggatccgattatcagggaaccatgggtgtgatggagatggcaaatgacgggatcctgtatctggacgagatcgatgaaatgcctatgttttatcaggcgaagctggagcagttccttgatgaaaaatatatccaaagaaaaggctcctttcagaagatccctgtaaatgtgcggctgatctgtgcaaccaaaaagaatcttcttcgtctgacagaaaagaataagttccgtaaaccattgtattatagtatctgtattaaccggatcactgcgtatcctcttcggaaaagaaaggaggacattccggaactggtgaatttttatattgatcagtttactcagagatacaggatctattatcggcagatagatgaagaaacactgcagtttctctgcagctgcaactggaaggggaacattacggaactggagaaaactattgaatatatggtaaatgcccttc

SEQ ID NO: 24 - DNA, 11212 bp, Unknown
  gut microbiota DNA sequence
cctggtatcgtgatacataaaaacgaacaaatattcgaacataaaattgtagaatattgacaaaataaacaaatgttcgaaaaagaagaatttatgccgttttattgtactgaatatgtgatatactctcaataaatagaaaatatgttctgaaaatatgttcggaaattaagcgaaataaggggagagagtatatgtggggatcagagaaaagtacaggcagacgggagatggcatttgcacaggggacagtttccggtatgaccaggaagtccggtgcacacagaaagggagagaagctttccaggaatatggctatgtttctcggtattattttgactgcggagattatgatcgcaggggccatggtatttaattttgattttaagggcgcagatgttattgccctgatatttgcatttatggtattatattctggagttgtggcaatgctcacagataagtaggagatgtgtagatgccgaagtcatttcatcaaaagatcaaaatattatatttaatgcaggcatttttagaacgtacagacaaagagcatccgatgacaatgaaggatctgcaggcatatctggccaatgcagggatcagtgcagagcgcaagaccgtttatgacgatatagagaatctgcgggtgtttggcttggatatagtgaatcgaagggagaaaccttccggtttttatctggcacacagagaatttgaactggcagagcttaagcttttggtagatgcggtacagtcctccaagtttattacttcagggaagtccagacagctgatcagaaagctggaaggtctggccagtgtacaccaggcaagggaactgcagagacaggtctgggtagagaacagggttaagtccatgaatgaaagtatctatcataatattgatcagatccatcaggcgatatccagtgaccgtcagatctgttttcagtattgtgagtggacattatccaagcaattaagcctgaagcgtaatggggaaagatacaggatcagtccctggaagatgatctggaaagatgagaattattatctgatcggacttgatgagaagagcgggatcgtgaagcattatcgggttgataagatgctgaagatatcgctggaggcagaagcgcgcaacggtagagaattttttgaaagctttgatgaggccagatttgcagcaggtacattcggtatgtttggaggccgggaagaggcagtggggctgaagtttgaaaatcgtctggtaggggtggtgattgaccatttcgggcagtccacgatgatcattggtaaagatgagaatcatttttccataaaggttcgtgtgaatgtaagcgggcagttttttggctggctggcaggtcttggggcaggtgtggagatcatatcccctgagaatgtacgttgtgagtacagagactatctgaagaaggcactggctcattatgaaggataacaggatgacagtaaaatcgcgattattagaaattttagaacagcataaaggggaagttttgtctggtgaacatctggctcaggaactgaactgtacaagggcagcgatttggaaaggcgttaagtccctgcgggaagaaggacacaggatccaggctggacctaataagggatatatgttagaagcagacagcaaccggctgtctgtagaggggctgaagctttatctggatcatccagatgtgatggtacgattgtacgacagcgtcccatccactaatcaggcagccaagctggcagcagtcagtggagatgctggtcatggctcgctggtagctgccctggagcagacagagggcagaggcagacgaggcaggagtttttgctcacccagggaagctgggttatatttcagtgttgtacttcatccgggtgagtctctgcaggagagccttttgatcactactgcggcagcagttgctgtttacaaggctgttcttgaagtatgcggcatatctcttggaattaaatgggtcaatgatctgttcaaagacggaaaaaaggtttgcggtatacttacagaggcaatgacagattttgaaagtgggaatattgagtctgctattgtggggattggtctgaatctgtttcccggagaagaaattccagaggaactggaaaatattgccggagcgttgtatgatacagaggaagaggctggcagagcagacaggaacaggctgatggcacagatcgtaaatcatctgctgaaggaaaccgaggatctatccctttcgcaggtgtatatacagcagaattttattttgggaagggaaatacagattcaggattctggaaatcttcggaaagctactgcgatggccatatgcccggatggcagacttctagtgaaggaggctgacgggagtgagagcaagctgtcttacggagaagtatcagtagtcctgccggaaggatagatagccagacaaaagtggaggatacagtagatgacagagacacagagactatattatgaagacgtatatatcagggaatttcaggcacaggtgttggcgtgtcaggctgcagggaaaggatatgcgattctgcttgacagaagtgctttttacccagagggaggcggacagcccagtgatcagggagttcttgattcagtgaaggtgacagaagtccatgagaaggatggagaactgcttcactatacagatgcaccattggaaccaggaacgcaggtcacaggaaggatcaactggcagcgcagatttgatctgatgcagcagcattccggagagcatatggttagcggtctggtacatcaggcatatggatatgacaatgtaggctttcatatgggcagtgatgtgattactgtagattttaacggtatacttacagaggctcagattcgtgagatagaacagcaggtaaatcaaaaaatctgggagaatgctgcagttgagattttctatccggacaaagatgcactggaaacactggattacagaagcaagaaggagcttaacggacaggtaaggatcgtgcgcttccctggtgtggatacttgtgcatgctgtggcacacatgtggcatataccggagagattggcatggtgaagctgctttctgtagagaagtttcgggaaggagtgcgtatggagatgatctgcggccaccgtgtactggattatctgaataaggtggatgaccagaatcatcagatttccatgcgtttgtctgccaaaagtgaccggactgcgcaggcagtagaacggctgcaggaagagaatttttctctgaaaggccgtgtgcagtctctggaagaggggatgtttgctgcagaggcaaataaatgggcaggtaaaggcaatgtacttctgttccagcagaatatggaggctgatagtttgagaaagctgacagatgcagtgatgcagacctgtggaggacgatgtgcagtcttttcatccaatgcagatggcagctgcaaatatgctatgggagaaaaggccggggatctgcgccagttgacaaagaatatgaataatgccctgaatggcagaggtggcggtaagccattctttgtacaaggctctgtccaggcaggagaggatcagatccgtgagtttttcaggaaactgtaaggagaggacagatgtttggagaatgtcatgcacatctgattatggatggcctgaattaccgcagggcagtggatctgcatgcggatggggtaaaggataaagttatacagagccgatttcggctgtatcaggaactggggattctgtttgtccgtgatggtggagatgcagggatggtatccaaaagggcgaaggaattgtcaggagaatacgggattgattataggacaccggtatttgctattcataggaatggccattatggtgggattgtgggctgcggatttgatacattaagagaatatcatcagaaggtgatggatgccaaggctctgggagcggactttattaagattatgactaccgggattctggattttaacgatcatgggaagattaccggccagccgctggataaagaagaagtaaaagaaatggttcatatcgcccatgaagagggatttgcagtgatgagccatacaaatggagattacggagttcaagcggccattgaggccggggcagacagtgtggagcatgggaattatataagtgaagaaacgatttccatgctggcggatagcaataccgtgtgggtgcctactcttgttactgtgcgcaatcttatgggcagcggcagatatgacagccagatccttgccaggattgcagcacagggagaagagaacctgcgcctggcctatcgggcaggcgtgaaagtggcactgggaagtgatggcggtgcttatatggttccgcatggatggggacttatggacgaataccatgcatttctggatatccttggaactttggcgaaggtagcggagatagatgactggcttacaaagggagagaaagagatccgtgagagatttaaaagggacgcctgacatcaggcgtcctggatttttatagaagtataaatgttggattctctggaaagagcagggtcaaaggtaatgttgatgccagcacctaaagcgaggccggaagtggaagtgttttgagcattttcagtcaggcaggtgactaccgcaccgtctccggtctggatggtaacagtattggcagttgtaccaaggattgtgccggatacagtaaagttcatctgatgctggctcatgttatccgggttgtctccggatactgaactgactgagatcccttccagggattcgccagagaaatcttcccctgtgtaataaacagaaacccctgagccaggagcgattccacctgggaaataacagggcatctgagacagatccagatctacgctggtactggaggtattgggcagtacctgaagtacattattggaaatactctggatcacaccacggaactgtttggaaacagtggatggatccggttctgtctgatcatcagatggttctggggtaggggtgggatccggaagctggataggatctatgtcagagatactgactacttttacatggctggcatcaagtacattggaagcatcatccccagattttccgaattttcccttgaaatgtacatatacccagttaccggcagcaatgccattctggtaatattgctgggtacctgtgataggatacgtagctgtctttccgtttttggcttttatggtaatggtattaggggtaaggctgacgatggcacagtgcgcagtccgatctttcagttcttctgttttatggaattcatctactacctttaaggcttttactgtactggtatcgctgcctgtatcagaaagctgtccctcatagatcacgctgatctcatcgccggaaaccataccgtcagagcattccagagtggcctgagatacatcaaagatataggtctgttcttctgtttttaatgtcagctgactgcctgtaaaatcctgaagcattccggtgacttcgtccatataaatccgaggtttgtcagaaacattttctgaagctgtatcaggatcctgatgatagatatatttttcaaccaaatctccggcagtgcagcctgcagcagtaacagtacagcatatgcaaagacagagacaacttaattttttcatggaaaccctccaatgaagcagtggaccattgctgtgaacatgaaatccttataaaaaataataaatccgttaatattataacaaaaacatattgaaatttccagatattgtgatataatccgattaaataaataatagcgaagtaggaatttatgcgttaagtgttcattggctggggagtcgccgtgaaacgaaaagcatgcgaaaggctgcttacgatatattttccgcacccgttgctacatatgagaacatctcataatgtggagggattattatttatggtaactactctattatcaaaaacattatggaggtgtttttattatgcagaaaaagcaaacatggaacgtaaaaacattggtatttatggcacttcttgttgccatgcatctggtacttaccagagttctggtaattgacctgggagcatatcgcatttcagtaggaagtgtatgtacgattctggcaggattatggcttggaccagtagcaggcggtgtatgtggatttgcttccgatattatcggatgttttatgaaaggatatgctgtgaacccatttattactgttgctgcaattctctggggcgtgcttccggcgctggtaagacctcttattgcaaacaaaaagaaaaccggtaagactgtagggatctgtgtgtccattgttgtgactgcgattctcagttctcttgtacttacaactgccggattggtaatcatgttaggatataacttctatgcgatcatgccgggaagactgatccagtttgcaattatgataccgatttactgtgtacttacctgcctgttgtatttcagtccgctgacagctatggttgcaggcgatgtggctcaagcagtaatgaaaaagaaaaccgtttaataatacagctacacaaatgccgaaattattcggctgctgaactataacgattccccaaaataagatgccgatacaggatcctttccacagtataaactgttggatcgatcaggtatcggctttttgtatgcgctaaaacgactttgtttatttggatgtgactggctggacacggaaccaataagtatatatatattgaaaaccaagggatgtatacaatgctctggcaggatcattatcttttacaacctgaagataagcattcttggctccgcgttgctgtccttcggcaagaagaccggtacagatctgtctggcataccccctatggcgaaattcttctttcacatgaatggcgtagatgccaatgtaatcccggtccagaatgccaagtccggtagcgatgatctttccgttgtcccagatggaggcacagatcgtatcctttacaatagagtgatacatggaaggaacaactgcacggtggataggatttgcagttcctttcaagtcaaaaagactttcaatccagacatccggaatatcgtctgtaaaatttacttggctataaggataacttaagtctgctgtggaagaaaggtctgttaccataacgtctgtggtatgctgaatctcatatccgcgattttcaagaacataatcaaaatcaggggaaaccaggggactgatcttaaaaatcgccgggctgccaagacggctgtactcattttcacagaaagagactttttccctccaggataacgtagaagtgccgaattgttccacactgttggttcggtgtgtataaaaataggaaaaacggaggatccatccgtcataaagttccattttgtgggaaggccatgcatttaaagacatgtcttcgattttttttatactagtgttcataaatatatcattccaatcttttttttaatccctgtgtatttgcgctgctgtgtcatacagcgtatcacataattttgatgcaatcaggtgatgaccggtacaggtcagatgtatgccgtctgtagtgagctggtcaataccgtatcgcagggccgcctggttcagttcatcctgcaggagaatgtaagtaagctgtcgtgtgtgcgctatttcctggatcatggaagacatttgacggacatagggaatccacagacggtaatgggcaggccatggaaaaacaaatggctccataagaatgatctgccggtggggtgaatacagctgctctaacagctggtcataatctctggaaaaacgattcatcatctgttcctgcaaggcggatgtacggcatgtgttcatcattagaccaatgtcattaatcccaatcagaatggtaataatctctggcttcagcgctaggtaagaattcgtattctgcaacagccgggaaatggtaaatccgtcaatgcctttgttaatgatctgaagatcaggggaaaatggggataactgatcccataattgttttacataaccgtttcccaggggcggagtctgtaaaatccgtccgcaatctgtaatactgtctccaagacaaagtaaagtagtcattatatgtcactttctgtcaatgatgtaaaagaatatctgcaactgtgaatgggttgaacagtcgggaagatgcactagtggtacaataagcggaaaatcttataagccgcaggcactgcttttattataaccgttaataaagatagtggaaagagcaaatttaaagtatatgaaggaattaaaaatatgccaattaaaaatatgtgaaagaatttgaagtatatgacgaaatgaaaaatatgtgaaatggttcctgcagtttattgtttttttagaataaatacataaaaatatactggacaaatccaggatactgttctatactcttttcatcagcaggggcgaatcttagatctgctgatccgccggatatcttccggtatcgagaaccgtcagttcagacggtaattttcctattttacttaagaactttatatgagcatgtacacccgataagaaatctgaatcactcatgagaaacgaggtgatattcatgtttttctataccgggattccggtaatgatggcagctgccgctgtagtgatggatctgcgtaccgctagggtcgataatggttggatccttttctgcatggcagcaggcctggcaatgcggatcctggcaaatggaatcataggtgtattttggtattttactggcgccctgattcctgtcgtcctgcttgggtggctttttgtattccgtatgctgggacctggagatattaaactgctgtctgtgatcggaggaattcttggggcaggggaaatcgtgaaatgtattcttggagccatgttcattggcgctgccatttcagctgcactgcttatatctaacggcaatatctgccagcgattcctgtatctttggagttatatctgccagacggccagaaccggaaaaaggaagccctattaccaaaaggggatgttacctttggaaaattttcattttacagtaccggtatttttaagtgtactgctgtatgcaggaggtgtgtattgaaaaagaatgtttttgcagtgtgtgaccttgaggtggattatgctctgaattttatggaatatctgaatcagaagagaaatattccttttgagatccaggcatttactacagtggatagtctgactgcttatggggaaaaagtacatattgagttgctgttgatttccgggaaggcaatgtgccagagagtccgggaattggatattggaaagatcataattctgtcggaaggtgtacatccaccagaattagatcaatatccaagtgtgtacaagtaccagtcttcagccaatgtgatcagggaagtgatggcatgttatggagaagaaaaggcagttgagcccactgtttatcctgtattgaagaaatgtacacaggttctgggggtatattctccactgggtcgctgcctgaaaacatcctttgcacttacacttgggcaggtgctggccagagaaaaggcggttctttacctgaacctggaggagtattcaggttttggaaggttaatgggaaaggagtatgaccataatcttagtgatcttttatattatgtgcggcagggcagtcagaatctgatccaccggatgaatgggatgatacagacagtgaataatctggattatattccaccggtacagacaccggcagatatccgtgggacagcctgggaggactgggagcagctgatacgggaaatcgtcagggacagctcctatgagatcctgatcctggatataggatcgggcgtagatggtacattccagatgctggatttatgcagtcagatttatatgccggtgctggcagacagcatatctgtatgtaagctggaagaatttgaaaatcttctgaaggtctgggatttttcacaggtgctgtcaaagattataaaagtaaaaccgccttttcatatgggaaacagttccatggaaacttatacagaagggcttttatggagcgaacttggggattatgtaagaaaaatagtaaagaagaatgagaatgagcgatgacaaatttggcagattacggcagatgctcatggagaagctggacatgggccgggaattgtcagatgaagaaatcctggaagcaatcgatggactgatcctgactaacctgcgagattcatttactactttgaaggaaaaggtggaattgcgccaggaactattttactctgtgcgcaagctggatgttcttcaggaactgatcgaggatgagacagttactgagattatggtcaatggaccggattctgtatttgtggaacgagccggacgtttgaccaaatgggataaatctttcacatcaaaggagaagttggaggatgtgatccagcagatcgtaggaaaatgcaaccgtgtggtaaatgagtccatgcctattgtggatgcacggttggaaaatggctccagagtaaatgctgtgattcagcctgtggctttagatggacctattctgacgattcgacgttttcctgacaaaccggtgacaatggaaaagctgatcgcattgggtagtctgaccaaggaatgtgcggattttttaaacgcacttgtaagagccagatattctatcattattggcggtggtacaggaagtggaaaaaccacatttctgggggcattgtcggaatacattccggcagatgaaagaatcatcaccatagaggacagtgcagaattaaggcttcagggaattgacaatctggtacgtctggaggcgaagatggcaaatattaacggagccggggcagtgaccatccgggatctgatcaagacggctttgaggatgcgtcctgacaggattattgttggagaggtgagaggcggtgaagcggtggatatgctgcaggcgcttatatgtactatataacaattatatatataacgtatataaggatggaaaatatagattaaagggaaggcataggaacgatatgaacattaagtataggttattgtgtaaaaggttaatagaggaaaggaagagagtaggtgtcattcaatattataatgtactgttcataatggagttattgtcagataaagacat

SEQ ID NO: 25 - DNA, 24780 bp, Unknown
  gut microbiota DNA sequence
catccatttcctgctctgtcataaatttggcaaagcttgactttcttgtaccatcctttgcaatggcaatataagcaaggccctttgccccatagcccttcgcaaattctaccagcttgtcgatcttctttcttggcatttcgccctggccttctgcgttaataccgcgaacgctgccgccgttttcaagagcagaagtaaatacggaaaatccgcagtccttcacaatatcacttacatcatgaagttccattccaaaacgcatatccggcttgtcagatccgaaacgatccattgcctcctgccatgtgatccgttggatcggaagcttcacatccagatcaagtacctgtttaaacagataggaaagaaatctttcattcacatcgatcacatcatcaacatccacaaaagaaagctccatatcgatctgtgtaaattccggctggcggtccgcacgaagatcctcatcacggaaacatcttgcaatctgaatataacgatcatatcctgaacacattagcagctgcttgtaaagctgcggagactggggaaggccatagaagcttcccggatggatacgggacggaacaagataatctctggcaccctccggtgtgctctttccaagcattggtgtttcaatctccaaaaatccttcatttgcaaagaactgtctggtaagcatcattactttgctttttaacataagattcttctgaagatctggtcttctaagatccagatatctgtatttcagacgcacttcatcttttgtcttgctgttttcttctaccgggaaaggaggtacttctgattcagaaaggactcttaaggatcttacctgaacctccatggtaccggttgccaggtttgcatttactgcaccacctctttttgccactgttccaacaactgcgatcacatattcgctgcgcagctttccggcttttgcaaatccctcttcatcaatgatcccgttttcaaaaataagctgcatgatcccggaacggtcacgaaggtcaacaaatataataccacctttgtctcttgccttctgcacccatcccatcagggtcacttcactgccaatcatttcttcggtaacttctgcacatctgcatgttctgtgcagtccctgcatgctctcagccatgtctattattcctcctgcttattatctcttttccttgaagaactcaacaaactctgtatatccttcagttgtcatctggtccttctggaattttttattctttttcataatggaaatatttacctgcgttccttcttttctttcctggtcagcctgtgcaaaaatctgtgcaagacgatctgcaggcatgtttttctcaatcaggtatgctttctttgcaccctgtccaggaatctgatagcctctttccagaagcagcataacaattctctcaaatccaatagaaaaaccacaggcactggtattgctgcctgtaaacttaccgatcatctcatcataacggccgccaccgccaacgcttccgccgaattcatccatagcgatctcaaaaatcgggcctgtataataagacattccccttacaagagtaggatcaaaactcattttgaaatctgcagtctttacagagtcaacagtagaaataatggtttccagatcctctgccaccttaggatcaagcacatccttcagcttttcttttataaagcgaacgccttccacatcgtttgtgatctccttaaacattccaaggtaggtgtcaatgctttcttttgtgaagccttccttttccagttcctcagccactccatccagtccgatcttatccatcttatccaggatgataaataccgtatcaaaactatctgccggaaaaccactatactgtgccatagccttcaggatcttcctgtcattgatacggatagtaaaattgtggaaatccagtttgccaagaagggtggtggtagcaagcaccaactcaatctcagccatataagtagcctcacccagaatatcaatatcgcactgcataaactgacggaaacgacctctctgtggcctgtcagccctccatacatatcccatctgcaaagccttaaaaggagccggcagatcattggaattgttggaataataacgggaaaggggaagtgtcaggtcataacgaagtccggaatccaccagatctccttcttcctttgcactttccagcttcagcttttcgcctcttttcaggatcttaaagataagcttttcattctctccgccctgtttgctgcaaagattctcaatatgctccacgcagggagtctctatagatgtaaaaccaaaagatgcatatgtttcacggatgatgctggtcacataattccgtatttccatttccctgggaagaatatccttcatccctgttaccggtttcttctttaatgccatcgtgttcctccttatgaactacccgctgaaaagcgagaaaaatttccatgtcaaaattctttacttcatcgatcatcagtccaactactgtctttctgtcaaaagccctgcgatatggtctgtctgaacttaaagcacagaaaacatcacaaactctcaggatcctggctccaatgggaatctcttccccacatttattggatggatatccggtaccatcaaaattctcatgatgatacaaaatactttccagaataaaatcagaatacccctgatctttcagttcttcatatccaagtgcagaatgcattcgcacatatttcaattcctcgatcacaagaggattattttcctgtccattaatgtagctgcgcagtttcagcttaccaatgtcatgaagcacaccggccactgccagctggtaacactgatccttgggcagtccaacttcctttgcgactgcatacgccagattgcttactgcaatgccatgttttaattctgtagacaggtcaaattccagcagtctgtcctgtgaggcaggattcttctccttggttctgctcacgaatcctccctccaatcacgcagccatctggtaatcccggtctgttttctctggatcatttcgtcaatacgtgaaatataattggtaacatcttttacattttccacacgttcgatccgtctttcgtgatcaaaaaccagcttggaagaaccaccagcaccaagagcaataataggctgtttttcttccataatcagtatattgtaaattcctgctttgtcaaccttggcatagcctacattttcaaaatttcccttcatattcttctgtctgtacagataatacgggctcatttccatttcgtaggctgttttcatggtaagctccatgatttcctgattattctcaaaggtcatttcctgatactgatccctgaagatattcaaccttgctgcgcgttttactgcaagagaatgtacagtaagactgtccggatccagtgcctttacctgttccagtgtatactctaccatggcataatcctcgccaggaaggcctacgatcagatccatgttaatattgtcaaatccctgctctcttgccagttcaaatgccttctctgtatcttctacagaatgcttcctgccgatcagattcaaagtggtttgattcatagtctgtggatttacagaaatcctggtaacaggaaatctatgaatcgatgcaagtttttcttttgtaatgctatccggccggcctgcttccacagtaaattcaagaagtccatcatatccaaattgacggctcagacaatccagcagcctctccaactgataaggctccagtgtagtaggtgttcctccgccaatataaatcgtatccagcttcctgccaaggcttttcataaggctggccacagcttcagcttctttgcacagcgcatccagatattcgtcagttcttgatgcccaaagcttcaatggatacgagctgaaagaacaataaagacagatacttgggcaaaacggaatccctacataaaggctataccctttatcataatcaatatccttcaggatatctttttcccggttggcaatggcaacagccagtgctgttttcttagggctgaccagataccgatcccgcatctcctgtgctgtctgtacattggtaaggcctgtatccagcatccccatagccagctttaccggacggataccggtaagattcccccagggtaacgtgcgtcctgtcagcttaaccagcacatcctgataaagggcatatttcaggtggtctttattctccctgcggctttcactttctttaatactgatctgcccgctttttccttctccctcataccggatcagataacttccttctgcttttgaagacacaaacagcagatcacagaaatgcgtttcctctgcttcataagtcatacggatctctgcttccggataaaaagctttgatcagctcatatatatcatgttcaaaatctttatcaagaaaacaaatctctatcttatacaaaagggttgtacctcttttcataaccaatggtagttgatgtatcatgtcccggatataccaccgtatcttccggaagcgcatctaccagcctgtgcaggctttccacaatctgtgccgaactccctcccggaaaatccgtcctgcctacagaaccgtggaacagagtatctccggaaaaaagtacatcttcatctttaaaataatagcaacagctgccttttgtatgtcctggtgtaaagatcatctgaactttaaacccggctacttcaaaaacttccagatctgagggcattttgtcggccttcatggaaaccggtctgccataatactgagtcatattcacagatggctcccaaagcatctctgtctccagaggacaggcataaacagggatatcatatctgtctctcactgcttctgctgcagagatatggtcaaaatggccatgagtaagaaggacagctacaggagtcccttccatctgggctaccttttgaaagatccgctctggctgatctgccggatcaatgatcagcaattcttttgtctcctggtttaatgcgaaataacaatttgtacttaccggtcctaaaaccagctgttctacctttaatcttcccatgttgtcctttccaccttcgggtataaaaaatcagcctgtagtacgttccacatcgatcacgctgtcgatctggcgtatcttctcaatcagtgaattcagttcttctttactgctcacattaaaattcatggaaatcgtagccttttcctgcttgttagtacggctgttaatacttctcacatcgatcttacgctcagtaaagatcttggaaatgtctaccaaaagacctgtcctgttattggcatatacattgatctctgccatatactgctcggatgccctgttatcctgctgccattcagcctcgatcaggcggcttctgtccatctctgacatattcatcacattcacacagtctgtcctgtgaatggtgataccacggcctcttgtaacaaaacctacgatttcatctccagggatcggattacaacattttgaaaagcgcactgccacatcatgaatgcccttaaccacaataccgcttttccccttagctacatggattcgctccggtgcttcctgtgcagcctccaagacctgctcgtctgtaagattctttttgttttctttatcataagcttctgccagcttattaaaaacctgcccttctttcagacctccatgtccgatggccgccagcacggaatcccagtcacggaatccatattttctcagaacagcctccagatactgtggcttggtgtaattgccgatcttaaatcccttggacttggcatactgagtcagcatgtcttttcctttcaggatattatcttctttcagttctttcttaaaccactggttgattttgttctttgcctgtgtgctctttacaacattcagccaatcacggcttggtccctgggaattctgggatgtgatgatctcaatccggtcaccattctgaatccggtattctataggtacaagcttcccattgaccctggctcctaccatcttattccctactgcgctgtgtacactataagcaaagtcaataggagtggagccatttggcagtgttttcacatcgccctggggagtaaaacaatatacactatctgcaaaaagatccaggtcatttttcagaagactcataaactctttattgtctgacatatccctctgccattccagaatctgtcttaaccagtttaatttttcttcttcacttttaccaaccggcttcttgccatctgctgattctttatatttccagtgtgctgcaataccatattcagctgttttgtgcatttcaaaagtacgtatctggatttcaaatggctgaccgttaggcccaatcagcgtggtatgaagagactgatacatatttggctttggcattgcaatataatccttaaatcttccgggaataggcttgtacatttcatgaatcacgccaagagcagcatagcagtctttcactgtgtctaccaggatacgtacagcaaaaagatcatatatctggtctatagtcttgtgctgattcaccatcttcttgtagatactgaagaagtgctttaccctgccatctacctgagccttaatattggcatccaccatatgctgtttgacctgattaacgatcttcccaacaaattcctcacgcacactttttcgcaatgcaaccttttcaaccagatcataatacacctctggtttaaggtacttcagagacaggtcgtccaactccaccttgatcttggaaataccaagacgctgtgcgataggtgcataaatatccattgtctcacgggccttttcctgctgtttggcaggagtcatatactgaagtgtacgcatattatgaagccggtctgccagcttgatcataataaccctgatatccttagccatggcaagaaacatcttacgcaggctttctgcctgcatttcaaccttatcagaggaataggataactggccgatcttcgtcactccatcaacaaggagagccacctctccgccaaattccttttccacttcttcatatgtcatccatgtatcttccactgcatcatgaagcagtcctgctacaatggtctctttatccagttccagatcagccagtatgatcgctacacacagaggatgaatgatatagggctctccggattttcttttctgatccttatgtgcttcactggcaaccttataagttttctcgatcatggagatatctgtggacggatgatatttccggacactactgatcaattcctgatacagcacttccggactggtaaagtcgctcattgtctttacagctgcatctgccttttttacagaagccagcttctctgcttcgatctgagatgcctgatccaaggcatctgtgactgtatttacttctgccatctcttatcacctaccctgtacaaagtctgcctgttttactttccttcatagcgaatcacagacgctacatcatatcctttcagcttttcacggcctttcaatccggcaagttccatcaggaaaaggatctttacaacttctccgccaagctcttcgatcaacttcacggcagcttccatggtaccgcctgtagcaatcaggtcatctacgatcactactttctgtcccggcttaatggcatccttatggatctcgatctctgcctgtccgtattccaggtcatagctttgggaaatcgtctcacagggaagttttcctttctttctcaccggtacaaatggtttgtggaggttatatgccataggcattccgaaaataaaacctctggactcagcacctacgatcacatccacatctacatctttgatcagatcctgaagcgaatctatggcaaggtgaagtccatctgcatcctgcaaaatactggtaatatctctgaaaataatccccggctccgggaaatccggaatacttctgacatattcttctatttttttcatattattgtttcctcctcaaacattttctcaaccatgttttttgtcaatagatttaagtatatcaccttttttatttataatcaatcaaaaaccccatagatacagcatattctgccatctccggttactgattgctccattcacagcagccatctccggtcaacaataattctgaatgatcacctgaagtgtttccctgccctgataccgattgatctcaggataataagtaacagatatcttatctcttgcagacaggaaatccataaactcagggatattgccgaaataaaccgcttctatcacatagccctgttcatccatcagctgaagctttgtcacattatgattcttcccgattacacgtgaatttattgccttcacatttttctgggcaaacaatggctttgtatttccttttccaaaaggttccaacaaagacagctgttctaccagcttcgtggaaatatacgaaatcggcattggcacatcaatgataaccttaggaatcagatcctcctctttcagattacactgttcatttaacctttttcgcagcaaagaaacattttcctctggaagagacagacctgctgccataggatgtcctccatattgatccagcagatccccacatttcactaattcctcaaacattgaatactgctggattgaccgtccgctaccctttactcctttttcaccctttgtaagtacaaaaaccggccggttatatttttcccgaatcctccctgcaatgattcctgccaggctttcatggcattccggcagatatactacaagtacaagatccttttttagatctgtattttcgatcagctgtatcgccgcatccttccctttttctgttaatgccttccggctgtcatttaatgccttcaaatctccggccagcctggctgcctcgcctgcatcctcgcattgaagcagtcgtaaggacctggctgccgtatcaagcctgccgctggcattaatgcagggcccaagcacaaacccaatgtgataagaagaaatcctgcttccttccagtcctgttacacggatcaatgcctgaaggcctttgtttttcgtatatggaagccgtttcagtccttccttcaccaaaatcctgttctcaccctgaagatccattacgtctccaaccgtagcaatagctgccagttccagaaactcttctttttcagtttccggaatatgactgtcatcatataaagcccagatcagcttcatggcaaccacagcgccgcacaaattcttattcggataggggcaccctggctgtttcgtattgatcacagcatctgccggtggaagaatataggttctttctccattgtcttcaataaaagggacctcatgatgatccgtaacaatcaccgtcaagcctttttcttttgcaaagccaatctcctttgacgctgcaatcccattatcgcaggtaacgatggtatcaaccccgtcctccagtgccttgtagatcaacggcatatggatcccataaccatccgtgatacggtcaggaatataagtatccgcccttgctcccaatcgttccaggcctttgatcaagatatacgtagcagtcactccgtcaatatcataatcgccgataatacggattttctttttttccctgatcttttgcttcaatatggaagttgcttctttcattccttttaaaagttctggtcccggaatatcctgaatggttccccgcaaatattcctgtatggcttttgcaccagttacatctcggttgcggatcagccgggcgatcacaggatcaatatcgaattgtcttccgatttccttaaaatctgcttttttcgcagaaacaaaccatttttccatgtaacttctcctgcatataagaaaacggggcagacccaaaggcctgtcccgaactttctctatttattcattcttattgctttcctgcgcattattagccgcttcctgagctgccagacgttcctggactctcttacggtttttctttttaggctgtgcaggatcagcttttggtggttcctgtttggaaggctttttcgctgtagttttcttaggtgctgataccttggaagctgttacagcagcaggctgaacctttgcctttctccagtgtcctttcattgtcagccacagagatcctgtaatacatacagaagaatatgctccgcaaaggataccaaccattaacggtgctgcaaattctttcacagaagaaacacccatcacataaagcactgctaccatgataaatgtggtaagggaagtatagatacttcttgtaagggtctgggtaatacttctgttaacaacctcttcaatatgatccggattcttgcttccgtgaagattctcacggatacggtcaaaaataacgatggttgcattaatggaataaccaacaatggtcagcatgcaggcaataaaagtattacctacggatgttctggaaatcgcatagaaagtgagcacaaccagcacatcatgaatcaatgcaagtaccgcactgcctgcaaagcagatatccttaaatctgaaccagatatacagaagcatcaaaatcgcagcaacaataacggaaacgatggcatcccttctcatctcattgctgacagttgctgaaatgctctctgcagagatcagagaatcatcaacaccgaatttatctacaagtgctttatttaatgcttcacgctcttcaagattcagggaacgtgttttgatcgttacctgattagtaccaacaaccttggtaggctgaacattcttgtcacctgtaacctcctctactaccggagtcacttcagaatcgatctggctgatatccatatcctcgttaaaggttacagtagtagaagtaccgcctgagaactcaaggctgtaatttaaagccttgtgggaagttttgctgaaaataaacattgcaacaaaacctgctaaaataataaccagtgaaattgtaaagaaaagctttttctttccaacaaaattgatcggcttcttttccatggtctgtccatagaatttgggattatgaataccaactgcatataatgcattgatcacgatccttgaaacaaccaaagccgtaaacatggaaattacaataccaagcgccagtgtataagcaaagcccttaactgtacctgtaccaagcttcatcagcaccagtgctgcaagaagtgtggtaatgttaccgtcaaagatggcagaaaatgctttggagaaaccagccttaatagcacttctgacggatgttccggcaccgatctcttcacggatacgggcataaatgataacattggcatccactgccatacctataccaagaataatacctgcaatacccggaagcgtaagagtgatatcaaaggcatttaatgtaataagcattgctgcggtatagaatacaagggcaataccagctaccaaacctgggatcctatatgcaaggatcataaacaggataacgatcacaagaccaatggcacctgcgatcacactggtagaaatcgctttctctccaagctgtgctgcaaccacgctggatttcatctcttccagctccaggctaagggaaccgatacggatgtaagaagcaagctcctgtgcctcttctacgctcttctgtccattgatctctgccttaccaccggtaatggcctcgtttacagttggtgcacttaagatcccattatcataaacaatagcgatctgtttgcctacgtttgcttctgtagcatctgcaaactttttctttccttcatctgtaagggtcaggtttacaacatattcctttgttcctgtattctgacgctgaatagcaccaccagtagcatcagctatatctgttccctcaagaacaacaccattctgcttccggatctcatccagatctcttgtcaggctgtatccggtatcactgttagcatcatactggaagttattttccccgtcatcaccagtctgctggataaaacaaagagaacctggcttgcccagttcttccagaattgcattggcatctgtaacaccagggatctcaacattgatacggtcgctgccttcctggtatacctgtgcctctgtactgtactgttccacacgtttctgcagcttataaacagtatcgctcatatcttcgctgcttgggttgctttcttttgctttgtatgtaatgctgacaccgcctgccagatcaagaccagtcttgatattcttggctgaaccggttcctgtaggtccaaatccaacagctgctgtaaaacagaacagtcctgtcaggatagctacaagaatcagcactacaacgcctcttgatttcttcattgttcctgtcccttcttaatttaattttgtagctgtcgtataggtctgcaaaagatcattcttctgcaagggcagcctttatcatgatagcacactccacacgcttcctctggagctggcatccgatttcataattaccattaatgtctttctggaaatggtaggcatttgctgcacatccgccactgcagtaaaatctggcaaaacagtctttacatgctggctttgtatatacattgcatttagaaaagtccttctggatctgtggctttacaatgccctcatccacattacccatcagatattcttcttcacctacaaactgatggcacggatagaaatctccccaaggtgtgactgcaaggtactcagtacctgaaccacagcctgaaagccgtttatacacgcaggggcctcctgtaaggtcgatcataaagtggaagaagttaaatccatttccttctttttccctttttatcatttcctttgcaagaagatcatactcttccatgatctgtggcacatcctccgggcggatagcataatcctcatcctgagctgccactacaggctccacagaaatctgcttaaagcccaaatctgccagatgaagtacatccttggaaaaatccagattataatgggtaaatgtacctcggacataatacttgtcctgatttcttgattctgcaaactttataaacttgggaatcaccagatcatagctgccagctcccttgcggaaaggtcgcatatggtcgtgaacttcttttcttccatccacactcagtaccacattgcccatttccttgttgcaaaactccataacctcatcattcagcagtacaccgttggtggtaagcgtaaagcggaatttcttgttataaagagcttcctgctctctgccgtacttcaccagatccttcactacctgccagttcattagcggttcaccgccaaagaaatccacttccagattacgtctggatcctgaattggcaataaggaaatccagggcctttttccctacttcaaatgacataagcgccctgcgtccgtggtattctccttcttcagcaaagcagtagcgacaggccagattacagtcatgtgcaatatgaaggcaaagtgcctttactacagtctgtctgttattggtaaattcatcaattacattttcataaatatcctttgtgaaaagcatgccttctttctgaagcttctcacactcagcaaccgatgtgcggatctgttcctcagggaagcggtcattcagcttctcactgatctgatctgcatccatctcctgctccagataaggtaatacttcataagtaacctgatctacaacatgaatacatccgctgttgatatctaatacaatattgtaaccgttgctttgataacggtgaatcagactcatttttctgacgtcctttctatttttatccacacattgtcagcacaagcaggaataagcagcggaaatcatcccgctgcttactttcactttcacagcaaactgctatggcatccaatgtgatctgctgcctgtacagcttctcataatacgccagatcttatttatgctcgcagctctgatttcctactgtacaggaagtcttacatgcagactgacaggaagtctggcactctccacagccacccttttttacagtattctgaagattctttgtatttaatgttttaatatgctccatcataggatcctccttatgtaaattctctggtaagtatagcatagattcatacattttaaaagtctttttttgtaaggttttcaattgtccactacagggtcaggacaacatccctccaagagttccgccgcccaggcacagaaaaaacgtagtgatcatatgtttcattgtcatatctggtttcccacctgccaggacagagaccatcaaaagtaaaaagaaataacagcttcctaccaacagtccccacagatatttttcttttctcagcatttttccagccccatatccaccggtcaggcaggctaatatgtacgctgcaaggattcctgcctgaactgctttttctgacaggtcaaacgaaaaaagtgccagtgcaagaaacaataaaaaaacacctgtaataccgtaagcaatcagcaatgattttaaaacagccttcattttcataaaaacagccctcccatgaacattatatggaagggctgtgcagattattatttaattgttcttctttttcttcaaaacaacaataagaatcaccacgaccgccgctacaacaaccaggatcacaaatgtacctaccggtgtattatcgccggtacgtaccgccccagttccatttacagaaccggaactattctgactgacggactgtcctgatgcagccgggctgttattccctgttgcagaactgttatctgtggatgtgctattatttacagttgtatttgatgtattactgcctgtggtactgccggtattcaccccactgcctgtggtacttgcagcagccttggtaggaacagctgttgatgcaggcttaggcgtggaggtaacagatatcgtacctccggaataaccgtcttctgcaatattctctccaatcaaaggcttgcttcctgcaattccaaatggactgaaagaatgagtactgaaaatcatagtacttccatcaacacttggcacaatggtctccatggctccattgtcaagaagatgttcaatggtatattcgtatcctgctttaacaggaactgttacactgatgtactgtccatccggaatctcatacttagaatctgttttaagattccacaactcaaactcataggatctgaaaatggcagcctcatcttcgttagtaaactgataggactcaccactggtagccctgaactgtacataccagggaagttcaatacctgaaacggagatgcctgcgcagctatggttctgtacagcacgctctgcctgctcctccggtgtcagcgtatcctctgcctcgctgggacgatcgtcctgtataggctcattgatctggtcaaaaatattatctgcatcctgatcctgtgaaggctggctgtccggtgctgccggatcaatggtatccggtgcaatagaaggaaccgtatccggtgctgccgaatcaacagtccccggtgtcacagaaggaatagtatctggtgatgccggggcaacagttccctcctgtactcctggttctgtgggctgtgaagcatcaggtgctattgtcacttccggtactacggaaggatcctgttcaggcaatactgcaggagctgtgggttgctgctctgcagaagggatctgagttggcagtgtttcctgtcccgcctctccttccggcgttacagaaggaactataccctgctctccaggtgtatccgttgctgccggtgtctggcttacctgtggatcattagaagctgcttctccttctgtatatccaggatcttcttgttcgccattatcctgtccgcactctgtattctcctgatagccttcataatcttcgtaatcgttctcttcatctccggtataatcctccccggaaatactgctgactacaacagtaacctttccttttaaaactccgtcttcctcatcccaaccggacatataagacagatcaacagaatcatatggttcaaactctaccttacagctctgagtccgcttggtaggaacaaaagaatcatctacccagtataaagttccatattcgctggatggtaaggaaacattagaaagctctgtaggttcatctatagtcacattgtcagggatcaaactgctcttcttaattgaagatgactgatatccagcatatacagaataaatctgcccacctgccagtgacatcgaaatcgctgccgcagctaaaatagcaatactttttcttttcatttttttcatttcagcacctctgttattatttatatatcaaattttcattcttttgtaatgtttgtgtaataatttgttttaaattttatcagcatgattatatcacaattcttcttttttcgacaccccctatttatatttttttcctcatccacttttccttgcttttttcataaaaatactgtatatttcttttcaagtcaaaatcgtactcccactgagttcaagaatgcctcggcattcttgctgcgaggtgtgcgtcatgcaattgcatgacatacttctcctgcgcacctctgcaatcctgccggaggctatatcagctgggggattgactcccagctgatatatttcttatcactcaccattatagaagcgggagtcttctcgactgtgatcaaaatttaaaggagcgtgaatatattttggattctagtgtccctatacagataaccgcaatcataattctgattgtactgtctgcctttttttcatcagcagaaacagcaatgacaacagtaaataagattcgtatccactcccttgccgaacaagggaatcgacgggcggtcacattagaaaaggtgattgccgacacaggcaaactgcttaccactgttttaataggaaataatattgttaatatttccacctcttcattggtgactactttaacgatccgcgttttcggaaatatctatgtgggcattgctaccggtatcctgactctggtgattctgctttttggtgagatcacgccaaaaacactggctactctacataacgagaagcttgccctggcctatgcccgtcctatttttttcctgatgatcgttctgacaccgattgtttatgtagtaggcaagctagcagcagggatcatgtttcttctcagagtagatccagatgcaaaaccacagcagatgactgagcatgagctgcgtactctggtaaatgtaggccaagaggctggtgtgattgaaaatgaagaaaaacagatgatctataatgtgtttgattttggggattccacagccaaagatgttatgattcccagaattgatatgacctttgtggatgtaaatgcatcctatgatgaattaatggatatcttcaagaaggatatgcacacacgctttccagtttatgaagacaatacagacaatgtgatcggtattattaatgtaaaggacctgatcctttatccaaagaaagatgatttttctgttcgtgagcttcttcgtgagccttactttacttatgaatataaaggaactgccgatctgatgctggaaatgcgtaaggcatctgtgaatcttgccattgtacttgatgaatacggttctactgccggacttgtcacactggaggacctgttggaggaaattgttggtgagattcgtgatgaatatgatgaagatgaagaagaagatctgaaagaacttcagccaggtcgtgaatacgtagcttcaggctcagccaagctggatgatatcaatgaaacccttagcactcaaatggtatctgaagattatgattccattggtggttatattattgaacagttggacagccttccaacagaaggacagtccgtcacattggacagcggcatccgtctggtagttgacaaattagataagaaccgtattgagctggtccatatctggcttcccccagcttcctctaaagatactgatccttcagaagccgaatcccttttgcattaaaatccaattcaatatgaaagtcccctgccctggttgtaaaaccataagcatggggactttttatttagaccataagctggaactgcaatatgatccgagtcacttctccagtgactgcccggatcccttcttcagtatctttccagttttcccgagtgatcccatccggacaatctgcacatacataaaactttgtatccggatacagcatttgataatacatcaaagctcttcttgcatgataacttttacagcaaagaattgcttttcttattgtaaggccaagtccatctgttacctttctggaataaatggcattttcataagtataagtagctttatcttccttaaggattgcatgatccggaacatgattatgcatcagcacatccttcagaaattcccattcagtatcatacttcctgttatagttctgttttgaggacaacactcctgaaaaatgccccatcacaacgctgtactttccgcttggcagtatatacggtgcatacccttccatgtaaagtctggctgcatgttctgccatttccggatatccgttacctggaataaaaataatatctgctttttctggaatatcttctgcaaaaacaaaatctcctatcgttttcataaattcatccaacataactgtacctttctgttcatttgtatttgtaggtatcatggctggggactgtaccctgcacatcatttataaagattataccatttttcagttcatttcgtcacgatcaatgtactatagccatcctccctcagccgctgttccatacggatggcatttccaagctgttgatatgctcccacctgtaccttaaaaagatctccatcccacagtatatatgcaggataaccacggtctaataattggtacagtaatctatctgcattttcacggtttcgaaatgctcctgtctgtacccggtaatataacggattttctgcgtctgtttcatccagcgttccaagtatggcatctgcaattgcctgtggaatatcctgcttcttttcatcataaagggtattgtctttttctgaattaataaaacctgtttctatcaaaagtgcgggcatctttgtttttctgagtacgaccagtcccggccgcttttgaacaccaatctcccgaaagcccaattctcctaaagcccctacaatattctgtgccatcttatactttataccgcttttattatataccagcacctccactccctgatattgattagcttggggactgctattcctgtgaaaagagataaaataatccacatccgcttcatttgcctgttttgcccgttcaaacggcgtaagatattcatcctctgttcttgtatataaaacctttaccccattcttttccaggatttctcctactgcctttgtaagtgaaagattatcatccttttcctgtctgcctttataaactgcgccagggtctgaacctccatgaccggcgtccaacataatcgaataagccatttcttttctatccttttatcttctctctataaaatatgcagaaattgctatcaggccacatgtccgttgaaatggaaaattcatgtataatccttatttcttgcatatgtgattttttattctcccatatacatttttttatttcccgccttgactttgcaactttaaagcgttatactgctacattataaataaacactctccttatatcaatttcgtaacaattcagtaccctcacggataattcctactgaatagttacttaatttctgaaaatgcaaatgcagtatcaaaaccagtacattttcaaataggagaatatagtttaaatacaattcgaggaggatacaaagttatgaaaaaacaggttttagccgtgtcactggccagtttaatgtcaatcggaaccataggcagtgttaccgctgtcaacgcagaagaaagtgacaaaacatacaccgtaggtatttgccagcttgttcagcacgaagcattagatgcagcaacacaaggatttaaggatgcccttacagacgctcttggtgatgctgtaacttttgaagaaaaaaatgcacagggtgattccaacacttgttctacgattatcaatggtcttgtatcagacaatgtagacctgatccttgccaatgcaactgcgtccctgcaggctgccgcagcaggcactaccgatatcccaattcttggaaccgctgttacagattacggtgttgctcttgaaattgatgattttgacggtacagtaggtggaaatatttccggtacgtctgatcttgctccgctggatcagcaggcagctatgctgaatgaacttttcccggatgcaaaaactgtaggactgctgtactgttctgcagaagcaaactcccagtatcaggttgatacagtaaaagcagcccttgaagatcttggttatacatgctctgattatgcattctctgattccaacgaccttgcttctgttgctacatctgccgcatctgacagtgatgtgatctatgttccaacagataacaccgtagcttctaatacagagatcatcaacaatatctgcagtgcagaaaaggttcctgtaatcgcaggtgaagaaggtatctgccagggatgtggtgttgctactctttctatcagctactatgatcttggaaaagctactggcgaaatggcggttcgtatcctgaaggacgatgaagacatttctactatgccaatcgaatatgcaccaaactttacaaaagaatacaatccaaccatctgtaaagaccttggcattgaaattccggatgattacaaagcaattgaagaatgatcagaaaataacttaaattcaagaataatattaatttcatgcactatcagcggacagcgggaaagggaaatacctctctcgcttttcgctgtattaacaggaggaatacaatcatgcaaattatgaacttaatccaggctctccccggagctgctgcccagggactgatctggggaatcatggcaattggcgtttatcttacctttcgggtacttgacattgccgacctgactgtagacggtaccatgtgtaccggaggagccgtatgtattatgatgatgctgaacggccacaacgtatggatttcccttcttgttgccactcttgcaggtatggcagcaggtttgcttacaggtgttttccatacatttatgggtattcctgcaatccttgctggaatccttacacagctttccctttattctgtcaacttaaagatcatgggaaaagccaatcaggcaatcaatgttgacaaatataacattcttgtttcccttcgccggatcaaaaatgttcctatcacccagaatacaattctgatcgttgccctttttattatcgttgtgatcgctgtattgtactggtttttcggaactgagcttggatgctctcttcgcgctaccggctgcaatgccaatatgtcccgggcacagggaatcaatactaatttctgcaaggtacttggactgatgatttcaaacggactggttgcactttccagtgcccttcttgctcagtatcagggatttgcagatgtaaatatgggacgtggtgccatcgttatcggtcttgcagctgttattatcggcgaagccattttcagccgtatttttcgtaactttgcactgaagcttttaagcgtggcatttggttctattttatattacctggtgctgcagacagtaatctggatgggtattgatacagacctgctgaaactgctgtccgcttttgtcgttgctattttcctggcgatcccatactggaaaggaaaatttacaaaagcagcaaaacatggaggaaatcacaatgcttgaagttaaaaatatttataaaacattcaatcctggtaccatcaatgagaaaattgctttaaacggactttccctgaaattaaatgaaggagattttgttactgtaatcggtggaaatggagcaggaaaatctacccttctaaatgcagttgctggtgtatggccagttgacgaaggacagatcgttattgacggcactgatgtaacaaagctttccgagcataaacgcgccgcttatcttggccgtgtatttcaggatccgatgacaggtactgctgccacaatgggaatcgaagaaaatcttgcacttgccagacgaagaggtaccaaacgcggacttcgcaaaggtatcacccagcaggaacgtgaagaatacaaggaacttcttaaagttcttggcctaggtcttgaaaacagactcacctccaaagttggcctgctttccggtggacagcgccaggctctgacccttttaatggccaccctgaaaaaaccaaagctgcttcttctggatgagcatacagccgccctcgatcccaaaacagcatcaaaagtccttgaaatcacagacatgatcgtaaaccgtgaccatcttacaaccctaatgatcacccacaatatgaaagacgcgattgcccatggtaatcgtctgatcatgcttatggacggaaaagtaatcctggacatccagggtgaagagaagaaaaaactgactgtgaagaatctgttggacaaatttgaacaggccagtggcgaagaattttccaatgacgctgctattcttggttgatactttacattcctgttaatgaatcctgatacagcgttataaataaattagatgagtgtccttatgagtccacgcctccacccaatgtggacccatagcggcactcttttatctaatcctcatcctctgaaacgcagataatactatctgttgacctgcaatatctatatattcttattgaaagaaaatcctcctccggtgttgtttccttcactgtttcactgaccacatcctctaattcttccgggtaaacctgtcttgcatcatgtaccattacttcatgtacactggtaaatgccagatacagatcctgtcccagcaattctgccatacgttttgcaacacctggcataaaaattgctgccgccccgttagtacgctttgttgtacttaagcaaatccccaatgtttttctggaaatttctacatcactattctctttacccataaaatcctcaccatcatattcagggtcaaaaataagcttttcccaacagtaaatccttgggggtgtcattttcatcgtatttatcaatgcttcctcaagaatcttttccctggaaatcccccattcctcaagatactccttccgtatcttcatactggtgatcccatctgcagattctgaaattctcatataaagaacaacagcaatatcaccaatacacctgtatacagcatgtaccaattcatccttatttcgattcagatttaaaagcctaataaataaatcctttttaatcatttcataatcagtaagattcttagttttgtcaaaaaattcagcatgatttactttttttaactctgttaatatcatcgttcccagttcattcaattcttttccccgttcatagtcttcaaacaattcttgcacatgtaccccacatatttctttcataccatcttcttctgcacacaccaaaaatagcctgtctccattttccgccatcttctctcccttttttcggaaataaatcttatcctctgtatatccagtttcattaagtaaaaaaaggcgcaattcacctataaactcttcatagtttttattcatatatatggttcctttcatacactaatagcggttagatttctaatactttaagagataattggacgatatgtccaatgataaagccgttttcccaaacggttataaaaagaaagggagcatctgctccccattgagttgctgtgaaatcagtatagccaatctcgccccacttgtaaagaagaaaaaaacgagaaaatccagcaaatttcacccatttatctttccattttccttcagatactgcaaaaatcctttgcaaccctcctctatatccaaatatgtaagttggaaatcccctgtataccagggatccgcaatatctccgcttctccctgtcatttcaagcaacagtcttatcttcccctctggatctcccccaaaaattctcagcatattccgtatatttctctgatccattcccaaaatataatcatattttccataatctttttttgttacctgcactgctctcttcccctcacaggaaatcccatgtttccgcaatatctcccgtgctggcggatataccgaattgccaatcccgttccagatttcctctgtgctggtagccgcagaccgaatcaagaacagatctgcgatacccttctgctgaaccatatccttcaaaataaattctgccataggcgaacggcagatattgccgtggcagatgaaaagtacttttatcatagttgcataacctcgcatttcttagtttttcttggtttttcgggctttgtaagcctttgtaaatttttgtttcctggcataaacctggtttattttcgcataatatcgtcagcaaaaggtgtaaaataaggtgtatatttttctattttacaccttgctattttcaattaaaaatcgtaattacacaaccttgatccgatcaacttcttccctggcatcctcaagttttacatgcgtatatgtattcagcgttacgctgatctctgagtggcccatcaaatattgcaatgcttttggattcattccggattttgccatatttgagcaatagg

SEQ ID NO: 26 - DNA, 55772 bp, Unknown
  gut microbiota DNA sequence
taaaatatgctccctcctaagtgacaagtttttattatttcacttgtctacctagaagggagcatatcaattcccagacagtcccttcttttctaattgcagacactttcctgcatcacagattattcgtgctccttcagatactgtgcacggccttcttcataaaggttattgccttcgctgtcaataataactaccagcggcatatcctctacgtaaagctttctgagagcctctgcgcccagatcctcatacgcgatcagttctgccttcttgatacatctggcaagaagtgcacctgcaccgccgatggctccaaaataaacaccggagtatttcttcattgcatccacaacctccggaagacgggcaccttttccgatcattcctcttgctccaacagacatcatagtgggtgcataagcatccatacgtccgctggtggtagggcctgcagagccgatcacttttcctggttttgcaggagtaggtcccacataataaatggtggcatccgtcggatcaaagggaagcttttctccctttgccagtgcttcgcacattcttttgtgtcctgcatccctggatgtataaatggttcctgtaagcagtacctgatctccggcatgaagtgttttggccagttcctcagtaagaggcagtgtaatatgtcttctctccatttagatcacctccgttttatgacgggtcacatggcagttgatatttactgcacaaggcattccggcaatatgagttggcattgtctcaatgttcagaccgatcgctgtggtttttccaccaaagccctgtggtccgattcccagtttattcaccttttccagcatttctttttcaagatcagcatagaatggatccgggttttcagtatcgatagggcgcatcagtgctttttttgcaagaagagcacatttatcaaaggtacctccgatacctacaccaaccaccattggcggacatgggttaggacctgcagtctcaactgcttccaggatgaaatccttgattccctgaagtccggctgaaggcttgaacatacggatcatgctcatgttctcacttccaaagcctttcgggcctaccgtgatcttaatgttttcaccaggtacgatctctgtgtaaagcatagccggtgtattgtctcctgtgtttcctctgcggacaggatcctttacaacagattttctcagatatccattggtatagcctctgcgcacaccttcatctactgcctcacgaagatctccgcctgtgatatgtacatcctgacctatttccaggaacacacatgccattcctgtatcctggcagatcggcacacattcactgtcagcaatctcatagttctggatgatatcatccagaacaccttttgcaatctctccgtcttcacatgcacggcaatttttgatggcacactttacatcttccggaagatgctcatttgcctgtatgcaaagtttttccactacgtctgtgatctggcttgctaaaatctcacgcatactactcactctcctgatttttatttatcgtaactgttcagtactcaccaaagatactgcctgctgaatagttactatttatcaaaactgtcaacagttccttcatgtcttgcatactttggaagaagcagcggagaaacgtcctcagaatgaagtcctgctttttccagttcctgggcataagcctgtacatgatcaagattcatctttccaagagtgatctcttttacccttgcagctgcagcctttcctgcgtcacggccaaatacgatcacatccagaagagaattgcccatcagacggttacgtccgtggattcctccaactgcctctcctgcaacaagcaggtttgggatcacctttgtaaatccgtctccgccgatctccagaccgccgttctgataatgaagagtaggatatacaaggattggaagctttctcatatcaattccgtagttcatgtacatacgaagcattgcagggattctcttttcaatggtacctgcaccgctcatttcctcgatcatcggagtatccagccatacaccggttccgattggagtttttactccctttcctctttctgtacactcacggataatggatgcagcagctacgtcacgggtttccagcggatgcataaatgcttcaccgtctgcgtttacaagcatagcaccaatagaacgtaccttctcagtaacaagtgcaccaaagatctgtgacggataagcaacacctgtaggatgatactgaatggtatcctgatacaaaagcggtgctccggcacggtatccaagtacaagtccgtcagcagttgctccataatggttggatgttgggaagccctgataatgcatacgtcctgcaccacctgtagcaatgatcacagtctttgcacgggctaccatataatctcctgtctccatattcagaagaactgcaccagcaacctgtcccttgtcatctttgatcagctctacagctgaagtaaattccacaaccgggatctgacggttgatcacttcatcgcgaagggtacgcatgatctctgctcctgaataatccttgcatgcatgcattctctttctggatgttccgccaccgtgagtggttaccatatttccttccgcatctttatcaaacataacaccaagatcattcagccactgaatggcatccggtgcttccataaccagttttttcagaagttctggtcttgcagcaaaatgtcctccgccgaaagcatccagataatgctgtaccggtgaatcatttgctttgtcagctgcctggataccgccctctgccatcatagtatttgcatcaccgatacgcagctttgtaacgatcataacctttgctccggcttcatgagcttcaattgctgcagaagatcctgcaccgccgccgccgatcacaagcacatctacgtcataatctactttatcaagatctactttatctgtcagcagacgactgttggaatggagaagatgtgtcagctcttttggcgctttctggcctttattcggtccgatcttaatctcagcaaacgcctcttccctgtaatccggatgaaaagccttcaaaagagtgtccttctcttcagctgtcattcttctaggttccatgccaattcgtgaaggtcttgttgcctccacttttttcacggattccatcatttctggtgtaaacatggctcttcctccttatttctcaatctctctgtggttgtaaagttcttccatttcagtaataggcttctgcatgatctgttcgatcagttcatcatatgccccttcatggatctcttctacacgtttcgccagatgctcgctctttggtgcaatatattttccggtaagacgtcttgccagaagaccaaccattggatgggaaatctctgcagggcaacgcacagtacagcagccgcatgcgatacagtcaaaggactcttctgcacatttttcaaattctccacgctgtgcataagcgatatactgcataacattcaggttctgtgtgcaggcttttgtgcaggcattacatccgatacagctgtagatttccggataaagttccatcataatacgctgttccggacggatctcatccatctcataggttctcttgtctgttgggaagaatggaatgcttgccacatacatgccttcctgtacctgtgtctgacaggccaggcaggtcttcagttcattttttcctttgatcctgtacatggttgcacaggcgccgcagaagccatgacggcatccacagcctctttttaaggtataacctgcatattccatagctgtcatgatcgtaagatcagcaggtactgtgtatttttttccaaagaaatatacatttaccatattttccatgttgtttgatcctttcttatagttggtaatcgcagtgctagcacgattcgcagcttttcactgcttttttccattcgcagtgctaagctcgattacgctttgcttctttagtactcatcaggtaactgatcgatctcatccaatcgaaacaccggtccgtccttgcacacatatttggaaccaatattgcaacgtccgcacttaccgattccacatttcatacgaagctccagtgtggtataaacctgtgatcttgaaaagcccagttcttccaatccctgaagaacaaacttgatcatgatcggcggtccgcacaccaatgcaactttatttgtatcaaatccgatttctttcagatagctaggaacaaagcctacatgtccgtcccagccctcctgctcacggtcaatggtaagatatacatttacatcttttgctttcatccatacattctggatctctttcagcttaaccaggtcatctgcggatcgggaaccgtacagaatatccacagttccataatcctcacgattgtccagcacataattgatcacagaacgaagaggcgccagaccaatgcctccggcgataaacagaagattctttcctttcagcttatcctctaccgggaaatgatttccataaggcccacgcactgtgatctcatctccaacctgcaggctgtgcagataagatgtcagttctccgcatcttttaatactgaattcctgatattctttattggtaggggaagatgtgatggaaaacattccttcgctgactccaggtgcacaaagcattgcacactgtccgggcatatgttcaaaaagctttcctccatccggtgcattcacacaaaaggttttcacatccggagtttcctcgttaatactggtgataactcctacctttgggatcagagtatccagtttgtagtttttatggcaggtacattcactcatgctttttctcctccctgcttttcaaaggctttgatcacctttacaatatttaatgcttccggacatttctccacacaacgtccgcatcctacacaggaatacatgccatcgttgtttgccgggaaataaaccagcttatgcataaatctctggcggaatctctgcagctgtgttgtacggttattaccgcctgccatcagcgtaaaatcagaatacatgcaggaatcccagcagcgataacgctttacgccatgacctgtatcatagtctttaatgtcatagcactggcaggtaggacatacaaaggtgcaggtaccacatgccagacatggtttatacagttcattccatacaggagaattgaatttttcttctgtagcatttccatcccacccctccagggaaaggtgtgtataaggaagtttttcaataatggtacggattgcttctttttccttagaaactgcctcctcatctgctgcatcagcatcctgaagaagctccttcacgctttccgtaagagcatttcctttttctgtaacagctttccagaaaagctcttcaccaatcatccagacagctacatctgccaccggatctgctgcatctgtaccgaaaaccttgcagaagcaggactcttccggctcatggcaggccatggcaacaatagtaccatgctcacgccttgctgcataaaaagtgtctaccggatcagacagaaatactttatccagaacctccacaccttttacatcacaggctttcattccaaatactacaaacggatgctctcttaatgcttccggctctacagacagcttcttgccatcacgtacacatgtatataaagtttcgctttgtgggaaaaaagcatcttttcctgattttacagttttcagggttgtaagatccacatctgcatcttcagtccacagtgcaaaatttgtttgctctgctttttttacaggaaggatcagatcctgtttttcagaaatcatctggaataatgccttcagattttctttttttatcttatacatacattatcccctttctgccacaatgccaggctccacatcctcaaatgtaaagctggtaagcggaccttttgattcagcatctgcacctgcctgatattctccatagaactgatcgatgtctttgatgaatttacggttgaaaagatgaagaggaattccctgtgggcagacacggctgcactctccacagtctgtgcatcttcctgctacatggaatgcgcggatgatgtggaacatcttttcttcaaaatcatccacatttgctttctgggcactgtcaaatttggtactgtcaaatacgcatctgcggcagctgcatgcaggacaagcattgcggcaggcattgcagcggatacatttgctcagttctttctggaagaattcaaatctttcctttggagacattgcttcgatccgttccacttctgcaaagcggtcagcatcttttgtatccttggactcaccgatgatctcatcatagatcatatgctctttgcccttacatacatggcatctttccagcattgcatctttataggaaaccgttttgctgccataaattgtttcaatttcaaggttctcgcaatcatcagtaagctttgctccggtgattttctggattcccttgattcccattttgcgaagcttttccacatccagcttacctttgcagcctacaccgataatataggctttttcacggtctactctgtgctctttaatcagctggttaaagctgtatgtgtcacacggcttcagacagacaagggtttttccttccagcttggaagcttcgatcatcatcttgcttaaatttgctccgcaaaagccatcgtaaacgaattcatccaggctttccggtgtttcaaaatatgctgcttcaggattgtaaggcaggtctccggctctccagccaagaacacgggctaccgtattatctgccagcagctcttttgcacggctaatcagttcctgcatcttatatcctccaatcttacattcttgccaagagaatggatcttctccacaaactcattcatggtctgggagaacttaacaccttctgctgcagatacccattccacacgggtacgtccattttccacaccaataaaatcaagcatggagaacaaaagtgtcattcttcttcttgcataatagtttccggttgtataatggcagtctcccggatgacatccacaaaggatcactccgtctgcccctttttcaaaagcacggaggataaacataggattcacacggcaggaacatggaacacggatgatctttacatctgccggataaaccagacggctgcttcctgccaggtctgcacctgcataactgcaccagttgcagcagaacgctacgattttaggcctgaattcttcttttgcttctatcgacatattgcatctacctccgctatgatctgtctgttggagaatccctgaagatccatcgctccggatggacaggtaactgtacatgcaccacagccctgacaaagtgcattgttcacaactgccacacgcctcgtctcacgtactccatggtcattcacctgtacatcctcataggaaattgctccatatgggcatacattcatacactgggaacatccgttacatgcaagaggatctgcctttgctgtacatgggtttgtagtcagcttgtcttttgccagcaatccaattgcttttactgctgctgctccagcctgtgcaacagtttccggaatatcctttggtccctggcacactccggacaggaaaatacctgcggttggtgattctacaggacgaagctttgcatgggcttcagtaaggaaattgttggtatcaatacttgcagtaagcatggttgcgattttacgtacatctttatttggctcaatggcagctgcaagcacaaccatatctgcctccatcaggatctgtttgttgtccagaaggtctgatgcctgtaccattaaagttccgtccggctgaggaatgacctttccaacctggcctttaatataatttactccatactcttctacagctcttctgtagaactcatcaaagttctttccaggagtacgtacatcaatataaaatacggtcacattcgtatccgggtatttatctctgatcagcattgcatgcttcgctgtatacatacagcagatcttggagcagtagctttttcctctgttatcagagcagcggcttcccacacactgtacaaacacaatattcttcggtgcttttccatcggaaaggcgctccagatgaccctttgtaggtcctgctgcattcatcaaacgctccagctccagggaagtgatcacatccttgctctggctgtaagcatattcatcatattgatcaagcttgatcacatcaaagccggttgccacaacaatggctccgtatttctttgttacgatctcgtcctgctgttcataatcaatggctcctgctgcacagttcttggcgcaggcaccgcatttgccggttttgaacttaatacagttctcacgatcgatcacaggtacatttggaatggcctgtgcaaaaggaatataaatggcactacggttgttcagtccacggttaaattcgttaggaatcttcttggatggacatttctgggaacatacaccacagcctgtacatttgctcatgtctacgcttctggcttttttacggatatctactgtaaaatctcctacaaagccgcttaccttctcaacttcgctgtatgtatagatattgatcttctcatgagctgcagcttctaccatcttaggggtaagaatacatgcggagcagtccagggttgggaatgttttatccagctgggacattcttccaccaatacttggaagcttttccacaatatccacttcatatcctgcatctgcaatatcaagtgcagactggataccggcaataccaccgccgatcaccagggctctttttgtaacctgactctctcctggctgaagaggcgcatccagatttacctttgcaatggctgctcttgcaagaatcacagctttcttggttgcttcctccatatctttgtggatccaggagcagtgctcacggatatttgcgatctctaccatgtatggattcagacctgccttttccgctgctttgcggaaagtagcctcatgcatacgtggggaacaggagcatactacaactcctgtcagatgtttctctttaattgcattaatgatcttggactgtcctgcttcagagcacatatactgataatcctctgcatggactactcctggctccatttttgccatttcaactactttttttacatctactgtggctgcgatattggtaccacagtgacatacaaatacacctattctctgcaccagtctctcacctcctgtatcttctgaatgcactgactaacagctgctgaggcgtttcatcatcaagaagctccgggatctcatctgctttcagataattctgtcccttctccctgatcacgatctgtcttgcagcatcgatcagttttcctggttttacatctcttgggcaacgctccacacatgcaaagcaggaaagacatttccacagggattttgactgggcaagtgcctcgatatccccattctgtacataagatacaaactgatgtggtttgatatccatctcattaaatgccggacaggttgcagagcatttaccgcatttcatacatttcagaggatttactcctgagatctctttgatccgttctgcagcatttgtagtatttccatatgtataagcactcattactctgccacctcctctttcacgcccagtgcttcagcaagaagctctgtgaaatagtatacaggaagttttccgtttccgttctttttcaggttatacatgcaaagcggacaggctgtgatcagcatctctgccccaaaaccttctgcactgtccatgatctttttgcacatattctgtgccatgtccttttctttcagggaaatatatccaccgcagcattcattacggaaaggatagatcaccggctcaccaccgatagcacggataaaatcttctataatggaaggattttccggattatcaaatcccagtattttcccgggtcttaacaaaaggcacccataataagcacctatttttctgccctttaacggatttacaaccttttctttgatcttatcaaaacctaccctgtctcttaatacttccaggtaatggagaacggttgtttctcctgcatagggtgtttcaaatttcaggtaattgttggctctggtgcggatatcctccacattttgcatgtcgtcattgactcttttgatcacatgatgacaggcggaacagactgttaccagatcctggcctttttccctggcttgctccaatgcacggacagaagaaagctttgtggcaatttcatcgcttcccagcggataaacaccgccgcagcactgccagtcttcgatttcttccagttcaaatccaagcgccttggcagaagccctggcataggtatccaggtcttttgctttgtttttcagggtacatcccggataataactgtacttcataatcctgctatcctttctttgtttcttagcattttctatcgttttttcagcaaatctatttatatatacagcaacctttttatcttgttttccggctgctggtatattcagaaattaataggaatcaacacgttattttgtattttaaaatcaaatcaagacgattttggacataataggggagccgcaagcggctcccaatatatacgcaattttacagatcgatctgtgcaataacatttttcagggcgtcagcactctttctcaactgttcaatttcactcttattcatacgcattggtacttttccctggataccattaggtcctaccaaggtaagtgtacttaagcatacgtcttcaataccatactctccatgcatcatggaagaaacagtggtaattgtatcagatgctgcaagtaccagattgaccagcttgcatacggttacagatacagcatagaaagtagcccctttctttgcaatgatctggccgccggacttctggacataattcagcattgcctctttatcaattggctggatctcttttccaagtgctttcatattctcataatattcatccacacttacgccagagatataagcgcctgtccacggaataaaggaagtatccccatgctcaccgaatacatacgcatggatatttccctgtgctaccttgaaatgctcagagataccgcagcgaaggcgtgctgtatccagcagtgtaccggaaccgatcacctgtttctccggaataccggagatcttggtgaatacataagtcataatatctaccggattgcttacgataatgtaaatagcatttggagcttcctttgcgatctttggagcaatgtctttcataatatttacattcgtctgtgtaagctcgatcctggtctgtcctggttttctagcaatgccggatgtgataattacaatgtcagagtccttagcatccgcatattctcctgcgatcatggaaatcggacttctaaagcaggtaccctgaagaatatccatcacttcgccttctaccttttccttgttaatatcgatcataacgatctcagacgcaatcgcctcacttgccaaagtataagcgatggtagaacctacgctacctgcaccaataatagtaattttgctactcataacctgttccttccttcttccttatcgtcttttttttaacaattatctgaataaaaaaacagaaccacaactttcatcttctgctctaccaatattttcattcaaatacaggcatattccctcttctccgcataaatagaatttagttcagttccgcattactaagataccataatgataatattttaacaagttttttttttgtatttcaaaaatatcagcatattgcacattttttatcgttaatttttaagcatattgtattaaattaagaattcaagatcattttttccaacatgtgtccatttctatatatttttaaacaggtagggtgcttttacgctttaaatttttacaaaaaagaaccattgtgataaaaaattatcacacagttacccaacacattctctgttacatgctgctgaacaactgccagatcacaatggttcttatcctattatttcacaggctctgcataccgcttcacgatccctttcaggatctccaccaccagatccatgccctctaccgtaatatgctcacagggaccatgggctgcatagccgccggtgccaagattggggcagggaagacccatgtaagacagccttgccccgtctgtgccgccacggatgggtactgttacaggtgacagacctgcttcctgtgctgccagctttgcattctcgatcaggtgcatacatggctcaattttttctttcatgttccggtactgctccttaatggtcaatgttactgtacctgcaccgtatttttcattaagaagctttgcaatatgcttcatggtagaaatccttgcttcaaacagatggctgtcatggtcacgaataatgtaaaccatacttgcctgtgcaatatccccgttcaggtcacaaagatggtaaaagccttcatactcttctgtataccttggtgtctcccctgcaggaagcatattatgaaattctaccgctacctgcactgcattcaccagagtatttttgctgctgccaggatgcactggaaagcccttgatctgtacctgggcacctgcagcattgaagttctcgtattccagttcgttttccacaccgccatctacggtataggcaaaatcagcgccgaaattctctatatcaaaacaatcagcacctctgccgatctcttcatccggagtaaaaccaatgcagatctttccatgggggaaatcctcattcagaaggatctctgccagagtcatgatctctgcgatccctgccttgtcatctcctccaaggagcgtggtgccatctgtggtgatcagtgttctgcctttcagggaagaaaggtgtggaaaatcagccggatccaggaaaagtccgctatttcccagtgctaccctgctgccatcataattttcgatgatctgaggattcacaccttctccggaaaaatccggtgctgtatccatatgggcaataaacccgatccctggtgcatcctcataaccctttgtagcagggatctcaccatacgtatagcatttgtcatctatacgcacattgctgatccccagctctttcatttcctgaaccagctcatttcccagatcaaactgtctctgagtggaaggtattgtctcactgctatcatcacttgtggtatacaccctgatatacttcaaaaaacgctcatacgctctcatatttactcttctccctgttttgttttattagcctctgcagcatcttgcacttcctgttttgattcgccttccggcagtatctcttctggtgcctgcacagcatcttcctgaagctccctttcaccttcaggctgtatttcttccgccatatcctgtgtgtaatctgcctgcatcatagcacgttcacgcaggcttttctttggtgccgcctgctgggctgctgcctgtcttcttgcctgctgtcttttcttcatatccactgcgtagacacgcttagggtcttcctttgccagcttctgaaagccccatgctccccataaaatgaacaacggaatcccaattgctgtaaaaagcatccccaggctcatcagcttagagaaacaaagaaagacttccatcaaggcctccacaaccaaaagcacaagagcaatccggagcatcttagtcgccttgtctacccggttactgtaccgtacactgctgatccctgcaaaaacctccacaattgccaggatcacaaacaatataccaaccaacctaagaaatggaacctgcatatttgtcttttcaagaagctctacatattccttggttcctgctgctgccttagaggcgatcaccagaaaattgatcccgtacagcaaagtcgatgtaatggctgtaaacaaaaggaaaccaccgccgaataacagacacatcctgccggttgcagctttccgcacagccttctgctgatctaatacgtccatattcatcaccatcctttctcgtgttaaaggaagtataccatgcctcttaatccgggtcaatgcggagcaaaaaaacagggacagccctgccacatttctgtgataagactgcccctgtcaaaggcttacaaagcagatttcccaacggaaaatttactctgctgtttttgatgtataaccgaagaagaagtatccaagtggtgtataatacataccctgaatgttctctttcagcatgtatggctgtgtatagaaataaatcggagcaagtacgctgtcctgaccgatcaggatatcctcagcctcatggaatgctttcatacgatcttcctgtacggaagtagcttttgcttcatcaatcttcgcatcgtaatctgggttggaatactgagcatcgttgtttccgccgccagtgtaccacatatccaggaaggagcaaggatcattgtagtctgcgatccagccgttacgagcgatctggaagttaccctgttttctgttctccaggaatacgttccagtcctgattgttcagtttaactgtaacgcccagctgctcctgccacatattctgaagagcctcaccgatcttcttgtggttgtcagatgtgttgtacagatactcaacagtggggaagccttcaccgttcggataaccagcatctgcaagaagctgacgagcctcttcacagttcttctcgtaatcctcatcagaaatgctgtagtaagaaccacctacagtacggaagtcatcacttccagggcctgctgcatcatttacaccggatggaacatatccgtcagccggaacctcaccagcctgggaaacattctctacaatgtagttacggtcaatgacaagagagaaagccttgcggatgttaggatctgagaatgtctcgtcctctgtgttgaagcatacataatatgttccaagatagtcagcgatattaagctgtccatcagcaaggtatgttgggatctcatctacaggcaggttctcgataaagtcaagttcaccgttgttgtaacccttcagcatagcattgttatcatcaagaagtgcaaatttgatggtatccggtccaagtttctcataatcatagtagttctcgtttttctccatcaggatgtaagcattgtgtgaccactctttcatcttgtatggtccattgctgatataagaatctacatcatatgtccagtcatcatttccctcaaccttatcctgacgtacagggaatgttgccgggaatgccataatctcctcgaaatatgggcaatcatagctcagatcgatctgaagcgtcttgtcatcaactgctttgataccaagtgtgtcaggctctgcactgccatcagcaactgtttcatagccctttaccatatcgatcatatagcagtaatctgctgcagtttcaggatttgcaagacgctgccaggaatatacaaaatcacctgctgttacgtcctgtccgtctgaccatttgataccgtcacgaagtgtcactgtataagttactgtaccatcatcgttctctgtcttctcccaggattctgcctgtccaggtgctgtgacagcatttccattgccatcatccacccatttgaccagaccctcaaacatgtggttacacatgatcgcaccgtcaactgcactatttaatgcaggatcgatggacattggctcagaagcgatgcaaagagacagattgtatccgtcatcagatgcagcagcatcctcagccattaccggtgtggtagcggccatgcctacaaccatagctgctgacagggccagagacataaattttcttgcctttctcattacttttcctccttttttcttttttgtgctgcatgagaaacaacacatctattaaagagggatctctccctacaataacctgtttgcaggattgcaagagcatagctacatagcaatccatggtattcatcctttatgccctatttgtccagcatatggcatgcagcccaatgccccggctcatgctcccggaatacaggggcttccaccttacacttttccgtagcatatggacatctggtatggaaacggcatccgcttggcggattcattggacttggcacatctccctcaagaatgatccttttctttgtacggctaagctttggatccggcaccggcactgctgataaaagtgtctgtgtgtatggatgaatgggatgacggttcagttcatagctttcacccaactctaccagagagcccagatacataacgccgatcctgttggaaatatgacgtacaacagaaaggtcatgggcaatgaacagataagtaagtcccatctgctgctgcatgtcctccagcatatttacgatctgggactgaatagaaacatccaatgcagagatcggctcatcacatacgataaactccggcttaacagccagtgcacgggcaattcccacacgctgctgctgtccgcctgaaaactcatgaggataacggtttgcatgctctgtatttaatccaacctgtgcaagcagctccttgatcatgtctgcacggtctttcttatttgctgcaagcttatggatatcaattgcttccccgatgatctctcctactgtcatacggggatcaagagatgcggatggatcctgaaaaatgatctgcatctttctgcggtagggcagcatattcacagatttggctttgccaagaggctgtccatccggtccaagaggattatcataaattgcctgtccatcataaatgatctttccgcctgtaggctcatacagtcttaggatggttcttccaagtgtggttttcccacatccagactctcctaccagccccagtgtttctccttttttgataaaaagggaaacgtcctgcacagcctgtaccccaggacctttcactcctttaataggaaaatatttacgtaagttttgtatttcaaggagtttcttttcttctgccattttaatgttcctccttgttcatcagatcttctacacacagccagcatgcagaacggtgtttgtcgctgatttccacgtaaggaggcattttcttcagacagattttcatacatttctcacaacgtggtgcaaaaggacatccttccggaggattcagcatatccaccggtgttccctcgatggggatcagtctctcatagttctgggcatccacacgtggcatggagcggagaagtcctttggtatatggatgggcaggctcatagaaaatatcatctacaggcccctgctcaacaatctttcctgcatacataacagataccttatcacagatatctgcaacaactcccaggttatgggtgataaaaataatccccatgcctgtcttcttctgaagggatttcatcagatccaggatctgcgcctgaatagtcacatccagggctgtagtaggttcatctgcgatcagaagctgtggatgacagataagacccatggcgatcataaccctctggcgcatacctcctgaaaactcatgaggatattgcttcatacgcttctgtacattgttgataccaaccatttccatcatttccatagctctttgttcagcttctttcctgctgatcttgctgtcatgagcacgcagggcctccacaagctgatttcctactgtataaacaggattcaggcttgtcataggattctggaagatcatggcgattttattcccacgatattcctgcatttctttctttgtaagggcaagcatgtcctttccttcaaaagtaatgcttccgccaacaaccttacctggtgactgaagaagaccaataatggaataagcctcctggctttttccggatccggactctccaaccactcccataacctcaccataatccaggtcataggaaatacctcctactgccttaacctcaccggctggcgtaaagaaggagactttcaggtcttttacttccaataatttttcttttttttcagacattgttctcctcctttcttatttcttcagcttaggatccaaagcatcacgcaggccgtcaccaaacaggttgaaagcaaggatcatcacactaaggatcacagaaggcacgatcagacgataggtatatgtatacatgccgccaagggcatctgttgccatggaaccaagacttggaagaggtgcggacacacctactccaaggtaggacaaaaaggattccaggaaaatagcagatggaatctgcagacaggtggtaacaacgatctgcccgatacagttgggaagaagatgacgacggataatacggccgccggatgctcccagtgcccttgctgctgttacgtattcctgctgcttcagctgcagtacctgaccacggataatacggctcattgttacccagtacagcataccgaaagcgataaacatggaaatcaggtttggtcccaatacagacacaaaggacttcataggactgttgcctgctgaatttacatattctgtaaggattggtttcatagctgtggcgatcagaagtaccaccagcatctcaggcactgcataaatcagttctacaatacgctgcatcaccgcatctaccttgccgccgcagtatccggaaatcgcaccataaactgcaccgatcaccagcacaagaagtgctgcaaacacacctacggacatggatactctggctccgtacataacacgcaccagaatgtcacggccatacatgtcagttccaaacacatgtggaaaaaccttttctccggaagccttacgttccagttctttttgggaataaccaaacagatgctttttgatgccaagttccttacggagtgcatcctgatcgatctcttcttcactgtcactgcctgaggagcttccctttttagcagcaacctttgcctgggcacggatcacagcttcgtcctttttggtgaattcctcacctttggcttcagcctcttccttagccttggcgatcatctcatctacatcaaccacatctttctttgtccttgaggcgatctctgcatccagcttctgctggtcttccagggtatagtgataaggatacaggttctctgcacctttgttaaattcgtcatagccgtatggaaccagaaccggccctaaaaaagcaaataaaaacagtaaaacgatcacaccaagggctaccatggctaccacattctttttcagcctgcgccatgcatccttccaataggatacgcttttacgatcctgaataaagtcatccttctcttctttggatgcctttgagaagtcctccggggaaagatcgtttaacagattctcaatatccggctgcatactgacaggacagcgcttcattttcttcttttgttctgccacgatcattctcctcctttcgtaaggctgatccttgggtcagctactttataaagaaggtctaccacaaggttcatcaaaataataaatgctgcaaggaaaatcgttgtacccatgatcaccggataatcacggttctggatggactgtacaaaataacgtccaagtcctggaatggagaaaacgctttccactacaaagccgccgcacagggtaaatgctacctgcggccccagatatgtaataaccggaatcagggcatttctaagggcatgtttgaaaatgatcttattattcttaaggccctttgcccttgcagtcttgatatattcctggctgaatgaatccagcatggctgatctggtctgtcttgcagtataacacatagggtaaaatccaagtgcaaagcagggaagtacatatgccctccatccctgggaagcatcaaaaatcgaagggaacaggcttaaagcgtttgttcctgtaagtgtaaccagaagtacagatgccacaacaaagctgggcatagagatgccgagagtacatataatacgcagcacactatctgtgaatttgcctcgtttaaaagcagcaagacagccaatgggtatacctaccagcactgcccagcacaaagcaatggctccaacctttgctgataccgggaacatctctgtgataatgctgaggaccgcacggttcttctgcattttcagagatacaccaaaatcaccatgaagaatattcttaagatacatataaagctgaacgtaaaccggtttatcaagaccgtattttgcattcagtgccgcaagagttgtttccgacggcgttttctcactgagccagggacttcctggcacagcattcattaaaaggaaggtaagacatgccaccagaaagatggtcagtattgccattccaagcctttttacaaaatatttgcccatttttcctccttgttttcttttcccctgacacaccattcttgcaaataaaacaaaaaaagtctccgaaaacttcttttttcaaagaccaaatcaattccgttctacttcataagctctctactatgtctgttaggaaagtattgctctttactacggatagaacatccatccataaaatatgcagaaattatagcacccttttttgctttaatcaagtaacttttctcatttctacactttagcacaggaaaaggcaagtgaaagaacgctgcagttatggtattttccttgacatcccggtcaaaaacctgcaaaatgatgataaaaagaatggctgccacaaacatgtgcagccagaaggagtcgtgaatcttggtcaactttgattattaccgcattttctattttgtctgccagtacaaaagctttaccaaagcagcagaaatcctgaataataatcagcccaacattacccgctgcatgaatatcctggagcgcgaactgaactgtaagctgttcgtccgtactcaccgtggagtttcccttacccctgagggcaaacgtctgtatgaacatatttccgtagcttatgagcagatttcccttggcgaaaaggaactggaaaaggatcgtggtctggaaagcggcctgatttccattggtgccagtgagacagccctgcgtcttctgcttttagataagctggaatcctttcacaaaaaatatccacatgtacgtctacggattgccagccactctaccccggaagctcttacagccctggaaaacggacttgtggattttgcagtggtttccagccctgcccacgcaaaaaagcctctccagaaaaccctccttgtatcttttaaggagattcttctgggaggtcctaaattcgcccaggcagccaatacacccctgcacctgcaggatcttcgggattatccctttatttctcttgggggacggacttccaccagggaaacctatatggagctttttctccagcggggactgcctttccagccggatatggaagcatctgccactgaccagatcctgcctatgatcatgcataatcttggcattggttttttcccggaaatacttgcccaggatgccctgcgccgtggccaggtgatccagatccccctggcagaggagatcccagccagggatgtttatctggtacgggacagcacgaggccccaaagtattgctgtacgcaaaatgatcgccgcattaaaagaatgatcctgcatgaaacagatgtccgcacgatcatcaccgcataatcatcactgcaaaaaatgatcctgcaaatgcaggatcatcctccgatctggcagtccaggccacatactgcatggactgccttttttaatgtttccatatgttctgctgatgggggcagaaccccgtccagcaagtattcacgaccaaggccagtgtatttatcttgtcccagcctgtggtaaggcagcaaatgaatcttatctacccctggaagagttgctgcaaatctggcaatcccctggatctcttccacagtatcattaaaccctgggatcacaggcacccgtatcaccaggcgggtcatcccggaaagcgctgtttttcttgcattttccagcattcgttcattagatcttccggtaaaagccttatgtttttcaggattggtatgcttgatatccatcaggtacagatccagatagggcagcaccatctggatattctcccagggcatgcctgccatactttctatagccgtatggattcctctttcctttgcaccgcgaagcagatccctggcaaactcaggctggcacaggcattcccctccggaaagagtcatcccaccgcctgaacggtaatagtacgcccgatccttttccactacctgaagcatttcttccactgtcacatccctgccgatgatcttctcttccccctgcacgatcatcttctgaatggcaaactcctgggattccggattacagcaccacctgcaccgcaggatgcaccctttcagaaaaaggatggtacggatccctggtccgtcatgaatggaatatctttgtacatcaaaaatcctgcctgttgttttcaagtaatccattatgttctcctgtttctcagaatccctgctctgtccttcgtataatatcatcctgcaaggatctggacaatgtggtaaacaaagcgctgtatcctgccacacgcaccaccagatgcttataattctccgggtgcgcctgtgcgtccagaagtgtttccctgcttactacattaaactgcatgtgcatgcccttctggtcaaagaaggtacggatcaatgccacaaatttctccaatccctctcttcctgacaaggcagagggatggaatttctgattaaataatgtaccattggatacaatgaaatgatcaagtctggatacagaagtagctgctgctgtaggaccgttcacatccttgcctgcagatggtgaaactccgtcagcaaccggtgtatgggcatatctgccgtccggggtagctcctgtctgtcctcccagcggaacattggcagatacaggataaagacctgcatggaatctgcctcctcttgggttgctatactgctggataggccttgtatatgtataagcaacatctcttgcaaaataatccacttccggaatatcatttccaaacttaggtacttccaggatcttgttccggatctcttcgtaccggctgatcttctcctttgaaagcttcatggaaagcacagactgaaccactgcttctgtcatcttttcatcaacctgcctgcctgcattttcagcttctttcagtatgccctgggcaagatcctgtacagactgctgatccaggccttttccgtaattccagatcagtgcctcctttaattccccaagggtaaattgcttctcttcaaataccagcttcctgatagcataaagagaatctgccatattagcgatcccaaatccctgagggccggtaaagttatacacagctccgccttcctgggtggatttgcctttcttgatacagtcatcgatcatactggataaaaatggcagcgggcatctctccccatgagccacatcaattgcattatctgcattcaccatcaaggaaatacagtaatccatctgttgcttatatgcatcataaaagtcttcaaagctgtgcatctcactgatgtccttagtaggaactcccaccatctctcccttgtccataccctgggagaaaacaagctccaacggacggcacatattaaagaatgcagcatcatgccatccttctgtcttccccgccttctgtggctccacacatccgatgatgttatattccctggcatcttccaaagttaatccccggttcatcagtgccgggatgatcacctcatcattataatatgcaggcagaccgatccctgtcctggtaagctctgctgccttgatcagaagatcatggggcgaaccgttccatacccggatggacaatgagggctgaggcaggtttacatgcatggaggcctgaatacacataaaagacagatcattggtcacatcctccccatctttattctgacctcctacgatcagattctggaacaaactgtatcctgcaaatccttccgcagatacagcatctctgcatttattcagatcattcagcttcacccagatacaatccatcagctcctgggcagcttcccttgtaatcttccctgcttctacatccttcttataatatggatacatatactggtcaaatcttccaggtgaaatagaatgtccgctggattcgatctggatcagaagctgtacaaaccagaaagactgacaggcctgataaaagctttctgcgcctttggcaggcaccctgctgcagttgtcagcaatagccagaagctcttgcttcctgtccggatccgtgcacttttcagccatctgctgtgccagttcggcatacctggcagcataatccatagcagcctgacagcttatgatcacagcctccaggaaacgggactttcttgcatagtcaccatctccaacattacactgagccaactctgcttttgcctttgccatgatcccctcaaagccaatgttcagaacttcccagtacttaacagttacgtgccccacaccattataaaaatagttccctggtgtaaaaatattgtgttcaatcccccggatggcttccggtgccatataggaagtggcaagctcactggtggtcctgcccttccaatattgatggatctgacgcagttcttccttagtctcttcttttatgaaaaatgggtctgcacttctgcctgcaaccgtatccagttcattctccagccattgataagaaaactccgggaatgtctggcagcttctgggtgcaagggtgctgcttcctacgatcagttcttcctcacggatcacgatgggaaggtgatgcaggatatgtgcaaatgcctttgctcttctttgaatgatcggttctccctcagtctgctgataggattctgtcagaagtctggctcttgctgattcgatctttggcatctctgcatacagatgctccaccagtcttggaatccttgatgattttggaatatcgcttgtattatatttctccatgttactcctctcccaaagggccgcgcctatgctccgcaatcacagatgctttccaaagtcttttcgctgtggcagggtactccctccccaccttattttcctctattatatcgaatcgttccgcaaatgtcaacagaatcaacaccatatatccgttgtcttttgtgggtttatgttgtttttagtgttttttgtgtgaattgcataaaaaaactgcagcgcaggaaaatcccatgccacagttcagatattataaccattgttatatttttatcttaatcattagaagccttaaaacgctcaataaacatcagtaaaaagcttaccagcagaaggccgctgcacacccagatcattttatttccataggcaatactcagattaccgcctactccggcgccaagggcaaacaggaaaatgatcccgaagtaatagcctgcctgttccagcttcttaggatctttgcgtctccagtaagctgaaagggcagctgttccacttcgcaggttaccgatacacatggtacttgcataggaatatccgtggatcttccggaatgtctgtacctgcatggcacaggcaaaggataccagtgtggtagccagcatattcatcgtagatggaacgaagccaaccaaaaacaggatcacaatctctgctgccagaatcccttgtctccagtgaagacgtctggcatttttaaatttgccctgaatcttctcagcaaggaaaactcctaatgcaaaggacagtaccggaagcagataccgaagggcaatcccccagtcaccggcaagcagatgctgactaagcagcaccacgtttcctgtctgcgcatttgaaaagacttcgtctctcacattgtaggtgtacgcatcctggaatcctcctgaaagagccaggaatgcactgtttacaaaagcttcggacatctgtacatccgaagcatcagaaaacaggtgatgatgttcgtggtgttttgtttccatgaaaaatatatctccatcctcttttgttttacacagcctttcagggtaaacatccgaaaaaggctattaagcttatcagtacatataatacctgtcttctgtcaaaatgtaaaatgtatcgttcatatcattgccatataaaaaatatatagttactgatccaaccattcacagtaactatatatctcacattttacactatgaagttaattcaaaacaccttaatggcaaccactgcaatgcccacagtcaccgccacatcctttaccattctttttattcttgatcatactgcgaacgatcaggcctacaatcacaaccaatacagcgcctacgatcactgttcccatggaaattcctccttttcctgaactgacacttaaaagtctgacttatgcttctttcgttagtatatactaacaaaagtaatatgtcaatatctgtcctatctgaatttcttacagttaaatctgaaattcttccaaggaggaaagcttatcaccaaactctgtatcgctgcattcctggaaaacagcctccttttgcattttctggagggcagaggcagagcttttcaaagactggatcgttccggcccctgcaatacatcctcccggacaagccataccttccagcagatatccatcatatttgcccattttggccagctgcatcatttttttgcaatttgcaagaccatctgcactggcagtttttacggttcgctccggatccaaacggtgaatggcattcacaactgctgctgccacaccgccgctggcagcaaagcctcttccatctgcactggcacgtaccaaaggctctccgtcaggcagagaatcaaagtctacgccctttgccgcaaacataccagccacctcttcaaaggtaagtacaaagtccacatagcttcggatggattttctgcttgcttccaatttcttggcagcacatggtcccacaaaaactatcttgcattccggttcttcctgcttgatcagccttgctgtcagtaccatcggtgtcaatgccatggaaatacagtcagcctgctttggaaacattttctttgccatcacagaccaggccggacaacaggaggttcccataaacggaatctttgccggaacttcttctatgaaatccttggcctcttcaatggcacacagatctgcaccaacagctacttcccgcacattcttaaacccaagtgctttaaaagcttcccggatctttgtatccttaagcccttcaaactggcctgcaactgccggtgcaacaatggcatataccggcttatcacttttgatcgccataatggtctggtatatctgccccttatcaacaatggcactaaatggacagcttaccagacacattccgcaggacacacacttatcctgatcgatctctgcccttccatattgatctgaatggattgctcccattccacaggctgcagcacaggggcgttcctgcttgataatagcattgtatggacaggcactaacgcatttcccacatttgatacacttttcctgatcaatataagaatggcccttcaccatagatatggccttcttgggacagacctccacacagggatgttccaggcagccctgacatccttctgttaccatcactttcttctctgcacaggaattgcatgcaaacttgatcacattaatcagcgggggttcataatacttgtcctcgatcacacttgcctctaccccctgagaaataggggcatgctctgaaatactccgaagggacattcccatggcaacacgaagacgttcgcctacaactgcacgctccaggaaaatactgtccctgtatgtggcaatctcgcctggaatgatcttgtaaggaagcttttccagattttcgattccgtcttcttcatatgccatgcgggcaatttccgtgaagatctgatgtcttattttcgtcttagacgaatataatcctctcatttaattctcctttttgtttaatatccgcaatctgtagtaaattatcctccgctataaaaatactaacacatttctatccggtctgacaagggcatctgttacatcaaaagcatcacacctgcagcttcatctgaccgtctttaatatagcccatatttttcatgccccgatagatcacataggaaactactgccggaagaatgaaatgaaaaacaagaatcttcagaagtaccatcaaaggctcttctgctgcagtcatagtctgataagtcatgatctgtcctaccagtccggaagtacccattcctgcgcctgtaggattattcgtcatatgaaaaggccctatgatcgcaatcggtcctaaaatagcagatgccaatgtaggcggcaaccatatcaaaggtctgcgtacaatattgggaatctgcagcatagacgtaccaacgccctgggcaaacagaccacctactccgttatctttaaaactggttacagcaaagccgatcatctgacagcagcatcctacggtagctgcacctgctgctactccgttcagtcccagaatgatcccaagggctgcagaactgatgggcagtgtaagagccatacccataaggacagaaaccacgattcccataaggataggctgctgctctgtaccccagttgatcattcctccgatccagctcataaactgagagataccaggccctaacagcattccaacagcaccaccggatataatggtcactgcaggagtgatcaaaagatccagtttagtctttcctgctaccagatgtcctaccataattcctacataagcagcaataaaggcacctaaaggctctccagggccggacagcaccatggctccctgctctgaaaaaaatgtacctgccagaatatttgcagcataagcaccaatcatacctgcagctgccgcagacagaagaacataagtggattccttaaacttataagctactccaataccaataccagcacctgtaagtctctgtgcgatcactgcaaaggcactaagataatggccataggttccgcccatcagatcaccgatctgttttaaaatagtaccgatgatcagcgtggaaaaaagtcccagcgccataccgcttaatccgtcaataaaaatattggacaggattttcttaaatgatttcatttttctctccttttcctaatcatccggcatttttgccgggaaatccgtttgattgtatcatactttctgcggatatccaatactcagttggcaaaggaaagaagagtgcttgtgaattgctgattttttcacattttttatcttgtacgaaaacctgatttttgctagagtgtataggaaatggtcgattcagctgttgtattttcatacaaccttttaaacttacaggaggttctcatgatcatagattttcatacccatatttttccggataaggtggctgttgccgccatccccaagcttgcttctgttataaatatctctcccagcatggacggtaccatccaggggcttcttgattccatggacagggcaaaggtagacacaagcgtgatcctgccggtgatcacagatccacatcagtttgattccatcatccgctttgcttccagtatcaatgaaagccaggacaatacccatcccagactgatctcttttgcaggaatccatccggctatggataattacaaagatttgctccacctgatcgcagcccagggcttttccggaatcaagcttcatcccaattaccaggacacatgctttgacgatatccggtatctgcggatcgtctatacagcttccgaactgggactgatcgttcaggtgcatacaggagaggatccctatactcccggagaacagttctgctccccggatatgatcctccatgtaatagaagaaacagccccgccaaagctggtgctagcccatatgggaagcaacgaacactatgacgaggctgaagccaagctgtgcggtcagaatgtatattttgataccgcctattctattcaacatatgtccgaggagcagctggtacgcatgattcatcttcatggcgcagacaaagtactgttcggcagcgatgccccctggacagaccagagggcagatattgaacgctttatgtcttttacaggactgtcccttactgaaaaagaacagatccttcatgggaatgcacagcttcttctgggcatttaaccagacctgccatgtggcagcacaaaaaagagctgttacatatgcaacagctctgataaaatctgattacttttgttacctttctattgttttacaattctttctgttttctaacaattctcatagccgtaagcaggattgcacccatagccaataataataacgtctgccacaatgcggcatcgctggcatctcctgtcttgggagaattggtgctgtaacctgagccgccatttcctgaaccaccggtaccaccgtttcctgagccgccggatggtccttcggtcacagttactgtaactgtaggctccggagtatcagagggctttggctttttagtaggtgtgggtgtcttggacacagtcacagacggtatcggtgtagcagatacttccggtgcaggtgtggttgtaacctgtggagttggtgtattcgttggtgtaattgttggctcggttggggttggctcctgataccggttggtcactgtcacatcacagtctgtaggaagaagctctgtcttatttccttcaccgctcttgccatttgtggaggcccatcctgcgatccagttcccctgctttgtttcggttacacggtaagcggtgcactcctgcaaggtgctaaactggatgggttctcctgcttttaactggaacttatactttcctgtaccattttctacaggggtacgctttccatctttcagctgatacaaattgccggtgtaggcatttccctgtccatccagaagctccatttcaaaatcaaagctttcctgggtatcttttccttctactgcctttgtcactgcaaaattcttaaatacaggaagattaaacttaatggagcagtcagaaagggttcctcctctttccaggtagaaaaagctgaagatatgctttgttcctgctgcccatgcagaatcatcccacttgccgatggcttccggatagtctgcaaaaacagaggatagtgcctgggtcctggtgtctccggtaacactgctggtcacagtaaaggttccctttgtaaagttaatgcttccggataccgcttcatggataccgcccatgtcaagcaccagctgtccgtccacaaacagccaggcatcatcatcaccgctgaaagaaaagaccatatccttccgtgcggaaacatttccctgatcatccgtaatagctaccgtgccatcttccggaatgataaagtccttttccatgctcatcccgaaatggtaatctacggttttcagctgatccagcagataaatacccttggtatttttctcactggttccccatactccttcgtcctcaaagctgttgaatgggaaaaagcctgcccctttctcatcccagccctcaataccgatagccttatcatactgatagatcttgtttgctcccggatcataaccggcatgattgacgctgctctggtagctgtactcattggctgaaggatcatatacaaaatcaaagccaacattctggtatacgctcttggtaccgccgtttacagcagcaggcaccactgaagtatcaaacaatgaaaatggcgttgtgtaattaaatacaggcagcccgtcctctcccagctgattcttcaggattcctgtaaatatattattgtgccaggtatttactgctgtgtttttaacatttttcggatcataccggaatctgtactgtgcagtctgtgacccaagtacaaaatgtgcccattcaccaaaatcatagtcaaaaagcgtaaccggcagggatcgtacattggtcagcctgcttactgtctcactgcctcctgcatccacatttttcggggaggtagcgatcaccagatgctctgtctttggatcttctgtcgggaaatgggaaagtgttccggtaaattcatgtctgccgggatgctgtacatccgaagggatctggcaggacccatgcaccacatcatactctctggcattgctcagccagaccctgtaagagaatgtatacagatcaaattccggtacaataacgatagcctcgttatccttcaggtgggcgtgtaccctataaccactctttgcataaagccatccacctgttcgatagttttctgaatccaaaatattaatccagtcactggcatcattcatcttctctgccttatgccagtttccttcttcatcctgtcgatacaaccatgcattgaaatacataaatccatagttttcattgccacaaactccatcctccgccatatcaagttgtacattaaattcagcaagttccttggaacttccgccaatatttttattctgtattacaagaccattctctggaagactattttcaggaagcgtctgcttagataatgacactgttcctgtgtctaagccctgcaatacaaccaatctttccttttccgaagtataattgacttctccggtcactccataggacacgttttgtgtatatacagtttcaggtgatgtattctgccagtctgtcgtgtgccagcgatttgtctttttcaggtacgtataatattttggcttgttatctcttgatattttattgatcaaataagcgtaacttactgttccagtctgaggataaataacattgccattcttgtctgttatctcatatgctccatctttgcgttgatcattccaaaacagataattatcatttcttattaatgaagtagcttttttacttggaaatatgggacgcaaaacctgaataacctcactactgttttctacataaatctccctctttcctttagggattctatatataaccactttcggtccataatttcctgaaacaatcgtatatttgccatcagcattcaactgatacttttccagtacataccaactatatttttctccgttattcaaagctggatcaatatatattgatccggactcacctggcagaaaaatgaagccgtaattaggaagaccattctccagaagcccgcacccctgtatcttttcaccggtacttactgataaaactgcttcctgtaaatactttccatcatcacataccgattcttttccataaaaaacttttgcctcgttttcaatttcagttccattctcaccgataacagataaaatgtctccagttccattcagagaaagactgtaatcaaaattaaagtatcggatcttctgcgtactgccatataaagtgtctggaaagactttgttattatccggatcatttgattttaatgtgctttcatattttccagtttcaaactctcgtcctgtcaagccagtgtattccggtgaatatggaatgatacacaaaatatctcctgtctgtaaatccattccggcaagattcagacttcctccatcttcagcagtcacagaagtattttgggcatccactacaatgtatgtaccatctccttgattccggaataatacagcagccatcctggttccacctttacctgtgattttgtatgtccagtaaatcccatattcaaaatctcggtattgatcatctgtagaatatcccataccagcctcaccatttttatgttcttccggtactgtaatatttactttcagcattcctgtcagaccgtctgccggtatttccccaattttcatctgaaatcctatattaggaagaccattttcgcccaatttatatagcataccatctgtctgaagctgtgttgaaatttccagatccgctcccactgttccttcatgttctgcggttccgtttccacaagtaagccatgctccctttaccataccatctaccaaagtgggactactctgtccatccagggctttcacacctgtgattgaccattcctgtgtgctgttcagaaaaacctgatactggaaacaataattacggctttgtgaattttcataatttttcacactacttgttccggatgtatagtaataagtataacaatctccctcgcaccttaatggtatgattgctgccacttcatcgggcttgggattaacataaaaacaatgataataatcggacgtatcctcataattttcaatattctggatgtagttccaacctctattttctctatcttcgtcgcttaattcgtattttcctgtattctggttccatttgtaataaaggcacgctgcccacagccctggagtttggtaattttcaggctgagaattatgcagcttttcccaacaggggtttactcttacaaaatatcctggatatctggtttcatcagcataacctgttactgcttccgtctgtgcatttccgtggatcagaagtgcataattaggcagaccattttctttaaaagatggaactgcagcctcttttgacgttacgttaagctgcggatttgttatatcggttacatccgaagatacctccgtgctccagtattgtcccttttgtgtccattctccttgcacagcttccacggattctgtgatagtatcctgaccttgttcgccataatggttaaattccaccaacagccgataatgatatatttctgaaacaattggataaagaaccaggcattctccaggagacaaatatcttcttgtttctgatctgtataattgatgccaattttgtccgttatctgtattttcccattttccttcttcattctgtgagtatttttcagcaccaatctcaaatccataatcgtctgattcgcattctttaacaacgtcttcataggcataatggtagatatatttactcttccctgtcagatgtcctgtcaccgacacaactgtccctacctctcctgcattacgaatgaccacagctcccttaggcaatccgttctcctggtattcaagaacctgtttagaaacagcattccgtattctgatgacagatcgtagattttctgttgtcagctgctctatagggtgctccccatctccttcatatgtggtccactggcctgtatctggaagactgcacccttttcctcctgcatcggaaacctgttgtatttcacaggtcttaatttgttcgccttttaatttgaaagttgtttttccggcccatgaggaactgttctgtgccagtatactgtccgtaagatagtaaaattctcttttgtaactatccaaataataatactttggcaagacaaccattcttatggagctatactttcccacatagctttttgcttcccttatcacattgaaagaagaagcactattcattgtaatgtattcataccggttatcgattttcccatatagaaaacaataccaatcgccatcatagcttcccttgtaccatatatcatccactttaccttcattgtaagaaaagttgatcttactgtaagcttccagtaatgaaccatccagtgtataatccacaatcattccgcaggccggattcgccggatcctctataatcttagtgctatcatttacaggctgaagatcctcgccctccaacagatctgtttctgcattttcttcttccacatcctcaatttccatgtcctctgaagcattatcatcagcttcatccacatcctgattctgggattctgtcacttcctgaaactgcggttcatcaccttccggagtttctgcctggttcttattattaccgtcctcttcgtctgtagattcgcctgtagattcttccggaagaactacttcctccggttcatctttactttgttcctctgttaattctgccggttcatcttcgccttgttcctcggttaatactgccggatccgctgtgccatctgtaatctccccgccatcggaaaactcagcaccatagcttatatttcctgccactgcaccttggaaattgccgccaataaccatggaaaatgcaatcgtcatagccaacagcctgcttattcctttcttcctcatacacctttcctcctttataatgcctttcttttttaactcattctctgttgctgtcccagcttttcattttaaattatacgtctttactataatctgttctatatcacatttttcatttttataaatttttttcgtataaaaagagtacacaatccatgtatccacaatctcccggctaatttaccaggatatcggatacatgaatgttagattaaaagtctggtacagttatttgcagaacgctgtaccaggtaaaattcaagaatgcctccggcaggattgcagaggctatatcagctgggagatgactcccagctgatataattgaaaaaccgtccaaatattcctccgagccataaacactcatggaaacctggacggttattttcatatctgcttatttacttaatcctcataatgtcccctgcaggcaataatccacagaaaaccattcccatctatattgtaaaccagtctgttcacatcatcaatccgcctgctccatgcttttctatggcgtaatggttccggctttccaatgccttcagacaagccttctctttcaatagacttaatgagttcgtttatgcgcttcaaagtccttttgtcttgtgtttgccaataaagataatcatcccatgctctgtcagcccataactttttcattcatctacctcaagcagttcatgttccttccccatgcctgcagataattgtgcaattcctctgtcaatcatagcaagatattctgcattacgagcagctttttcaagctgattgtatctttcaaggctcatgattacaacattcttttcgcctttacgtgtaacaataacagtctcgtgattatctgttgcttgatcgcaataatcttttaagtgatttcggattgtagaataattcacagctaacataatctcaccagcctttcataattattcaacttcttgtactatttattgtgctatttcctgtacaattattttaccctattattctatggcagtcaatccaattattctacatttctctcttttttatgattcccctgtctgaaaacctatcatatgaaagttcaagaatgcctcggcattcttgctgcgaggtgcgccggaggcttatttacttaatcctcataatatcccctgcaggcaatcatcccatgcctcacttgcgttcagcctgctgatcatccggcaaagcaatcttctgcttaacagacactttctcatcatagcaggtaaagatctgatccactttctgtttgttcaactttggtgtaagcagacttaccaccggcacaacgaccagtccggctaccatggcaacagctcctgcattgataggggatgcaataaatttaaaaaacatatttgcaactgtgatgcctacccctgtgataaagcttgcccaaacagccagcttagtggtgcctttccagaaaagcccatataaaaacggtgccagaaatgcacctgccagtgctccccaggaaatacccatcagctgggcaataaatgtaggcggatccaaagccaggatcacagaaacagcaataaagaacatgatcaggatacgcataagcaaaagctgctttttctcgcttaaattttttgcaatatttcccttgataaaatccagtgttaatgtggaactggatgtcagcacaagagaagacagcgtagacatagatgcagaaagcaccaggatcaccacaataccgatcagcacatccggcagggtagatagcatagccggaataatagcatcataggcaactgcaccttcagccgtgtagatcccagctccgtcaaaaagccttccaaagcctcccagaaaataacagccgccggaaatgatcactgcaaaaacagtagaaatcactgtacctgtctgtactgctttctcgcttttgatggtataaaatttatgtaccatctgtggaagcccccaggttcccagagaagtaagaaggatcacgccaagaagattcaaaggatccggtccaaaaaaggatgtaaaggctcctggctggccaagagtagcaggcacatcactggacagctgggacaggcttttcactgcattcataaatccaccctgtccggccagtactgccccgatcactgcaatgatcccgaagatcataatgattccctggataaagtcattaatggcagtggccatatatcctccaaggatcacatagatgccggtaagggtagccataagaaccacacatacagaataaggaatgtcaaaagccatcccgaacagtctggacagtccattatataaagatgctgtgtatgggatcaggaaaataaatacaatggcagaagcagcgatcctaagtgcatgactgtcaaaccgcttgccgaaaaagtccggcatggtagccgcctgcagatgatgggtcatgatccttgtccttcgtccaagcaccacccaggccagaagacttccaagaaaagcattcccaagtccgatccaggtagatgccagtccatatttccatccaaactgtcctgcatatccaacaaatactactgctgaaaaatatgaagtaccataagcaaaggctgtgagccacggtcccacattccttcctccaagtacaaatcctgtgacactggaagcatgcttcctggacatcactcctactgcgatcatgatcccgaaaaagatcaccagcatgatcagttttacagccataaaaaaatcctccctcatttacctgtttgatgctgcatttttgttgctgcacttttgttatttcatttttgttgttacattttttattgaacttttgttatttcattttgctttgttgcgttaaagcgttacgcttttactcgttaaatttcaagtagaaacagtataccattgatctcctggttccgtcaactgtttttcttcacttttttgtgcattttatcttgttgaatccatgatcctgctgattcttttgttgacattttgtgataaatcggatatgattacttcaatgaaccgacgctttaacgcgcgaatattttataaaatgttttaaacaaaaaggagttatttgaaatgcctattactgagcttctggaaaagaattgccgtctgtacggagatgaagtctgtcttgtggagatcaacccggaactgccggagacccggcgggtcacatggaaagaatttgaactgatcgagccggaacgtgccccctattacaggcgtgagattacatggaatatcttcaacgaaaaagctaaccgctttgccaacctgcttctggaacgtggtgtccagaaaggagataaagttgccatccttctgatgaatggccttgagtggcttcctatctactttggtatcctgaaaacaggtgcactggctgttcccctgaattaccgttattctgctgatgagatccagtattgcctggatctagctgatgtggacatcctggtattcggtccggaatttatcggccgtgtagaggaagtagccgatgaaatcgggaaacacaggcttttgtactatgtgggtgatagctgccctggttttgctgaagattatatttcccataccgccaactgttccagccagtcgcccaagattgctatttcagatgacgattacgctgccatttatttttcttccggtactaccggatttccaaaagctatcctgcacagacaccgtgctcttttgcatgccgcccagacagaacagcaccatcatggccagacacaccaggatgtgttcctctgcattcctcccctgtaccatacaggagccaagatgcactggttcggcagtctgctttccggcagcaaggctgtgcttttaaaaggtgctaatcctgaatttatcctgcaggcggtttccgaagaaaaatgtaccatcgtatggcttctggttccctgggcacaggatcttcttcttgcccttgaccgtggagaattaaaacctgaagattaccagctgtctcagtggagactgatgcacattggtgcccaaccggttccgccaagcctgatcaagcactggaaggaatactttcctcatcatcaatatgacaccaattacggacttagtgaatccatcggaccaggctgtgtccaccttggtgttgaaaatatccacaaggttggcgccatcggtgtgccaggctatggatgggaagcaaagatcattgatccccagggcaatacggttgctcaaggtgaaaccggtgagcttgctgtcaaaggccctggcgttatggactgctattacaaggatcctaaagctactgcagaggtgcttcacggagactggttatataccggagacatggccatggaggatgaagacggctttatctatctggtagaccgtaagaaagatgttatcatcagcggcggtgagaatctgtatcctgtacagatcgaagatttcctccgcacaaatcctgagattctggatgttgcagtgatcggtcttccggataagcgtcttggagagatcgcagctgccattatccaattaaagccagacagtacctgcacagaagaggatattaatctgttctgccgaaagcttccaagatacaaacgtcccaggaagatcatctttgcagatgttccacggaatcctaccggcaagatcgagaagccaaagcttcgtgagatttatggtgctgcccatctggtggctacccagagccagggataatctattacataaaagctccccaagttcctcaataattaagggacttagggagctttccgctttgttatattactttatgatagatttcttttggaaccctggctttcacatggatcccattttcagtatattcttctgacaaaagctgtccgttctcacggatcagctgtattttcccggcttcctgatatggaaatacccgttctacataaagcagttcctctgaaatcagttttcccagcagttcctgcagttcctgcaggccttctcctgtctttgcagaggtcttaactgtataatcagcccgaagatcgcgaaccgtcacgtctccggctacatcctgtttattgaaaacagtgatggtcttcttgccatctgcccccaattcccttaaggtatcataaaccacatgcatctgcagctcaacctgcggattggaaacatctgccacatgaataatataatctgcatactttgcttcttccaaagtacttttgaaggcctccaccagattgtggggaagcttacggataaaaccgactgtatctgtaagaagcagctgctgcccgtcttccagggtcaatgacctggtggtaggatccagtgtggcaaaaagcttatcctgggaaagtacctgggatcctgtcaatgcattcagaagggtagactttcctgcatttgtatatcctacaatagctgcagtcttcagatttccccggcttctgcctgtacgcaaaagttcccggtggcgttccacctgggaaagctcttctttcagggcagtgatccttttgcggatcagacgacggtctgtttccagctttttctctcccgggcctcttgtgccaataccgcctcccagtctggataaggaagcgcgaagccccaccaggcgggcacttctgtaccgcagctgcgccagctctacctggatcttaccttcacttgtggttgcatgctttgcaaaaatatccaggatcagaagcgtcctgtccataaccttgcattccagttcatgctccagattattcatctgtgccggtgacagctcatcatcacagataatgcctgtggcatccacagccagcatcagagaacgtacctcttctatctttccctttccgatatacgtacccggatgaacagcctcacggctctggatgatcttaccggcggtaatggctcctgctgtatctgccagctcttccagttcatccagggactgctgtgtatcctcatcccctacctgtacaccaaccaggatcacccgttcttcaatctcatttatatattccatctatgctcctgtccttgttttcagaaaagccacttccttctgcccatctgcatcatccggatacatacccacataagtctgtgccttatcaagggcagatacaaaatccagtttcttttcataggcgatcacttcattaaacagaaggctttgcagatcgtctgtatctgaaactgtgatcccgctggatatattcgtcagtgcagaatcataattaccctctgcaatatcgcacaaggcaaggccattgtagcctttggccggactgtatccatctttagtgtcaccatctcccacagaagcttccacataattctggaacatggtccttgcattggaaatatcattctgtgccagataaaccattcccagaagaagatctgcttcctcttctccgtcgtttgcagcctgggtcagttcctgtctggcattatcataatcttccatgtaataatagatccggcccttatcacaatgactttctgaatcctttgtttcctttttaagggcagcttccagataagttgtaccgtctgcttccatatcctgatcaagataaataccgtaaatccggattgcccggtcataggtaggatctgcatcaaaggatttcccaaaatcagaagctgcttcctcataagagtccagcagcagagctgcattaccggaaagaaaccaggtatctgcatccatatcatgatccttgatcagtgtctggcagtctgccattgcatcttcataggatccggcttttatctctgctgtagccttataagcaaggatatcctttgcaagagcctttcctgtatcctcacatgtaagggcactggcaaaattctggatggcatcctggtaatctccaagacgcaggctggcaatccctgctccccggtaagaaaggggcagctttactttgttctgcacagaagtaagatatccttctctggcatattcatagcttccctgtgccaggtctttatctgcctgttcaaaaattttctgattgtcatccccgcagcctgcaaaaagactgatccccatacaggctgccagaatcgctgctgttctttttattttcatcttattctacgatcagcccttcagcttctatcacctttacaacatcgtctacatatttgtggcatgtttcatcagactcagcctccaccataacacggatcaaaggctctgtaccgctttcacggacaaggatacgtccgccatctcccaactcttttgctgccttttcaacagctgctttcacctttgggttctcccttgcagtctgtttgtcagccacacgtacatttctcagcacctggggatacaccttcatctcctttgccagatcgcaaagagtggctttcttttccacgcatgcctccatcagcatcagagaggtaaggataccgtctcctgtagctgcatatctgctgaaaataatatgtccggactgctctcctccaatgctgtaattattttctagcatattctctgcaacatatttgtcacctacagcagtctgttcatagcctatgccttcccggtcaaaagctttgtaaagaccaagattggacataaccgtggtcacaactttattgccgttcagttttccttcttctttcaggtatttgccgcatacatacatgatcttatcaccatcgatcacatttcctctgtgatccacagcgatacagcggtctgcatccccatcataagcaaatccgatatccagccctttgtctaccacaaatttctgtaaaacctcaatatgggtggaaccacagtttgtattaatgttggtgccatccggtgtattattgatcacataggtctttgcctgaagagcatcaaaaacactttttgcaatggcggaagaactgccgtttgcacaatccagaccaacccttacattcttgaaatcacggcttgggatagagatcagataaccgatatagcggttacgtccagatgcaaaatccacagtacgtccaatatctgcaccggttgccagcggaagctcctcaatctctccgtccagatatgcctcgatcctggcttcgatctctgcctcgattttctgcccattgccgtttaacagcttgatcccattatcataaaaagggttatggctggctgaaatcataataccgcagtcaaaatcctctgtacgtactgcaaatgaaacactgggagtagtggtcacatgaagaagatatgcatctgctcctgaagctgtaagtccggctaccagtgcatactcaaacatataactgcttcgtctggtatccttgccgatcacgatctttgctttgtgtttccggccataataccatccaacgtaacgccctaccttaaaagcattatctactgtcagcttaacatttgcttctccgcgaaaaccatctgttccgaaatattttcccattgcttaagtctcctctcaatacaggccgtttggataaacgcctgcttctgtcaggtctttgaaagccttcataaccacttctttgtcctcctggtaggtaacgccaaaccaggtatccacggattccagtacatctacctgtaccttacctgcgtgaagaagttcatcgatcaacaccggaagaagatattcttttttcagttcacccggctgcatatctccaagaaattcaataaatcctttatgcaggatctccataaactcaggagtcagtccccacatattcatagacacaagggaggacgtatccagtgggataacatggccctcttcccttgattctgctcctgtctctgttttaaaaatgttatgtgtttccgttacaccggtaagcctgccatcctctacatgacatactcctctggtaacgcttccgttgtcacttaaggtattgcccagcctgaagcctgccatacagatatgggtggtcccatcctgcgggtgctctgataccagataatcatgtacctttacgtaggcttcttttccgtagtaatcatctgcattgatcacggcgaagggctctgtaagcacatcctttgcacataaaaccgcctggcctgttccccatggctttgtacgtccctctggtttttcaaagccttccggcagatcgtcaagttcctggaacgcataagccacctctgcgatcttctctactctggcaccgatggtagcccgaaattcttcttccagatccctgcggataataaatacgatcttgttaaagcctgcctccagtgcatcacgaatagagtaatccataatgatctcacctttcggtcctaccggggcaagctgtttgatcccgttgccaaatctgctgccaacaccagctgccataattgccaacgctgttttcttcataatcaaccctccatgtaaataattcaagaatgcctttttccgatttcctcattaccattataacagaaaactgatctatgttcagttctcttcactcattttgcttaatttagcagcctgatcagccgcgatcagactgtcaatgatctcatccagatctcctccaaggatactgtccagacgatgaagcgtaagcttgatcctgtgatctgtcacccttccctgtggaaaattgtaggtacggatcttctcagatctgtctcctgtaccgatctggcttcttctggcttcagcctctgcatcatgctgctttgccagttccatctcatacaaccgggaacgcagcacctttaaagccttgtctttattcttcagctgggacttttcatcctgacaggaaatcacgattcctgtagggatatgggtaagacgtacagcagagtccgtagtattgacacactggccgccattaccggatgcacggaatacatcaaacttacagtcattcagatccagatggaaatcgatctcttctgcctccggcatgatcgccactgtacaggtagaggtgtgtatcctgccgccggattccgtttcaggcacacgctgtaccctgtgtaccccgctttcatatttcagtctggaataagcccctgcaccattgatcataaaggtaacttccttaaaaccaccgatcccgttctcattcaggctcatcatttcagttttccaccgtcttgattctgcatattttacatacatacggtagatctcagaagcaaaaagtgccgcctcatctccgcctgctcctgcacggatctcaacgataacattcttattatcattaggatccttgggaagcagcaggatcttcagctcatgctccagttcttcgatcctcttctttgcctcagacaattcatctttcagcatttcccgcatatcctcgtccttctcctcttccagcatggaaagactgtcctgaacggtttctttatttttcttatattctctgtaagcctcaacgataggctgcagatcgctctgctctttcatcagcttctggaaacgctcctgattggctgttacctgtggttctccaagctcattcaggacctcttcaaatcgcagaagcagatcatccaatttatcaaacatagtgtctccttactcatataccgtgtaaacaacaattgcagctgtccagtatattcacagttacttcctgtcaaatagttaccaacaattaccattttccaaatacaactctgtccagaccggacagatctttctttctctgtacctcagaaaaaccggcagcctccataagctctgccacatcctctccctgatcacagcctatctcaaaaagaagccagcctccttttttcaaatatatccttccctctgtacagatctttctgtaaaaatacagaccgtcttcatgaccgtcaagggcaagcctaggatcatgaaactttacttcttccataagtgtgtcaatctctttggtaggaatgtacggtgggttggaaataaggatgtcatactgtctgccgtccttaagctcctttgcagagaacagatcactttgtaaaagctccgcccggccatccagctctagctgccttctgttcctccttgctacttcaagtgcctccaaagacagatccactcctgtacctgtgctgtccggcttttccagaagcagactgaataaaatacatccggacccggtacacatatcaagaatctgcagatccttccggccttggatagcttccagtgctgtctctaccagcacctctgtatcctgcctgggtaccagcacatgctgatccacataaaattcatatcccatgaaaaaagcctgatgagtcagatgctgtaatggaatatggctgcttcttttgcggatcagttcctgataccggattgcttcctttgaatctgccatttcatctgaatgtgcaaaataccaggctctgtttttaccggtcacgtattccagaaggagccaggcatccagcccggcttctgtgattccggatccctccaggatctttttcccatttttcagtaattcttcaaaagaactcatgattctttctcttctgccaaaggtacatccaggccaaactcttctttcagatatgctctccagtcaaatacagcttccactgccttaatggcaacctctgccatatctgcggtaggctccttggttgtaaacttctgcatggccagtcccggcttgctcatgatctctgcaaacttgctgtctgtacgtcctgcccactggatgatctcaaaggaaacgcctgcaacaataggcaccatcagaagacgtccaaacaggcgcatccagtaacctggtaccaacacaaaaataaagtgcaggaaaatacttaccagcataaccagaaacaaaaagctggtgccgcaccttctgtgcagtctggagcttttcagtacattctctactgtaaggggaagcccatgctccacacagttgatacatttgtgttcagctccgtgatacataaaggttctctggatatccttcatcctggagatcaggagcatatagcccataaacaatgccatctttacaaaagcttctgcaatggttacaagcacttccgatgcccctaccttacggatcaggctggcaagtgcataaggcagaagcataaatgcagccactgaaatcaccacagatatcgctacagttccgtaaagaagccaacgaaactgcttatcctcttttgctttcttagattccagttcttctgctgtcagctgctgattcttctttgcctcttcctcgtcttcctcatctcctgcaatctcagctgaaaacatcaggcacttggtacctaccaccagagactccacaaaactgacaactccacggatgataggttttttccaaatcttcccgttaccgaaaatgcatttgtaatcctcaacctttaattcgatttctttatccggcctgcgtacggcgatggaatacttgtccttatgacgcatcatgatgccttccataactgcctggccgccaatgttggatgatctcattatattattatattctccctgtaaaatgtgaaataagaagatgccggagcaaaaagctctgacagtaatccctgataaccaagtaattttctataaagcaaagaaaggttgagatttcccaacctcaaccttctcactgtaccttattcttctaattatttgttcagaccatatttcttattgaacttatcaatacgtccgcgagcctgagcagccttctgctggcctgtgtagaatggatggcatttagaacagatttctacgtggatatctttcttagtagatcctgtaacaaatgtatttccacagttgcaggttacagttgcctgataataattcggatggattccttctctcatgattttcacctctctgtattcgttctatttccttctcgacttccactggtgtgaaatcgacaaattcactattaaacagctttctgattatatcatactgaatctggaaatgcaagttatttataaaattttctgttttttaatggtttggacaaattctgcatttgttttcgtgcgtgcaaacatattcagaatctgttctactgcatcctcggacttcatgccgtttaggcctttacgcataatatatactgcttcctgttcttcacggctaagcagcagatcctcacgccttgtaccggacttctggatatcaatggccggaaacacccgcttctcctgcagcttcctgtcaaggatcagttccatattaccggtacctttaaattcctcataaatcacatcatccatcttgctgccagtatctacaagtgccgtagcaagaatggtcaggctgccgccttcccgcatgttacgggcagcaccaaagaaccgcttcggcatatgaagtgccgcaggatcaagaccgccggaaagcgtcctgccgcttggcggaatgatcagattgtaagcacgggcaagtcttgtaatagaatccaaaaggatggttacatctttcttatgttctaccagacgtctggcacgctcgatcaccatctcggataccctcttatgatgctccggaagctcatcaaaagtagaatagatcacttccacgttaggtccgtagatagcctcccggatatccgttacctcctctggtctctcatcaataagaagaatgatcaaatgcatgtctttattatttctcaaaatggacttggctacgtccttcagaagtgtagttttaccggcttttggaggcgatacgatcatacctctctggcccttgccgatgggactgatcagatctacgatcctcatggcaactgtgccgcctggccgttccaggatgagacgctgattagggaatataggcgtcatatcctcaaaattatatcttttgggtccttcacttggatgtaatccattgagggatgttacataaagaagtgcgctgaatttttctccctgggtcttgatccttatgttcccctggataatatcgcctgtcttcaaattaaagcggcggatctgggatggggacacataaatatcattatctccaggcagataattctcacagcggataaatccatatccatccggaaggacttccagaatcccgttagccttctcaccactgtccagctgagcagcttccccttttccctctgactttatttctggtctgctctcacttctgacctcttgcttcatctccggtctgctctcacttctgacctcttgctttgtctctggtctgctctcacttctgacctcttgctttgtctccggtctgctctcacttctgacctcttgctttgtctccggtctgctttcacttctgacctctggcttcgcctccggtctgctctcctgctttacttcttctcttcccttgggcgtattttcattttgaagcgagctttctttctcatcttcctctaacatccgctggaccagttccggcttccgaagtgcagatacccctttcaggcctcttgcttttgccagttcttttagagttgccagcgacaacgattcatatttttctctcattacaattctttacctctcaataaaaaaatggggatgcgtcgtcagaagtgacatggaatttctgattaggatattctaccacattttgcaatgtctgtccaccactgtatttgcaggctgctacttactgtattttggggtaactgtttactggtaatatcacagtaacaattatacattgagtaggtttctcttttcaataagatcttatcgacatttttcgttgaacgacaggctttttattaatgaaaaagtcgtaactgtaaggatactgagcagttacgaaaagtccttatttcttgcggactgcagccgatttcgtatatcgtccggctacgattccataaggctcttttacgtaagcccttacataataagcatagctttttccttttttcactgtattgtcaaagtacacagagcgctttccggaagaaactttcccgattcgtttccatttccctttgccttccctgcggtaaaggaaataaccgtcacactttgtctgagccttccaccggatccgaagtccatatctggtatttgtcacagaagaaaccttctgacgggcgggtgcagacttatattttccagaagatttataaccgctggtcacattctttccatttatctttcgatatgcacgaacagcatattcataaaccgttgtggctgaaatttttttatccttataggaaagtacagaagatccttttaaagtagcgatccgtttccattttcctttggatactttccgatacactacatagccctgagctccatagctttttgtccagtttacattattatacatgctaccggatacttttacagaaaccattggtactgccagtgctgcctttgcagacttttccccggaaaagctgctgtacagcttcccactgcttacactcgtataggctcgtaccttataggtgtagataactccatactgtgcacttccatctttgtagctggtggttccataggaggtattccccagcttccggtaggatccgccttttgctttccgataaatctcatagccggaaacaccacttactgctgaccaggaaagattgatctgcttataggaagcagaagcagctgtaagggatccaggtgcagatattgttacaggaccggatagcgtgcgtgtatgagctttaattctcagacacatgccatcttcatacagatcagaccatccgtctttactgttgtaggcaaagctttgttctatagcaagaccaggctggaatcttacccagctgtaattgccttctgtttcgcataagaaatcaatactgttgcttccaagattggtgatcacaacagaatacatggaaccctgggtcagtgtgacctccggaaccttcactgtagaaatccctgcataggtctgatagaattgtaccggtgtgctgtatgcaggaataccactggtaggatccaccggattggtcagattggtatatacctgtataccaaaaagccctgcatcactgtgggtggcaagcaccacctcccccagaacttctccgtttccatttcctgcggttgcagtaaatacattggcagccatggtggctccggaagatgcggtctgctttttcaaagacagactgcttaaggcactggacccgtcataaaaataattattggaataagccggtgcagccgttgctccttctgccacaatattataattggatttattatcgtaagagatataaaaatatcccccttctccccattcacttccccagctgttcttggcgatccaggcgccgttcctggtcaccttggaagcagcaggaaaattatttttatcaaaggaatcatcccatccaaccagtgttactgcatgattggcaccggatccttcatagggataaccataagtatagtttatggcatcataataggatccatccagccaaagggacattcctactgccccatactgatagatcagttccttgatctttcctacatcatatccggaaaatactgcatccgtcagatatgcagatgtctggtatgccagtgaagtggacggcttggtatcgtactgttccgtatgcgttgcatctgtagggtaaggagcctgggattccagacccattcctgaccatgtagacaggaaaagggacgcaaggacctgatttcctccctcccgatagcttccggaaacaatatttttgtcgttagctgtattccccagcggatcattcagcctgtttgcaaaaaaataggcaagatgttcttctgacagatcataaagcccctgtcctttcataagaagcgaagtctctatacctgcagcagtggtaaatgcccagcacatgccgtaaggcttctggttcttcacaggggatgtatatgcccctctggtatcataccgtgaaggcaaactgcttccataagaacggcttctacccgaaatcccggaagatatagaaaccggatcctccactaccagaataggagaaagcccctccattggtgccttctgggctgcgatctcttcttcggtaagaacctggctgtcctcttctgtcacttccccagaggaaaaaggatcctcagactgctcatttactgactgaaatactccggcttcatcatccgtttcttctgattcatcctcaaaaacatcttgaacctgggttgcatcttcttctgcaggcacatcctgaacctgctcttcctcctctgaaaaatcctgcgcttccacgcctgtatacaacgaatcttctgattctgaaaaaagctcctcacctgacacatgggcacttcccagaagcaaaactccggaaagtgtcaggctaagaagctgtttccaaatattcttttttctcatttcatctcctttacgcaagatagtccttaagaaaccggatcaactgctccatctcttctctggtgccaatggtgatcctgagataattgtctatccttggttttgcgaaatatcttacataaatatgctttgcccgcagtgcttcaaaaatctgttttgcaggacaggttttatgagcggcaaaaataaagttggcttttgaatcctggaatgtaaatccaagtgcttttaattctttttgcgtccattcccttgtatccctgatcttctgacaagtgtcttcaaaataatcacgatccccaatagctgctacacctgctgccagagaagtacggttcatggtataggaattaaaagaatattttacatcgttcagatatttgatcagcaccggattaccgcatgcaaagccaatacgcatacccgccatagatctggacttggaaaaggtctgtacaaccagaaggttgtcatatttgctgatcagcggcaatgcggaatttgctccgaaatcaatatacgcttcatctacgatcacaacagatcccggattggccttcaggatctcttcaatatcctgaagcggaagctcaacaccggtaggcgcattgggattagggaaaataatcccgccattttctttgaaataatcttctttcttaatatggaagctgtcatccagagcaggtctttcatatggaatcctgaaaagctctgcccacacatcataaaaggaatatgtaatatccgggaaaaagacaggtttttctccattaaaaaaggtaagaaagctcatggccagcacatcatctgagccaacgcctacaaaaacctgatcttcgttcaatccgtaataatctgcgatggcttttaccaaagcccctgcacttggatccggatacagccgcagatcccctgcatccatttctttaagcacctgctgtacctttggtgcaggaggataaggattttcgtttgtatttaatttgatcatatccggctgatttggctgctccccaggtgtatatggcacaaccttccggatgtttctttcccagtttgtcatctgtcaacttcctttctttatttttgccaaaattccacgacttacaaggcaaaatgctgtcaccgaagttgatccggaatgcattttgactcgcagctgtgcgggtactgaacagttacgagtattgtactcattaatcagttttttgtcaaaccgggaacacagattttggacggcaggtaacttccaaaatcgactttatcctttgatggcaccgctcattagtccgttttcaattttctcctggaagaagatataagcaatgatcactggtatggtggtcagacagattcctgccatgcttgcactgtaatccgtactgtactctccgaaaaaagccagaagtcccatggaaatggttcctttattcttatcagatacaaagatcagcgggaatagcaggttattccatacctgaataaaattaaaaatggaaacactaatgataccaggcatagataacggaatgatcattccaaagaaaacctgtccaatacctgccccatcaatcaccatagcctcttccaattcagtcggaatactgttcataaatccggtaagaatcaatatggtcataggaaaacaaaaagccgagtataaaagaatcagaacaggataattattcattattccaagctttccaaagatataagaaagtggaatcaacacagcctggattgggatcatcatcccggcaataaataacagataccacttggattttcctttaaaagtaaattttgcaagaatataggaagccatagccccaaacagaccggacaccaacagtgtacctgccgccaaaatcagcgtattcagaaagtatctgccgatatttccgatattccatgcagttgcataattttcaattcgcagtttcttgggaagggaggtaaaggaagagaaaatctccagatttcccttaaaagaacagaaaatcgaaaataccataggatatacattcaccagagcaaccagcacaaataagataaatcctgcataaaatcctacggaacgcttttttctcttttcatgaacaagtccctcctttagtattcaatactttcccgtctgttcatcagcttcagactggcaatggatacaaatgcgcttaacacaaagataaccgttgcaattgcacttcctgttccgtaatgtccataccgataagcctcattatacattagaagtgcg

SEQ ID NO: 27 - DNA, 19439 bp, Unknown
  gut microbiota DNA sequence
agggcttctcccttgaaattaaaggatttataggaggaaatagagaaaatgaaacttggaatcgtaggcctgcccaatgtaggcaaaagtacattgtttaattccctgacaaaagcaggggcagaatcagctaactacccattctgcaccattgaccccaatgtgggagttgtaacagtgccggatgaaagactgaagcttttaggagatttttatcattccaagaaggtaacaccggcagtgatcgaatttgtggatatagcaggccttgtaaagggagcatccaaaggagagggacttggcaaccagttcctggccaatattcgtgaagtagatgccattgtacatgtggtacgctgctttgaagactctaatgtgatccacgtagatggaagtattgatccgcttcgtgacattgagaccatcaacctggagctgatcttctctgatctggagattctggagcgcaggatcgcaaaggttacaaagactgcacgtatggataaagaagcagctaaggaactggatttccttcagaagatcaagaagcatctggaagacggcaagatggccatcactatggagctggacaatgaggatgaagagggatggatgggtacatacaaccttcttacatggaagcctgtgatctatgctgctaacgtggctgaggatgatctggcagatgacggtgagtccaataaatatgtggcagaggtgcgtgaatacgcaaaagaacagaacagtggagtatttgtgatctgtgcacagatcgaggaagagatttctgaactggatgatgatgagaagaaaatgttcctggaagatctggggctgaaagaatcaggacttgagaagcttgtccgtgcaagctatcatctccttggcctgatgagtttccttacatccggagaggatgaaacacgtgcatggacaattaagatcggtacaaaggcacctcaggcagcaggaaagatccattctgattttgaaagaggatttattaaagcagaggtagtaaattatcaggatcttctggactgtggatcttacgcaggagccagagaaaagggcctggttcgcatggaaggaaaggattacgttgtgcaggatggagatgtgatcttattcaggttcaacgtataaaacggtgatatatggatatgatgattcgttttcctaatcttggggtggagcttggatatgtgggcagatctgtacggatattcggctttgagatcaccttcggagggatgctccttgcattggggatgcttgcaggacttgcttttattgttcttgaagcaaaacgcagaaatgaaaatcaggatgcttacgttggaatgatgatcacagctgtgatctttggcctgataggtgcgcggcttttttatgtgggattttcctgggatctttataaagataatattctggagatctttaatatccggaatggaggaatggctttttacggcggtttgttaggcggcatgctgggggctgctatttactgtggaatacgcaggctttcctttatgaaaatggcagatactgcatgtatgggactggtagtggcacagataataggaagatggggagatttttttaacagggaatcctttggggaatataccaattcggttcttgccatgcagcttcctttatcttcagtacgaagcagccaggtcagtgcggctatgcgggaaaatcttgtgactgtaaacggagtttcctttgttcaggtacatcctgcctttttttacgaaagcgcatggtgcctggtgttgttccttcttctccttgtgtggaagaggagaaaaagcttccagggggagatttttcttagatatcttacaggttacgggctggggagatttctgctggagtggatccgtacagacaagctggtgataccagggacaggtatttctgtttccatggtgatctctgtgatactgtttgtattatgtgggatcatgggaatggtacgcaggacaatggcgaagaaacgtgcaaaagtaaaaaaacgtagaagagaggaagattatgaagcagaagaaaaagctgcccgggaagcagaaggacatgattccctggaagcggatgacctcttatctgagacgcatacgaaagagaatcctgaagatccggatgcagaagctgcaaaagaagctggacagacagatccggtgccgtcaggatctgctgaagaatctggaaatgagccggaagcttgaccggttcatgaatgcagccatgctggctgaagaaatagaatgatcatagagtgggtaactgttcacaggaatgtggagagtacccactttttttctgttgcatggaaatattttacaggtggtccagctaaaaaataaggattcctacttgcgtttttcatctaaatggtttagaataaacccataagtggtagaaagtggagaatagtggaggcgaatggggacattgtggcagacagttccatccgcatcccggaaatacgaaggggagactcgtatttcccgagagtaggtgagtaaatatgttcatgggagaatacaaccacacaatcgatgcgaaggggcggctgattatcccttctaagttcagagaactcttaggggaagagtttgttctgaccaagggactggatggttgtctttctatatatcctatggatgaatgggaagcctttgaaacaaaactcagagcattaccacttacgaacaagaacgcaagaaccttttcaagattctttgtggcaggagccaccacatgtgagctggacaagcaggggagaatccttgtaccacagaccttaagggagtttgctggtctggataaagatgtggttctgactggaaatcttaacaggatcgaagtctggagcaaagaaaaatggaatgaaaactgcaattatgacgacatggacagcattgcagaaggcatgcaggaaatgggaatcgttatataaggcagttctaaggacaaatccaacaggagacggaaatggaatttaaacacaaatctgtattactggaagaggctgttgacggcttaagggtaaagcctgatggaacctatgtggatgggactttaggaggtgcgggacatgcctgcagggtatgtgaaaaactttctgccaaggggagatttattggtatagatcaagaccaagatgcaataattgctgcgagtgaaaggctgggcgcctacaaacaggcgacaatcattcgcagcaattattgttacatgggacaggaactttctgcccggggaatttacggggtagacggaatcctgctggatcttggagtatcctcttatcagttggacaatgaagagcgaggatttacctacagggtagatgctccactggacatgagaatggatcagaggcagagccagaccgcatcagacatcgtcaacggttatgaagaaaaagaactttaccgtatcatcagagactacggggaagataaatttgcaaagaatattgcaaagcatattgtggcagcaagggaaaagaagcctatcgccacaaccggggaactgacggagattatccgcggagcgattcccatgaagatacaggcaacaggaggccatcctgccaagcgtactttccaggcgattcgtatagaactgaataaagaactggatgtattgagagattctctggatggtatgatcgatcttttgaatgatggaggaaggatctgcattatcaccttccattctctggaagacaggatcgttaagaccatattcagaaagaatgaaaatccatgtacatgtccaccggatttcccggtatgtgtatgtggaaaaaaatcaaagggacaagtgatcacaagaaagcctattcttccaagtgaggaagagatggaagagaatccacgttccaaaagtgcaaagctgcggatttttgagcgaagcagaagttagtcagacagtaagttagaggggaaataaaatggcggcaaacagacctactacagcaagaagaaatatgaatagcgccagaaatcccagaggggtatatatagacggaagtgcagcacgcaagcttcaggaagtgccagagcggagatattatcctccggcacagcgtcctgcaaggcagcctgccaaagtggcagcaagcccccgaactcaggaaaggcagcgtacacttagtaaagaggcaaagaagaacagggcaaaagcaatgagcatgaaccggaagtttgttgttttcattgcggttgtatccacagcagtcctgttttgctgtatcaattatctgagactgaagtcagattatacaaggaagatcagtcaggtggcatctctggaatcagaactggctcagttgaaagaggataatgatgcttactacagtgaggttacttccaatgtagacctggataagatcaagaagattgccatcggacgacttggaatgaaaaatccgtctgatgatcaggtgatgacttatagtgttgaggggggaagctatgtacggcaatatcaggatgtgccttaacaggcacttcctagtacagtgaaaattaagacaagtcaatatggtggttacttaatattcactgtactagtatccaactgattagaaagcaaggcaggtgatctattgagcaacatggacaaaagaaggaaaaaaagaccagagaaaaaaattaattatgttatgcggaagaagctgatattactgtttgcaatagtgataggagctttttttgcattagcaatgagaatcacatacattaatgcaacaagcgggaacaaatacaaaaaacaggtactaagccaggcacagcaaaaatatgaaagcagggtgatgcctgcaaagcgaggagatatctacgaccggaacgggaatatcctggctaccagtaataaggtttacaatgtgatcctggattgcaaggcagtaaatgaaaatgaggattatgtggagcccaccgttcgtgcactgaccagcgtgcttgggattgaagagggagagatccgtacccgtcttacagcagaaagtaccaagaacagccagtatcagatcattaagaagcagatttccatggatgataaaaaggcttttgaggactacaaatccattcctgaggaaagtgatctttcgaaagagcagatccaggaaaaaaataatgtacagggcgtatggtttgaagaggattatctgagaatttatccatataatgaatctgcctgcgatactattggatttacattggaaagggatgtggcagacagcggcatcgagggctactacaacagtaccctgaatggggtagacggccgtcaatatggctattttaatagcagctccgatgtggaacaaaccattattgagcctagcaatggtaacagtttggatcttagtctggacatgggagcacagcagatcgtggaaaaatatgtgaatgctttcaatgaacggatgggagcaaagaacgtaggcgtgatcgtggaagatccttccaacggagagatcattgccatggatggtggagatcggtatgatctgaacgaacccagagatctttcccagctttataccaaggacgagatcaaaggaatgaatgatgaagagacagtagaggcattaaatgccatgtggagtaatttctgcgtaacagatgcttatgagcccggttctgttataaagcctatagttatggcttctgcactggaaaaaggcaagatcagcacttcggatacttttgtatgtgatggaggccaggcctttggtacagatacttttattaagtgtgcggtatggccgaatgcccacgggacagagacgctggcagatgttattgcaaactcctgtaatgacggtatgatgcagatcgctgcagctatgggcagtgagcagtttatcaaagcacaaagtgtatttaattttggatccaggacaggcattgacctgccaaacgaaggaacaggtattatccatactacagatacgatgggcgagactgaacttgcctgctctgcattcggacagggatttacctgtaccatgcttcaggagatcaatgctatgtgctccgttgtgaatggtggatattattatcagcctcatcttgtgacaaagatcaaggacagcaatggaagtgtgataaaaaccgtgaacccggttctgatgaaacagaccatttcctctaatatttctacagatatccgcagctatatgcaccagagtgtgcttcgtggtaccagtcagacatcaagggttcagggctacagttccggtggtaagacaggtacagcagagaagtttccccgtggaaataagaagtacctggtttcctttataggattcgcccctgtggatgatcctgcggttgtgatctacgtggttgtggatgagccaaacgcagaggatcaggcaaccagtacctatgcacagtatattgcacaggggatcctttctgagcttcttccttatcttaatgtagcaccggatgagacttctgatggagaaacaccggttacagaactgtgggaaggctttcagggatatctttcaaataatacggaaagttctctggatgaaaatggcaatcttgtggacggtaatggtaatctgatcgactgggatggcaaccgtatcgatgaaaatggttatcttctcaatgcagatggaagctatcagattgatgagaatggagaatacattaagtcagataatcttgatggagcaggtgatggcagtggtttgcaggaagctgtatcagatacaagcattccggcgcctcttgacggagattctaagactgcacaggacaatgacatggaaagcgaaggactgaccaacgaagaggctggtctggaataagaaaagtgataaccctgcaaggacagttcatatattaatatgacagttctggcagggtttttctatgtgcggatatagtggttacaatagaacagggaaaacccggaaaggatatttgtgaaaaaaagtctgacttttcacaggaaaaaagtgtggctgatccttgccatctgcagtattctgttgcttggactgatgatacgtctggtgtgtctaatgggctttcagtcagatcattattacaggaaagcagaggaacttcatgaaagagaacgggatattaagacagaaagaggaaagatcctggatgcagctggaaaggtactggcagataaccggacagtgtgtaccatttctgtgatccacagtcagatcaaagaaccggaaaaggtgatccgggtactggcagaaaagctttccatggatcctggtcaggtacggaaacaagtggaaaaggtttcttctatagaaaggatccgtacaaatgttgacaaggaaacaggggatcagatccgtgagtgccagctggaaggagtgaaggtggatgaggattacaaacggtggtacccctatggagatctggcttccaaagtacttggctttacaggtggggacaatcagggaatcattgggctggaagtaaaatatgaggatgtattaaggggagaaaatgggaaaattctgacggttacagatgccaggggagtggaacttacagataaaggagaaaaaagaaaggaaccggtggcagggcaggatcttcggatcagtctggatgccagcatccaggaatatgtgcagcaggcggcacaaaaggtgatggaggaaaaaaaggcggacagggtctccatccttttgatgaatcctcagaacggtgaaatctatgcctgtgtaaatgtgccggaatttgatttgaaccagccttttgaactgaatacggaacaggatgcatctgaccttagccagcaggaaaagcaggatctgttgaaccagatgtggagaaatccatgcctgaatgatacttatgaacctggttctacctttaagatcattacaatggcagccggactggaggaaggagtcgttacagaagaagattccttttattgcccgggatataagctggtagatgaccgaaggatccactgtgccaaccgtagaggacatggctcacagaattttgttcagggagcagaaaattcctgcaacccggtttttattgaagtaggcctgcggctgggagtggataattattacaaatatttcaaacagtttggacttttgaaaaaaacagggatcgatctgcctggtgaagcaggaaccatcatgcatcagaaaaataaaatgggaaatgtggaactggctacagtgtcctttggacagtcttttcagatcacgcccattcagctggcagcaacggtaagcgggatcatcaacggtgggaaaagagtgactcctcattttgcagtggcagtacaaagtccggatgggagaaatatcaaagagctttcttatccagtggagcaggggatcctgtcagaggaaacctccaggcgggtgcggaacattctggaaaaggtggtatcagaaggatccggaaaaaatgcaaagattgagggctattctattggagggaaaacagctacttcacagactcttcccagaagtgctaaccgatatatttcttcttttcttggctttgcaccagcagaagagcctattgttctgggactttgcattattcacaatccccagggaatgtattacggaggcaccatagccgcacctgtgatccgacggatttttgagaatgttctgccctatctgggtatagaatgcagctacagtcttgataaataggtgaaaaagccgtatactataagttgctttaaaaaagacgaaagaaataagaggtgtgaaatggattttcaagttgtgattcccgtgctgatttcttttggaatcagtgcaatattaggccctgttgtgatcccttttcttaaaaagctgaaaatgggtcagacagaaagagtagaaggcgtacagtcccatctgaagaaagcagggacacctaccatgggaggcgtgatgtttcttgtatccacagtgatcacggctctgttttatgtaaaggattatcccaagatcattcctgtgctgtttcttacattaggctttggactgattggatttctggacgattatctgaaggttgtgctccgcaggtcagatggacttctggcatggcagaagctgcttttgcaggtagttgttacagggatatttacattctatattttaaattatacagatatttcactgactatgcggatcccgttctggagcggacattacctggacttaggctggctggcagtgcctcttctgttctttgcagtgatcggtactgtaaacggggtgaattttacagacggcgttgacggtctggcttccagcgttacactgatcgttgcagtgttttttaccgttgtttccattgggctgaagtccgggatcgagccctttacctgtgcggtagtgggcggcctgatgggatttctgctttacaatgtgtatcctgcgaaggtgtttatgggagatacaggttcccttgcactgggcggatttgtggcaggctgtgcttacatgatgcagatgcctttgtttattctgattgtaggcctgatctatctggtagaggttctttcagttatgatccaggttacttattttaaggcaactcacgggaagagaatcttcaggatgaccccgatccaccatcattttgaacttggcggatggtctgagaccagagttgtagcagttttttcaattattacggcaattatgtgcctgatcggactgctggcgctttaaggaggagaaagtcgtggatttaaaaggaaaaaaagttcttgttttcggtacaggaaaaagcgggataggagctgcgcagcttcttgtaaaagcaggtgctctcccagttatttttgatggaaaagcagatattgacaaagaagagatcgtacataaagtcggagcagatacaccggtgcaggtgtatgcaggagaactgcctggtgaagtacaaaagagtctggatctggctgtacttagtcctggggttcctactgaccttccccttgtaaaaagcttttatgcacaggggctgccggtatggggcgaggtagaactggcgtaccagacaggaaaagggcaggttcttgcgattactggcactaatggcaaaaccactaccactgcacttctgggcaagattatggcagatgcccgtccttctgtttttgttgttggaaatattggtacaccttatacattaaaagcaccaatgatgaaggaagatagcattactgtagctgagatcagcagctttcagctggagacgatccaggattttgcccctcatgtaagtgcgatcctgaatattactgaggatcatctgaaccgtcatcacactatggaagaatatatccgggtgaaggagctgatcactaagaatcagggaccaaaggatgtatgcgtactgaattatgaggatccggtccttcgtaagtttggcgaaaacattgtaccggaggtggtttatttctccagtgtgagaaaactttcaaagggtatctacctggatggggatatgatcacacttcgtacagacaaagaagagatccaggttgtaaaaacaggagacctgaagcttttgggacaacataattttgaaaatgtgatggcagcagttgctatggcatggtatgacggcgtagatattgacagtattcgtaagagtgtgtgtgagtttactgcagttcctcacaggatcgaatatgtgactgagaaaaacggtgttgcatattataatgattccaagggaactaatccggacgctgccattcgtgggatcagggcgatgaaccgtcctacattgctgatcggcggcggctatgataaaggttctacgtatgatgaatggatccaggcgtttgatggcaaagtgaagtacctggtactgatcggacagacaaaggagaagatcaaagaggctgcaaacaagaatggtttccatcagatcatcttgtgtgaagacctgaaggaagcagttcaggtatgtgcacaaaaggcagagccaggtgatgcagtgcttctttcacctgcctgtgcaagctgggggcagtttgataattatgagcagagaggtgacatatttaaggagcttgtttcatatctttaaataaaagaatgatccaggagattttatggcatccggaaagaaacagggctattcagaagcagacgggattttacttacgttggtgctgatccttgcggtctttggattgaccatgcttttctcaaccagtgaatataatggcagagtacgtttcggcgactctgcctattattttaagaaacagttatttgctatgttcctggggcttctgactatgtttctggttgcaggaatggactatcacttttttgtccgcctggcaccggcagcctatggagcctccttaggtctgtcagctgcagtgttggtggtgggacaagagatcaatggttccaggcggtggctgaatctgggaccattgtcttttcagccttcagagtttgcaaaagtggcagtgatcctttttttggtttggcagatccagaaaaccaaaagcagcacttctggtttgtggtttatgggacggacccttgtatcacttcttccggtgataggacttgtgggctccaataatctgagcacagccattattatccttgggatcggagtggcgctgatttttgcgtcaaactccagatatgcctgctttcttggtataggtgctgcaggtgtggcagttgccgtgttgtttctggcagcagaaagctatcggctggaacgtctggctatctggcgggatccggaaaaatacgaaaaaggttttcagactattcaggggctgtatgctattggaagcggaggactgtttggcagagggctgggaagcagtatacaaaaactgggatttgtgccggaagcccagaatgatatgattttttctattatttgcgaagaactggggcttaccggggcattgatattgattttgattttcggactgctgatctggagactatgtgtgatcgccactcggtgtacggatctggcaggaactttgatctgcaccgggatcatggcccatatggctattcaggtgatcctgaatattgctgtagtaacaaataccattccaaacacaggcattacactgccctttgtcagctatggaggaacatctgtggtttttctgatgggagaaatggggctggcccttagcgtaagcagtcacaaacagcagttctttacatatactaaagggtaagaggctctttaggagtgaaaagcttggatgactacatctgtatcgtgggtggtaagccattaaaaggaaccatttctgtacagggatcaaagaatgcggcgcttcccatgatggcagcgtccctgctgcacagaggcgtaagtgttcttaagacatgtcccaggatcgcagatgttttttgtatggagaagatccttcaggcattgggagcagctacctggtgggaggatcatgatctatatatggactgcacaaatgcagacaaagaagaaataccggaaatgtatacaggacgtatgcggtcatcggttattctgcttggagccatgcttgccaggaatggtaaaggaaagcttgggtatccgggaggctgcgtaattggcagcaggcctatagacctgcatttttatgcactaagacagcttggggctgtgatccaaaaagatcaggtgatccagggaactgctccatcaggcctttggggaaatcagatattgttcccaaaaagaagtgtgggtgctacacaacaggctattctggctgctgtgcttgcaaaaggaaatacaattataaaaaattctgccagggaaccggaaattctttggctttgcagatatttaaaaacaatgggagcgcagatcaaaggagagggaacggactgtatttttatagagggaagggatgaattaggagccggatgtatgaagattcctccggaccggatcgttgcaggaacttatatctgtgccgcagcagccacaagaagtgagatcacactggaaaatgtaccggaaggtgagctggatgcctttctggatgtatattgcaaaatgggtggacaatataaagggaagagtggtaaactaatagtcaatggacagaacatccactgtccggtaaagcttcttaagacagatgtttatcctggatttcctacagacctgcaatcacaggttatgtcagttctgactacagtgaccgggaaaagcctgatccgggaacagatttttgaggatcgttataaggctgcaggagaactggtgaagatgggagcgcatataaacatctgcggcagggaagcttatatagaaggtggatatccattatatggcaggcaggtaactgccagggagcttcggggcggtgccgctttggtgattgccgccttgtgtgccaaaggtaccacaaagatcagtggatattcatttatcagcagaggctatgagcatatctgtcaggatcttgctggcgcaggtgccaggatcagcctgggcagagctacagacagccgaggcattcttgaatattaaaggatggattatgggaactggagataacggagaaacgtttgtgtttgataaaaaaacaaaaaaaataatctggggaaccctggcggcagtgctgctggcaggcattatctttttcttttcctttttccgggtcaggaccattgaagttatgggcagtactcattatacccaggatcaggtaaaggagatggctctgcagggttccttcatgaacaatacggtgctggcttctttttttcataaaaatgagcaggtcagcgacatgccttttgtagaaggatacagtgtttctatgactggcagggataccatctgtatcagtgtaaaagaaaagaaagtagtaggctgcatcccttatctggataattatatttactttgacagaaacggagtctttgttgaaggcctgaagaccagagatgagaaggtacctttttttgatgggatccaggtagataaggtagttttgaatgaaaagcttccactgaaagggaaaacaattctgaatactgctgtagcacttgcaactatttttcagaagaatgacacagtgccagatcacatccagattgatgataagtccaggatcagtctgatttatggggatgttaccgttatacttggggaggacaggctgctagaggacaagatgacaagggcgattgccatcctgccaaagctttccgggcaaaaagggatccttcatatggagaatattaccgagactgaaaagaattgtaccttcgaagcagaggtagaaccggtaactgctgagaactggaccggcggttatgatgaaaatggagaatataccggtgatggggaatatgacgaaaatggcaagtatgtaggggcaaagcccaaaagtgaactggattatgcccttgaaaactggcatggcggatatgacggagagggagattatactggcgagggcgagtatgatgccaactggaattatgtagggcctaagcctaccgaagaaagtatagcagccaatggagactggcatggtgggtatctggaagacggaagttatacaggaactggtgaatatgaccatgacggcaactatgtaggttctaatcccaatgcagggaatgacgaatattcgtgaaaaaagtataaaaaaacaaaattagtagttgattaattcaaaaaaaaaatatatgatatatttatatgtagcttgatacaaataaacttgacttgaatatcaggtatagaaataaaggaggaagtacattgttagagattatgtcaaatgaggcagagtcatctgcgaagattattgtaatcggcgtaggtggagctggtaataatgcagtgaacagaatggtggaagaagccattggcggggtagagtttgtaggtgtgaataccgataaacaggctttaactctgtgcaaagctccaactgtacttcagattggcgagaagattaccaaaggtcttggtgcaggtgcacagccagaggttggacagaaggcagcagaggaaagtatagaagaagtgaagcagatcatggaaggagcagatatggttttcgttacctgcggtatgggtggcggtaccggtacaggagctgctccggttattgcagcagcagcaaaggagatgggtatccttaccgttggtgttgttacaaagcctttccgctttgaagcaaagacccgtatgaacaatgcacttgcaggtattgagaatctgaagaaagcagtggatacactgatcgtgatcccgaatgataaattactggagatcgttgaccgtcggactactatgccggaggcactgcgtaaagctgatgaagtacttcagcaggcagttcagggtattacggacctgatcaatctgccggcattgatcaatcttgactttgcagatgtacagaccgttatgacagataagggtattgcacacatcggtattggtgaggccagaggcgatgataaggctatggaggctgtacagcaggctgtttcttctcctctgcttgagactaccattaaaggtgctacacacgttatcattaatatttccggtgatatttcccttatggatgccaatgatgcagctagctatgtacaggagcttacaggagaggatgcaaatatcatctttggtgcaatgtatgatgattcagttgctgattatgcaaggatcactgttattgctacaggccttagtgatgcagcacagaataccagtccttttggtaacagaagcagcaatgcatcttttaatgcaaaaagaccggcagcacagacaagcacaacatcttcttttaagatgccaagctttagtatgcctactatgaatgctacaccatttactgcgaagacaccttccagtacagtgcagaagaaggatatccagattccggatttccttaagaaccgttaatcaattttttgtgaaatatcagggctgcgacacagcaggaaattactctctgctgtgccgcagcctttttacatcttaacatttacaggcaaaggttccgcatttggtttcatggcagcactgtgccctggaaccatctacatcaatggctgctgctgtacatttgcaattgtcgttgtatgcgcagttgtgggctttacattcaatctggatcttttcgcagccacggtggcattccataccatttgttgctgcatcagatttttcctgaaagcttccacagcaggtttcatctgcaatgcgggcgctttcgcccataacattgatctcacctctggaacactgatgggcatcattataaacacagttggcagctgaacatttcaaaatagtcatgatcattcctccttttattagatgcagggcatctttgtatatacaatgatagtgtgtgcgttttgctatgtaatatgtgtggaaaattatggtaaaattattgcaaagccatctatgctgcgctataatatgagcatgaaaaaggggagctggtgaaaaccggctgagaggaaacgtgattccgttttgacccgtaacctgatttggataatgccaacgtagggaagaggatgagtagtctctgcttttagtatggcagaggctttttttatggaggaaaagagattgaaaaattataccacacagatggacgcggcaaggaaaggcattgtcacaaaagaaatggagattgtggcaaaaaaggaacatatgacaacagatgcattaagaaagctggttggggaaggcaaggttgcgatctgtgcaaataagaatcacaaatgtcttgatccggaaggcgtgggaagcatgctccgcacaaagatcaatgtcaatctgggagtgtcccgcgactgtaaagactatgatattgagatggaaaaggtaatgagtgctgtaaagctgggggcagaggcaattatggatctgtcaagccatggtaatactcagcccttccgtcagaaactgactcaggaatgtcctgttatgatcggaactgttcctgtatatgacagcgtgatccattaccaaagggatctggcgactttgacagccaaggattttattgatgtggtaaggcttcatgcccaggacggtgtggattttgtaacgctgcactgcgggattaccaggaaaactattgagcagatacggaatcacaaaagaaaaatgaatattgtaagccgtggcggaagcttggtttttgcatggatgagcatgacaggagaagagaatccattttatgagtattttgatgaaattcttgatatctgtgaggaatatgatgttaccatttcccttggggatgcctgtcgtccaggatgtctggcagatgcaaccgacgtatgtcagatagaggaacttgtccgccttggagaattgaccaagcgtgcatgggcgcataatgtacaggttatggtggaaggacctggacatgtaccgctggatcaggtagcagcaaatatgaaagtacagcagaccatttgtatgggtgctcctttttatgtacttggacctcttgtaacagatattgcacctggatatgaccatattactgcagctatcggcggagcagtggcggctatgagcggagctgctttcctttgctacgtaacgcctgcagagcatctggctcttcctaacgtggatgatgttaagcaggggatcattgcttccaagattgcagcccatgcagctgatattgccaagggtattccgggagcaagagatattgatgaccgtatggcagatgcacggcagaaacttgattgggaagctcagtatgcatgtgcccttgatcctgagactgcaaggcagatccgtgacagtcgtaagccggaagatgaccacagtgatacctgcagtatgtgcggtaaattctgtgcagtccgcagcatgaataaggccctggcaggggagtatattgatatattataaaataattattaaaaagtccttgacttctaagggaaaacatggtattctgtctgggtacgtgagaaaacaaagcagagttacactctcaccttagcgcagtcaggcgacttgggttaatattgcacagcttatatttaaagatgtgatttgtgtaataggtgaagtgtggattctgtccgcacttttttcatgtttaaggcagaaggtttcccggagaaaaattgggaagctggcgggtgatttagtatttatctatcaggtatggaggtgcactacaattagcagtttaatgattaacgaacaaatcagggacagagaagtacgcttgattggcccggacggagcacagctcggtattatgtccgcaaaggaagcaatgttcaaggctcaggaggcagggcttgatctggtaaagattgccccccaggctaaaccgccggtatgcaagatcattgattacggtaaataccgttacgaacttgctagaaaagaaaaagaagccaagaaaaaacagaaaacgattgatgttaaagaagtgcggctttcaccgaatatcgatacaaacgaccttatgacaaaagtcaatgcagcaaagaagtttctttcaaagggcgatagggtgaaggtaactctcagatttcgcggaagagagatggctcatatgtcagccagcaagcatgtgcttgatgatttcgcagatatgttgaaagaagtggctaatgtggagaaagcacctaaagtggaaggcagaagcatgaccatgttcttagctcagaaaaaataaattcagcagcatttatgccgcagggcagttcataatacgaaaattaaggaggaaactataatgccaaaaattaaaacatgtagagcagcagcaaagcgcttcaaaaagacaggtacaggaaaattaatgagaaataaagcttacaagagtcatatcttaaccaaaaaatctcagaagagaaaaagaaatctgagaaaatctactgttgttgattctacaaatgttaagagcatgaagaaagcattaccatatttataagatacagatagaagacgacgaacaggaggaaaataagagatggcaagaattaaaggcggattaaacgcaaagaagaaacataaccgtgtattaaaactggcaaaaggctacagaggagcccgttccaaacagtatagaattgcaaaacagtctgtaatgagagcacttacaagctcttatgcaggaagaaaacagaaaaaacgtcagttcagaagtctgtggatcgctcgtatcaacgctgcagcaagaatgaacggattatcctacagcaagatgatgcatggcctgaaggttgctaatgttgacatcaacagaaagatgcttgcagatctggctgttaatgatgctgaaggcttcaaagcattagctgaagttgcaaaagctgcaatcgcataagtattatcaattctggaaggggctgtcgcactgatatgctcccttctagg

SEQ ID NO: 28 - DNA, 18047 bp, Unknown
  gut microbiota DNA sequence
aaacataaagggaggttgtttcatatgacagaaggattgaaatggactgtgaaccaggtacccaaatcttctgattcctacctggatcttatgtccggggaaaacgtagcaaaagccaacgaattccataaaagctttccccagtattctgtaacacccctgcagaagctttctgccctggccagttttttaggcgtaaataatattttctgcaaggacgaatcctaccgtttcgggctgaatgcttttaaagtgctgggcggatcctatgcaatgggccgttatattgcaaaagaacttgggaaagatatcagccagctgccttataatgttctctcttctgaagaacttcgtaaagaattcggacaggctactttctttactgctacagatggcaaccacggacgtggcgttgcatgggcagctcatcgtcttggacagaaagccgttgtacggatgccaaaaggtacaaccaagacccgttttgacaatattgcaaaagaaggcgcagaagttactattgaagaagtaaactatgatgactgtgtaaggatggcagctgctgaagccgccaaaacccctcatgggatcattgtccaggatactgcctgggacggttatgaagagattccttcctggatcatgcagggatatggcactttggttctggaagcagatcatcagatggaagaagccggtgtgcggcctactcacgtatttgttcaggctggcgtaggctcccttgcaggtgctgtggtaggttattttgcaaacaaatataaagaaaatcctcccatcatggtggtgtgcgaagcaggtgcagctgattgcctttaccgctctgcctgtgcaaagaccggtgatcttgtaaatgtaaccggagaccttgccactatcatggctggacttgcctgtggcgagggcaataccatcggatgggatatccttaagaaccatgtttccgtatttgcatcatgtcctgactggatgagtgcaaaagctacaagaatttatgccaacccgcttggagatgatcctaaggttatttccggtgaatccggctctgtaccgcttggccttgtttacactgcgcttcatgatgcagatgcagcagaccttaaagaagcccttcacctggatgcggattccaacatccttgtgatctccacagagggagacactgacccggtacgctaccgtgagatcgtatgggacggtctttatggcacatcccagtctctcagtaaataatcagaacataattattcatttaatattacacatatacaggaggaagaaaaatggattacagtcaaatcaatgcagcagcagaaggctacaaagcagacatgaccagattcttacgggatcttgtaaaaatcccgggagaaagctgtggcgagaaaggccatgtgatgcggatcaaagaagaaatggagaaacttggctttgacaaagttcagatcgatcctatgggcaatatccttggtttcatgggaagcggccagactctcatcggttttgacgctcatatcgatactgtaggtattggtaacagagataactgggaatttgatccatacgaaggctacgagacagactctgagatcggcggccgtggaacctctgaccagatgggcggtattgtttctgctgtttatggtgcaaagatcatgaaagatcttggtcttttaaatgacaaatttcaggttgtagtcaccggtactgtacaggaggaggattgtgacggtctttgctggcaatacatcatccatgaagacaaggttcgtcctgagtttgttgtatctacagagcctactgacggcggtatttatcgtggacagcgtggacgtatggagatccgtgtagatgtaaaaggtatctcctgccatggctccgctcctgagcgtggagataatgctatttataagatggctgatatccttcaggatatacgtgccctcaacgaaaatgacgcagctgatgaaacacagatcaaaggcctggttaaaatgctggatgagaaatacaatccagaatgggaagaagcacgtttccttggaagaggtactgttactacttctgagattttctttacttccccaagccgctgtgcagttgccgattcctgctctgtatcccttgaccgccgtatgaccgcaggcgaaacctgggaaagctgcctggatgagatccgtgcccttccttccgtaaagaaatacggagacgatgtaaaggtttccatgtacgaatattcccgtccttcctggacagagcttgtatatcctattgaatgctacttccctacctgggtcattcccaaggatcataaggttacaaaagcacttgaggatgcatacaagggactgtatggcgaagaacgccagggcaatgatgtaacatcccagcttcgtaaatcccgtcctcttaccgacaagtggaccttctccacaaatggtgtaaccattatgggacgtaataatatcccatgcatcggcttcggacctggtgcagaggcacaggctcatgctccaaatgaaagaacctggaaagatgaccttgtaagatgtgcagctgtatatgcagcacttccaggcaattactgcaaataattatttttccgcaatcagggctgggatccgcacctgtgcgtcccggctgtataccagataatccatcataaaacatacaaggagaatgataatcatgaaaacattacaggattatattgacaaattgaacagccttaattttaaagaaatgtacaacaacgatttcttctggacatgggataagaccgatgatgaactggaagctgttttcactgttgctgatgcacttcgctttatgagagagcataatatttctaccaaagtatttgaaagtggtcttgggatttccattttccgtgataattccacacgtacccgtttctcctttgcttctgcctgcaacctgttaggccttgaagtacaggacctggacgaaaaaaaatctcagatcgctcacggcgagactgtacgcgaaacagcaaatatggtttccttcatggctgatgtgatcggtatccgtgatgatatgtatatcggcaaaggacatgcttaccagaaagaatttatggattctgttacagagggcaatcaggacggtatcttggagcagcgtcctactcttgtaaaccttcagtgtgatgtagaccatcctacccagtgcatggcagatatgctgcatatcatccatgaatttggcggtgttgagaacctgaaaggtaaaaagatcgctatgtcctgggcatactctccttcttatggcaaacctctttctgttcctcagggcgtgatcggacttatgacacgtttcggaatggatgttgttcttgctcatccggacggatatgatgtaatgccagaggttgaggaaatcgcacgtaagaatgcacaggcttccggcggttctttcacaaagaccaacagcatggaagaagcattcaaagatgctgatattgtctatccaaagagttgggctccgtttgcagccatggagaaacgtaccaacctttatggtgaaggtgatttcgatggcattgacaaactggaaaaagaactgcttgctcaaaatgcagagcataaagactgggcatgcacagaagagcttatgaaaaccacaaggaatggaaaagctctttaccttcactgcctgcctgcagatatcacaggtgtaagctgtgaaaccggtgaggttgatgcaagtgtatttgaccgctacagaatcccgctttacaaagaagcaagctttaaaccttatgttattgcagctatgatcatgctgtctaaatttgagaatcctcaggacatcctgaaaaagctggaagtgaaagcagctcccagaatcatggcataataccccgttggggagtgggaggtttgtatgtatcagagaaaacgaatcgtaatcgctcttggcggtaatgcattgggaaatacccttcctgaacagatgattgctgtaaaaactactgccagggctctctgtgatcttattgaggaaggacatcaggtggtggttgtccacggaaacggtccgcaggtaggcatgatcaataatgctatgtctgccctttccagagaggatgatacccagcctaacacgcctctttccgtatgtgttgctatgagtcaggcctatattggctacgatctccagaacgcactcagggaagaattgcggaagcgtggttttatgcgcactcctgtagtaacagttgtcacccaggtcagggtagatccggatgaccctgcctttgccaatcccacaaagccgatcggcaaattccttaccaaggaagaggccgaatatcaggcaaaagcctatgggcacatcatgcgcgaggatgcaggccgtggctaccggcgtgtggtagcatcacctaagcctgtagagatcgttgaacaggatgccatcaacagcctggtggatgccaataagatcgtgatttgctgcggcggtggcggtattccagtaatcctgaaggatcatcatctgaaaggtgcatccgcagtgattgacaaggactttgccagctgtcttcttgcaaagcagctggatgctgatatgctgatcatccttacagcagttgaaaaggtagccattcattttggcacccctgatcagaaatggctgaatgaccttacagtatcccaggctcgtaagtacgtaaaagaaggccaatttgctgctggctccatgcttcccaaggtagaagcagccattgattttgccggctccggttccggacgtacagcactgatcacgttgcttgaaaaagcgaaagaagggatccaggggaaaacaggaaccctgatccatctataaaacaacctggtaatagtaacttattgaaatgaacaggttgcctggtatcacatcaccactacatttaacgtccacgtaatcaaaaaggagttatcccaatgagaagaaaggtgcttacacttccgctcccatttcggataactccttttttcttatgatctaccggacagttctggtgaataatcaatgtccagtaattcctgtggatcccttatctgataataaaacacatcctccggatattgacggatcagtaccttcccgcccctgtcaccggaaagttttaaaagctgagggtaatacctgctgccaaaaatacatggattacccattttctcctgaaaacaacacacacccatgcccttccctgaaagaagaaatccatccaccagttcctttacactgccggctgtaaagccaggctggtctgccaccataaaaagacaggcatctttgtgaagattatgctgcagtcccacctgcatggaagaagcgatccctaggtcaggagctggattcatatagaccggaaatccctggctgatgcatgcttccaggatctgttcatactgagtcacaacctgcacctgacagtttaccttcagcaaccctgcagctttctttaatgtatccaatccataactatacataggctttccatttacaggatacaatagcttattctgtccaaaacggcggctatatccagccgccagtaaaattaatgcaagttctgttagttcatgctgtctcattttttatacttccccatacagccgttgtacccttttcttccaggcatctggcaatgttggctgcttcttccgggtctgacagtacatctgccttattaaggtatacacgataaatacgtttttccacattcttaaataaaccatgtatagatgatgcgatctttacaacatcttcaccagttactggtgcatccatatttttctgtaaaaatacggatgttttctctgctctgtgggtcacttcccgaataggatgaccaagacagtccagcccgatcacgctgatcacaatgtgtgcaaaccccgggatcaccggttcccattcctctggtaccttcaatggtttatgttttgctccatcagcctcgatcagcattacatcgcataaatctttaagctcccgtagctgttgttctggcaaggctgttatcttattattctctggatccagtcctgctgccaccacatatttatattgctccaggcacgccaacacctgctgcctgttgccatccttggcaaatggtctgtccttttcccattccatatgcgtggttgtagcgatcaccacagttttatccatagccgtcagctcctgacacagacggtagatcaagctagtcttccctccgcctccaacaacagcgatcactggatcgttctggatatccagatcaagaagatccagaaaatattctgaataatgcatcggctcctcctttatggaagtatatgctctccaagcaggatctcaatcacacttcctgctatacatctggctttatctgatatggtaaaacagttctttttttcttcttttctgggatcaatatcagcaatcttcattcctttaaagacatgatatccatcacgtatgatccctctcagcacacctgtgattgaagccgatacaggcacttctcctacataggcaagaatctgtcccttctccaccagatctgcaatctggctctttacatggatgatccctgcctccggagaatggagcacacgctccttgcttactccccctaccatacctggcacgcctgtattaggctgtgcataatcgtcctctatgatcctgccaagatcatgtccacgcatcgtttccaccacatagtccacatcttctccagccagaaagcctggaccaaggccaatggttacaggtgccatttctttccttgttccaagatttttctttgcaatgattccatcgatcaaagctgctggtgtctggccatccagcccggtcttaaggcatgccgcctccggatctaccaacagcggaatctgtcttttttcccacacttgcctgcattggctaatatcttcgatcctgctgcaaagcacaccttccacaaaggcttctccatcatatacagcttcgcagaaagctactttcctgcggatagcacttggcttttcacactctaatataaggactttatatccgcaccggaaaagcctgtggatcaccccagtggccaggtcaccgccacctcttacaataatataatgctcactcattattctgaagattttccttatttactttttctactgcattcacaatgttttcatatccggtacatctgcacaaattcccagccatgtgcttgcggatagcatctctggacagtggaatccctttttccaggagaactgtggcagacataatgaaaccaggagtacaaaagccgcactgtacagctccctcctctataaatgcctgttggatccttgtaagctctccgttcttctccagaccttccagggtgcggatctctttgccatcagcccagacagccagataaatgcaggaatcaatggtctctccatccaggatcactgtacaggcaccacattctcctacctcacatccttttttcacagaggtaagtccaagacgatttcgtaacatatccagaagagactctcttacatccacatattccgctacaggccgtccatttactgtacattgtaccagtctcatttcttttttcatgctctgtcacctccctgcagacggatgctttcttccagtgccctggctgcaatctcaccgccgatctgaagtctgaatgccctggatgccctccaggaattcctgggattgatttcctttcgtaccagttcttttacattggtataaagctcctccccaatcttcattcccttcagtgcctgctctgtttccctgcaccgaaggggtacaggtgctgccacaccaaaggtgatccttacatccttcagcgtatatgtatcaaggtctacagcactcactacactgcagcttaaggttgcaatatccatagcattacgcatggaatatttaatatagtggcctttataaccttcatattcacaggcagggatcacaatgtgggtcagcaggtccccagggtgaagatctacttttccaggacccagataaaactcctggataggaaccagccgttctccctgatcatttcggatcagcagcattgcgtttaaggaaaacagtgtaggtgcactgtctgcgctgacagccccattacatacattgcccccgatggtaccgatattccttacctgaggacctcctacctgatctactgcctcaccaagtacagacaaatgcctagtgatcaaaggatctgctgtcacatgggagaaagtagtgcctgccccgatccaaatatccctgttctcagccatccatactccctggatctcccttatatcccggatactcaccagggaagtacctgccattttgccttcccggatcttgatcagcacatcactgcctccggaaataactctggcatggggatgctctttcagaagctttaccgcttcctctatggttgacgcctgataataattctcaatatcatacatttttcagtcctcctcaatcatcccacaactggtataagtcctgccctttggaaggcttcgatcagcctttgaggcgtaagcggattctcattaaatgctacaccggttgcatgaagtactgcattgcgaatagctggcgccggaggaatagcaggcggctcacccagtgctttattgccatatgggccttccggatcatccatctctacaaaacctgcagtcagatccggtgtatccatcatggtcatcattttgtaatccagaagagtggcattcaaaggacgtcctgtcttttcatccagaagcagctgctcagacagaccatatcccatacccatggacatcccgccctgaacctgcatggaagccagctggggattcaacagcttcccactatcatgtacattaataatattcagtacttttacttttcctaaagccatatccacttccacttctgcaaacccacagcctgtggcaagggtatttttctttacctgtcttgaaacctctgctgtaattacagaggaattcgtcaggctgtaatagcattccagtgccagctgttcaagtgaaagcaccttctccccatcctccaggatatatccatgatccagttccagcgtacccacagcctcaggaagaagcgtcttggcataagcaaggatcttctccttcaaaagctgggcacattccttcactgctgtccctgttacaaaagactgcctggatgcataggcacctgtatcaaaaggtgtaacatctgtatcctgcacagaagtgatatggatattctccagctccatatgcagcgtctctgctgccatctgtgaaaataccgtatctgcaccctgtccgatctctgttgcgcctacctgaagctgcacgctgccgtcctgattcagggacattctggctcctgcgatttccagggaaataggccatactcctgttttataagaaaacagggacattcccactccccttcggatgttgcctgtctggttagcatattcttttcttttttcttcccagtggataaattctgcgccttttttcaggcattcaaaaataccgttcgtatgagctgcaataggcttcaggtatgcatcctggtaaaaacccttgatcagattcttctttctgaattccaatggatccatatggatggcatatgccacatcatccataaaacattccatggcaaaattcgcctgtggaatcccataagcacgcatagcaccgcctacaggtgtattggtataaatggtatatccctctgcccgcacattaggacatccatactgaaggcgccaggcggtaagcccgttagctacaatggcatgtccatgggaagcataggcaccctggttagaataagcatgcatatcctttgctatcaagtggccatcttcatccactccagcagccagatcatactctatggagtgtcttgttctggtattcacaaaggtttcctctcttgtaagctccagctttacagcacgccctcctacagccatcgtaagaaaggcatttaaaggctcatacagcacatcctgtttattgccgaagccaccgccaatatagggtttgatcactcgtaccttcccccacgggattcccagtgcctgaccgatcaccctgcgcacaatatgcgggatctgggtagaggatactactacgatccggccattttccatataagcataagaaatattattctcaatatgacaatgctgtataataggtgtcttatagctggctttcactacaactgccgcttccttcatcccctggtccacatctccaatttcataatctgaatgtgccaggatattatcctttttctcctggtgtatcggaggattacttcctttcatggactctcttggatggatctgcacaggatattcttcatattccaccttgatcagccgcaaagccctggaggctgtcacttcatcctctgctacaaccgctgcaatatcatctccataataccgtatacgtccggtaagcagattacggtctgacacatcctgatgtgcagtttctacagaccatggatgccctggtgtagggtaaggatgtgtgggcacatctttaaatgttacaacctttaccacaccgtccaaagcctcagcttcactggtgtcaatggaaattaccctgccatttccgatggtagcatgataaacctttgcaaccagacagtggttcagaatcatatcatctgtaaacctagctcttccggtcaccttgtcgtaagcatccactcttggtacactttttccgatcataagcttcaccttcttttttcatagctttgttaatattttaaaagagccagacagctccctgccatttcaggaaccgccattggctctttatctgcttctatttcttcctctcatagggagtatcagaaagaggaagggacgtcctgaactttccatcataatgatagtaggctgctgcaatagccggtgctgttggtatggatgtgatctctccgattccaatggcccctcctgctacattcagcccttttttctctacaataatactctctaccaaaggtattttgtttgcttttggtaatcccagtgtaccatatctggctgttggtttgcaatctgtaagaggatatttttctgtaagtgcaaatccataagacataatcacaccgccttcgatctgcccttccacagacaacggattcactgcttttcccacatcatgggcagctacgatcttttccaccattccgtcctcattcaaaatacatacctgggtagcatatccataagccacatgggaaaccggattcttcagatcacttcccataggatctgttttcgccaaatattcacccatatattcactgccttccagattagaaagatctgttccttccagaacttttttcattttttcacaggctcgtatacaagcttcccctgtaacaagagtctgcctggaaccagaggtagtacctgaatccggtgcactataggtatctgacccactgtaacagatcttttctcttggaagtcccagatgctctgataccagctgcaccagaacagttcctacaccctgtccgatgcaggatgctcctgcgtggatctccacacgcccgttctttacaagcagtctgcatctgccccagtctggcagccccacgcctacacccgcattcttcatagcacaggcaatgccggcacctggatgttcatcaaatactttctttactgcttccagtgtttcacaaaggccagtggatgcatccacgatctgaccattaggaagctcctgtccgggccgtatcccattcctgtacctgatttcccagtcactgatccctaccttctctgccattttggtaaggagcatttcaattgcaaaacaggtctgagtcacaccaaaccctcgaaaagcacctgccggaggattattggtataatacgctttaccatcaatatcaaaattctggtaattgtatggtccggatgcatgcgtacaggctctttgcagcactggtccgccaagggaggcatatgctcctgtatctgcgatcacacttgcctttactccctggatgatcccattttcatcacaccccagcgtaaactccatatccataggatggcgctttggatgaatcaggatactttctgccctggtaagcttaacctttaccggataaccggacagataagcgatcatagcagcatgatgctgaacagtcacatcctccttgccgccaaatcctccgcctaccagcatattccgtacacgaaccttttctgccgggagtcccagaacagtcatacattcctgctgtgtatcgtaaacgccctgatccgtagaataaacggtcacaccgccatcttcatccttaactgccactgcacactccggctccaaaaaggcatgctctgtccatggtgtttgaaaactgtctttcaccacataggcagactgtgcaatcgcctgatctgcattccccctgtgtatatgccaatgagccataagattatccttttctgactcatgaaccttaggtgcttccggcttcatagcctgatatgggtctttaaccataggaagctcttcatactctacacggatcagttttttggcctcttcaaggatctccggtgtgcgggctgccacaagggcaaccgcatctcccaaataatgaaccagacgtcccaccggaaccaatgtatcccagtcttttttcagatgtccggttttaacattgcctggaacatcttctgctgtataaacatcgatcactcctggaagtgcctttgcctcctctgtgtgaatagcaagaacccgtgccctgggataagctgcccgaagggcacttccatagatcattccctcaaactccaggtcatccggatatttaccggttcccagtaccttttcctgtacatcaatccttggaactctctctcccatcttccaagtataggaaggagtggctggaagcccttcccgcaaatatttccctgcaagaaggatcccgtcaatgatctttttgtaacctgtacagcgacaaatattattcttgatggcatctgcagcatctgctctggaaggatccggatttttgtccaaaagcccttttgcactgatgatcatcccaggaatgcaaaaaccgcattgcacggcacctgcttccccaaaggctcttacataaatctccttttcctgctcacttagaccttccacagtcaggatatgctttccttcaagcttggaaagtctggggacacaggctttcatgggcttaccatcgatcaggacatggcaggtaccacaggcgccttcgctgcatccgtcttttactgattttaatttacatacatttctcaggaaaggaagaagcttcccatcgccttcctcctgatattcctttccatttacataaaaacggtacatagatccctcccatattttccggaacctgaacgatctgctttacggaatcagataactgtaatcacaaatcactgcaagtatcagttttctaaggttttcgtacaatggatcctccggatcgtctgccttgcattgcttttctgtacccagaaaacggactttgcagatccgattctcatgatccagtacagtaaatccgtcatttttgctgtctgccatgtcagcttcactggcaaataaagtaaacttgtctttatatggtgcacttgcatatggacagaaagtgccacagttcccgcattcattacacatataatcaacatggatcacctggtctttctccatgccaggcacatgaacggaaatattggctctgtttggacatacatccacacaattctcgcaaaccctgctgcaatccagacatctgtctgcctcggatgaagcctgtgctttttcacaaagaatacctttctttttatagcaatcttcatttgttccctgatccggatgctggcttacgatgtcttttttcaagatatcctttgctgctaactgagcatcacgaatgccctctacaatggtagctgctcctctggatccatctcctactgcataaatcccggccacacttgtctcacaggtctgggtattcaggcgaagtctgcccttttcattcacagccagtccatttgcctgataaaactctgtgggtacattttcaccaactgctgcaatcacagtatctgctggaacctgcatccattcatccgtttcttttacacctgcacggccagattcgtctgcctgggtcagttccatttttctgcagaggaggctgccattttcaagactaacaggtgacagaagttcacagaactgaataccctcaccaagaacttccagcaattcatcctctgccgccggcatatatctcttagtccttctgtatacaagtgaaaccttttccacgcctttcacacggctggctgcccttgctgtatccatggcagtattgccaccaccgataactactacattctttccaagggaaagttctccattcttttctttatattcccttaaaaattcaagtgcatttcggacttctcccttttccagagagagaatgccgtgtttgtgtgcacctactgcaagaattacagaatcaaatccttcatctttcagttcctgaacagaaccaattgccctgcctgtctttactgtcacaccaagtgcttttatgaaggacagatccttttcaatgtcactgtctgtaatacggaactccgggatcacgtaacggatcactccgcccagctgtgcctctttttcaaaaatagttacatccgctccctctcttgcaaggaagtaagctgcagctatacctgccgggccaccgcctacaacagctgtttttttactgatagcagccttcgcctttacatatggaagcacactttcgtatccgtttttggcagccatcagctttgttccacgcacgtccaccggctcttcataaaagttccttgtacattttgtcatacaattatgtgcacacaaggtaccggtaataaaaggaagtggattcttatccagaatcacttcaagagcttctttatatctgccttccccagtcagccggatatactccggaatatcctgatggataggacatccttcctgacaaggtgcataaaagcaatccagaagcggaacctgctgatcactctttcttacaggaagaggcttaatgctctttaaatggtggtgatcttttttcgcttcttcagcaagggcagacagcttctccacctgtacaccctgccatttctccaaaggcttttccattactttttctgccatctgggtaaatctctgatatccgcctggttttaataaagtagtagctactgttaccggccacacaccacaggaaacgatcttgtcaatgttataataatcagctcctcctgaataagcgatccgaagctttcctttaaactgtgcagaaagctttgctgcaagtgaaatagacagtgggaacaaagacttcccggacatatacatttcttcacttggaagctcacctctggtcacatccacagggaaggtattggtgatcttcactccgaattcaagcccaagctgaccggaaagctctatcagtctggtcagcataggcacagcatcctcatactgcagatcatccaggaaatggaaatctccaaatgccatgtagtcgtatcccatctcatccatagtctttctggcaaattcatagcccaaaagagtaggattgcatttaataaatgtatttaaatgcttttctttcagcaggtaatctgcaatactttcgatttcctttggcggacatccatgcaaagtagaaatcgtagctgaattacagactgcagatgggatactcttaatatcttcagcatttacatgctgaaacaggtctgtatgatccagaagccattcctggcattctttaaaaacagcggtatcctttgcttccttcatgccttcgataaaggcatcgatcttaggagtcttgatccctgccagatcatatcctacggaaatattaaactggaatccgtcctgtcctcccagttcaaactctttggccattacatgaagcagaaaccatgccttaatatattctcccattgcatctggtactgtcagctcagtagaccactcacagttatatccctcgtcctcagcaaggatacatggcttattaatacaggaagccaattcctgtccatccatcttctgcacagttttaagctcaaagaatcgtgctcctgcataatatgaagctacaatattctgagcaagctgagtatgggggccggctgccggcccaattggattctccagcttcctgccaaagatctctccgcctttcccaggatctgccttataagccctatgcactccaaatacagttcctcttgatctttcttcctccaggatccactccatcagttgtccaaaggacatacatgtcataagatcactcattcgtctgcctcctatttcccactgttaatatcatctgccagttctttcgcagactgtctgcagtctgccatcaccttctccacatcacataccaatacttctctgtccttcatcagcacttttccattgcagatggttgttacaacatctcttccggttgtaccaaacagaagatgaccgttcacattgtccccacgcattggtgtaagaggatcataatccattacgatcacatccgctgcagcacctttcttcagtacacccagctgtttcttaaagtatctgcctgcgatcactgcattattctcaaacagcatcctgggaacctctgcccaggctgcattaggatcgcaaaggctatgcttgtgaaggatatttgccaccttccaggactccagcatatcatgggtatatccgtctgttccaagtcctgtaacaattcctttatgtaccatctccatagtaggaggacatccacaggcattgcccatattggattccggattgtgtacaaccatagtatctgtgtctttgataagatccatctcatgctcattcacatagatacaatgtcccagaagagtcttgggtcccaggatattccaatcatataacctgtccacgattcgcttattatgctctttcaggcactgatgaaggtcatagatcccttcagctacgtgaatatggtaaccaacaccttccggcttcagttcattacaaagttccattgtctgatcagaaatcgtaaaggatgcgtgcatacccatcatagctgcgatcatatcgctgtcatctgccagggcgtgtttgataaaattcacgttctccataacagactccctggacttatccataccatcacggtcagaaatctcatagcacaggcaggtacggatccccagatccctggctgcgtcctctatagcacttaaagatcctgtaatatgcccgaagctggcatgatggtcgaaaacagttgttacaccgttgcggatggaatcaatataggtagcataagcgctgagcctggtctgctccagcgtaagatgccggtcgatcgtccaccactgtccatccagaatatccagaaaaccagatggattgtaccccttaatagaaagccctctggcaaaggcgctgtaaatgtgctcatgtgcattaataaatgcaggcatgatcaggccaccttttgcatcaatgtattctgcccctggacaggctttttttacttcttccgtattgcctaccatgtggatcgtattgccatctatggccactgccccattttcaaagaatatgtgagatttgtcccgtgtgatcattcttccattaccaataataagcatatttacctcctccttttttatttaactgatttttttaggaatactccatattttatagtatcaatttatcataaatttgtataaatttcaatggaacttgcaaaaaatttttttgatattcttaatttttttgttggaatgtgcaagaaggcaaaaggatgatttccttttgccttct

SEQ ID NO: 29 - DNA, 52268 bp, Unknown
  gut microbiota DNA sequence
tccctgactccatgcttccggatcaagaactacatgaaaaccctttccattctttacatgccattcataaaaggatctgtgctcatcgcaatattcctccataagattcataatggtgccgccatgcactaccagacctgctcttagtatcttacggttgatacattgctgcactgcttttccaaatccgtcaaagcatcttttcttaaaagcccctctgctttcacctcctggaaatggaagcatcccattagaatcaatccactgctgataatgctgattaccagacagttccttataatttttattctcaaactctccgaaatcacactctgcaagttccggaataacatacgccccatatttcggaaaaagaatctgtgcagtctgcagacacctctttttaggacttacaaacactgcatctatttccggatattgaagagttttaagaaactctatcccctccacacaaagaggctcatctgtcactccaatgtacttgccggatttgtttccctctgtctgcccatgacgaatcagccacaaatcaagcatctttgatcaccgttccaatcccgcatatcactcttgtcactttccggctgtaagatgcaagaacagtacagatccttcctgtcttctcacggtatgcccggtcaaaagcatctacaggaacaactccatagccgatttcacaggaagtaaggatcagatttggatttcttcttatcaattcctctccaaatccttccagatcttgtcctgcctgcatttcctttcgtataaactcatgaaaattcaaaacacctgatactgtaaaaatctcgtctgcgcccagatctctgccttctctccagcaaatttcaggatgctgcttttttgcataatcgctttttccctgaaaagcccctccgatgatcagttccatttactttctccctgctcgacttgaatttattatatgaaattagaaacaatagccaggatcacacacatcccggcctcacaggtacaaaggaaaaaccctgccagatcccctgtgatccctccaaaaaatttcatggccatatgatgataccagacaaaaaccgccagtacgccaagaaaagccaggattcctaaaacaggctgtaccagtaccataagagcaagcaaaactgccagataaatgaccagcacattccgaaccgtaatatcttctgattttcttgaaaactctgccactgttccatcttttcttgcttttggaaatgtaaccacgctgatcccggaaaaacacctggaaaccataaagcccattgccatgatcagcagcgctttgccgtttctccacatctggctgtaagccccataccatgtaaggaaataaatgcctgctgtaattactgcaaaagctcctgcattggaatccttcaggatctccagcctgcgctcacggctttgccaggagcttaatgcatccgatgtgtccagaagaccgtccacatggatccctcctgtaataagtacaggaatcaaagtgagaattactgccacaaagctgctattgtatccacaatactgccctgcatatcctgccagccaggtgatcagcccgatcactgcacctataaatggaaaaaagcagaacatatacttgatattttctttatcccagtcagttacaggcatagggatcttggaatacatagcaaacgccgccttaaaattattccacagttttttcatcaggtacacatcctcccttcagttcaagaatgcctcggcattcttgctgcgaggtgcgcgtcatgcaattgcatgacatacttctcctgcgcacctctgcaatcctgccggaggctatatcagctgggggattgactcccagctgatataccggaatcccatatacaacttccgtcacttcatctgcttccccggcaatctgacgattgatctctcccagatagctttgataaagagcggtctctcccagatactgagcagtttccgaaaagatttcattggtcacgatcaccagatgctgtacactgtcacgaagatgttttaccccttccatcactgcttccacagttctttcatgggcaccctcttcctgaaacatttcattggcagtcagattggacatgcactccagaagtactacactgtccggatccagctttagtcccttaagatccgtatatctttctactgtttcaaaaccttttcctgcacgcatctgtctgtgccgcaggatccttgcatcactttctttatcaaaaggaaacatggtagcgatataaatccgttttccctgtccaaaagacaggatcttttcttctgcataggcagatttcccgcttccactgcctcctgttaccaaaaccagcattattttaagttcctcatattcagcatgttcatcgtttctccatgtggctatttcaattcttcatattgttctacatggatatcctcaaaggtactaagcgtattgtaaagctttgcacccatatccagaaacggaaatagcgctactgccccggtgccttccccaagacacatgtctccatggatcaccggttcctttcccagtgcctccatcaaaagcctggaagccggttcctttgacatatggctaggaatcatataatcacctgccagttcacacattttcctggctgcaagagctgccacacaggaaataaatccatccataacaaccggcataccaagaacagctcctccaagataaactccggtaagtcctgcaatgtccagtcctcctacctttgccagcacatctactgggtcttccggatccggctgattcagctggatcgccttctctatggtgcggatcttccgtaaaagtccttcactggaaagcccggctccccggcctgtcatcttttctaccggctgattcaagagaacagatgccactgcactgctggtggtagtattaccaatgcccatctcgccggtagccagtatctggtatccctggcttttcagttcttctgccatagcgatcccggcacggatcgcctgctctgcctgttctcttgtcatggcaggaccctttgccatattcctggtgccataagcaaccttcagatctcttcttgctaatgcatctgttaccataccaatatctaccggtttcatatccacaccgcactcctggcacatcacgcatacagtagaagtaccgcgtacaaaattatccgccacaatagcagtcacttcctgtcctgtctgggtcacgccctcttccacaacaccattatccgcgcacattgcaaccagtgcttttttatgtatatctacgttaaatttcccggtgatcccggcgatctgtatgatcagatcctccatctttcccagagaatgtaaaggctttgcaatactgtcccatcgtttctttgctttttccatgatctgctgatccaacggccggacagcagcaatggtttcatttattgtcatcttttctctctccttacttctttcctgtggtaaacacaaggaatttactgaatatgtaattcagcacaagtaccacaaactgggtggcaaatttccctagcatatcattcatatgaagctgttctaccagaagccacacgccgcccacctcaatcaccatagttgccagcctggctccgataaacttgccaaaaggcttaatatgatccttcagggtctcacatttatcctgaaatacatattttgaatttaccacataggcaaaaagaatggcaaggataatcgaaataagattagctatattcagttccatacctgctttacgcaggatataaaagcttacaagattaaccatagtggtacagccgccaaaaaagacataccgcaccacatcattcttatataattttttgatcagttccttcattttaatgttgctgttctcctgttccacgtaatatctttgatacaatataccttggccgtttctttacttcttcataaatcttcgcaatataatagcctataatgccaaggcttaacatcacagcacttccgatcataagaagcacgatcaacgtagtagtataaccctccacagcccggccgccaaagaactgcacaagcgaatagatcaaaaggaccagtgaacaaaggaagcatgctgctcctgctatcgtaacaaactgcaggggcacagtagtaaatgccacaatgtttgtaaatgcatatttgatcaaagaccaggtggaccatttggattcacctgcttctctctcctgaacataaaatccaacggtagttgttttgtatcctacccatgcagactcggctctgaaaaacatattccgctccggcatcgacaaaatactgtctaccacctttcgatccatcatcttaaaatccgaagcattcttcatgtcaattccggtagccttggacatgatcccataaaagaagcctgcacactccttatggagcacgctttccttgcctctggagagcttcactccctcgatcacttcatagcccttctgccacaatgcgtacatctgaagcagcgtttccggcggatgctgcagatcacagtccatcaccgctactacatccccttctgcctgtgcaagccctgcacagatagccgcctcttttccaaagttccttgaaaaatgaatacccaccacatttgcatccttaaaaccggccttttttatttcttcccatgtgcgatccttggatccgtcatccacaagaaccagttcataggcaagccctgctttttccaattcttcctttaatactttgcaggttttcccaaccatcagttcctcattatatgcggggaggacaattgacagtctgctcataatataacctccagtccataattccagtcaaatttaacttccccattatattacaattccatgatccaggcaacaacgttccggattcttcaaaaaaagttaagatttcaggaagcagttatattgatccacattgcaggacgcacaccaaagtccagtttatccacagctgcaccataaaaactggtaactccgctttcagatacataatttgcatttttttgtaaaaatcccggagaacgcagccaccagctgcagtaaccatagtcaaaatctgttgttctctccacagctgacactccctgcgccaaagcatattctgtaggttcagcctgtttttcctgtgaggtaggcaggcattcttctgcttcttcctcacttagcagaaaaatcctgtctgaagtatctttttcttccatgaagagcttttcgtcgccaaaggtttccctgtacttttccaaagaatcttcatccatatatttaacatcttttttaaataaatatcctaatgtatcttcagtagaaacaggagcagcctgaatcctaaccttctctttttcatcaaaagcatcatccaagaatgtagtattcagccactttcttatagaacagctttcccaggtacagctgttccagtaaagattgtaatactgacaatccagcacatatttactaagcaccaaagccctgtccttttcttttttcaggatgatccattcaattttttcttttccatcagatgtatcattatcctgttcataggagccaaacaaaatgctgtcacctacaggtacgtcctgcagattttccagtttctgcgcatgatactgatcatatatttcctttgctttttgcttgctgtccttataatcatcaagggaaatcagctgctcatatgacttcaaatattctccctggctgatctgatctaatgcttttttatatttttctgcaggaataaacacaagatctgcccacacataaatacaaagagccccgattgctgtcacacagacaatgatatttcgttttatccacttttttctcttttttttctgtctctgtctttcctcttcctgtgcgatctgctccaatcgccagcgttcctgctgttccttctctcttttttccttttcttcctgattctttatctgaacactatgaagtttttcttcacaaatactgattttttcctttgcatcctgaaattcaggaatttcccggaaccctttgattgcagccacataatcttcttccaggctggcttgttccatgatttctgttgcctggtcgtacaatcgtttctgacgagcatgttcatttcgattccagatctggctgtttatttccattaattcggatgaaaattccttattcccgaaacgaatcgccttgctgaaatttctgtcaccccaaaatgtttcttcacaatccaccagctgttctttcgtatatacatgccgctctgccatcatttttccaagatatgcctgagcattcccaggatccagatcaagcacacgctcacaatatttatcagccatcttccaatttccatcctccaggaaaagaaagatcctttctaaaagagctgatatgtttatctcctctgctgacaatggcttatttgcggactgggtcattgaatccttatccaactcagaaagagtctgccgggtaccacaagaatcacaaactcccacgggatctcccggcttaaacataatccggccaccgcatattttacatttataaattgccatatcccacctcttacagaatctgagaaatcatctgctgcttgatctttgcaaattcctcgtcgctgatcagtccggtatccttcatgatcttaagcttctcagccctcttcctgaaatcctggatatcctctgcctgcagctgctccttgctttttgctgcctgctgtgcaacatcaaagctgcgttcctgggcataggtatatccttcctgctctctttttgtcgcctgtgcctgagagtcgatcacaaccttttgtgcttctgtctgtgcacggatcagatctgtctgctgatcaagctttgcctctgcaacatctgaatattgcctgaaatagatttctttaaacttctcatattgcttatccccatccggttttacaatggttgtaacaaaaaatttatccaggcagagtccataatctgcgaaatctggtataagaagcttatgtatcgccatggaaaaagcattcagattttcatcgatctgaaatatactgatcttttctactctcatcgtctgtgcaatataggtctttgcttttgccattaaaaatcctctgaaataatcagtcagttcgtcccggttcaccccattcccggcaccagccagacttagcagaagcttacagccatcttccacctgaaggatcatttcaccgcttgctccaatggaaatgggaaatccatatattggctccatgtactgaacttttgtatctgtgccccatttaatgttcatctgtcctgctttattgacaaaatatacttcacagtgaaaggggcttgtgtcaccggtaaaccggttcagcagtttgctgataagcggaatgttctgcgtttccaatgtatatctgccaggtccaaatacgtccatgatctgaccatccatgaagaaaactgcttcctggctttcatgcacgatcagctgggtaaaacaattaaaatcctgacttggatgtttccagataaatgtataattgtctccttcatatttgagaacatctgtaatctttgccatattgcctttccccccttttgaccttatttttaactgtaattttttgcgtaatcctgcaattcatatattttatctgtcagtgttgatctgttttgtaaattgtagcacaaattatagatgaagtaaatccaattatatatagcattcctggcaaaacaagaaagacccacagcaccaccttcatcaggcagcgccgcaggtccactttatgctacgacacgataaacatatattggagtggtgcagtaaaagcacctaaccctatgtttatactattaatttatattgcggccactgccgccaaataatcttattcctctgttccgtacagagtgatcagcttctgcagatactcatatctagctgctgcttcagactggttcttagcaaacagtctggcagctttctcaggattctgacgctgtaaggagttgtaacgaacctctccattcaggaatccctgataatctgtcatatccggtgctttggaatcaaggctgaacttgttgccttctgcagccggattgaagcggaagttatgccagtatccacacttaacagccagctcttcctctgtctgagcctttgccatacccttcttgataccatggttgatacatggagcgtatgcgatgatcagagacggtcccggataagcctcagcctcagcgattgctttgattgcctggttgaagtcagcgcccatggaaatctgagcaacatatacataaccatagctcattgcgatagaagccatatctttcttctttgtctctttaccgcctgcagcgaactgagcgatagcaccagtaggtgtagacttggaagactgtccgcctgtattggagtaaacctctgtatcgaataccataacattgatgtcacggccgcttgcaagtacatggtctacaccaccaaatccgatatcgtaagcccatccgtcaccaccaaagatccactgggatttcttagccaggaaatctttctgggtaaggatgtctttcgctttgtcacatccgcatgcttccagagctgctacaagtttctcagtagctgcaccgttagtagcaccacatgcaaatgtatccagccattcctggccagcagctttaacgtctgcgttgtcgccattagccacaacatcttctacttttgctttcaggccatcacggatagctttctgagcaagaagcattccataaccgaactctgcgttatcctcgaacagtgagttgccccatgcaggaccctgtcctttggcatttacagtatatggtgtagatggtgaagagttaccccagatagaggagcatcctgtagcatttgcaatgtacattctgtcaccaaacagctgagtgatcaatttagcgtaaggtgtctcaccacatccagcacaagcgcctgagaactcaagcagaggctgtttgaactggcttcccttaacagttgtctctttgaatttcgcaataacgtcttctttaaccggaagagttactccataatcaaagtatttctgctctcccatgtttgcttccagattctccatagcaagggcttttgcacctttcttgccagggcatacgtttgcacaggaaccacatcctgtacagtcaagtgcggaaacagtcatggtgaacttgtactctttcatacctgtcataggtaatgttttgattccctcaggagcatttgcagcttcttcctctgtaagagctaccggacggataacagcgtgcgggcaaacatatgcacatctgttacactgaatacagttctctggattccatacaggaatatttacagcgataccacgtttctcgtatgcagcagcaccggatggtgtagtaccgtcaacataatctttgaatgcagatacaggcagtgtattaccttcctgtgcatttactttagcctggatgttattaacgaaatcaacaacttcctgacgtccttcggaagcatgagtcatatgcaggccttcatctgctgcatctttccagctatccggaaccttgatctcaacaacctgttttgcaccagcatcgatagctgcccagttcttctgaacaacatcatcacccttacgtccgtaagttgcctttgcagcagctttcataaggtcgattgcctgatcctcaggaatgatacctgtcagtttgaagaatgcagactgaaggattgtgttgatacgtgttggtcccatgccagtctcaataccgatcttcacaccatcgatggtgtagaatttgatattgtggttagcgataaatgctttcacctgtcctggaagatgtttctcaagtccttccatatcccatgcacagttaagaaggaatgtacctccgtcaaccagctcctgaaccatgttatatttattaacataggaaggattgtggcatgctacaaagtctgctttgtggatcaggtaagtggatttgatcggtttcttaccaaaacgcaggtgagacatggtaacaccaccagatttcttggagtcatagtcaaaatatgcctgggcatacatgtctgtgttgtcaccaatgatcttaatggagttcttgttagcacctacagtaccgtcagcaccaagtccccagaacttacagttagttgttccttctggtgtagtaacaagaggagcacctgtctcaagggaaagatgtgtcacatcatctacgataccgattgtgaatttctctttttctgtattgtcataaacagcaacgatctgagccggtgttgtatctttagaaccaaggccataacgtccggagaagatcttaacgcctgcaaatttgctgtctttaagagcagctacaacatccaggtacagtggctcgccaagtgcgcctggctcttttgttctgtcaagaactgtgatctgtttaacggtctcaggaatagcatcaaccagtgcctgtgcgctaaatggtctgtacagacgaactttgatcacaccaacttttctgccggctgctgttaagtaatcgatagtctcttcgattgtatcatttacagatcccattgcaacgatcacatggtcagcatcagctgctccatagtagttgaaaagcttgtaatctgtaccgatcttagcattaaccttgtccatgtactcctgaacaactgcaggaagtgcatcataatatgggttacatgcctctcttgcctggaagaagatatccgggttctgagcagaacctctctggcatggatggttcgggttaagagcatgatcacggaatgcctggatagcatccatatcagccatatccttcaggtcttcataatcccatgtctcgatcttctggatctcatgagaagtacggaatccatcaaagaagttgataaacggaactttgcctttgattgcagcaagatgtgcaacaggagtcaggtccataacttcctgtacggaagactcgcaaagcattgcacaaccagtctgacgacaggccataacgtcggaatgatctccgaaaatagaaagtgcgtgagaagcaagtgcacgggcagatacattgaatacacccgggagctgctcaccagcgattttataaaggttagggatcatcagcaacagaccctgtgaagctgtataagtagttgtcagggcacctgctgccagagatccgtgtacagcacctgctgcaccagcctcagactgcatctcagttacctgtacttcctgtccgaagatgttttttctaccctgggttgcccactcatcagtggcttcagccataacagatgaaggagtgataggatagatagcagctacatctgaaaatgcatatgaagcatgagcagctgcatggtttccatccatggttttcatctttcttgccatagttttatctttcctccttaaagatttataaaaatattatttctagacatctgagtgcctaaaattccatttactattatagcatacaatttctcatatttctattttagtttctgttttttttgtatattataagatacaaaagaaagaaaaaaagcaccggtgaacgggggctgaccgcataccggtgtttcttattcatgttttaatctgtcagtcccaggacctggtcaaggggctttcttttcagcagacgccacagttcatcctggatctctgccagttctttgtgcatataacatacacttccgtcctggccattacggacacattcatttttcggattaaggcattcgataatatacatgtccggatcaatcgcatagtatacctcaaacaaagtcagagaacctaaatctttattcaaagtataaccgccatggacgcctctgaaaccttttacgattccggctttctggagttttttgagaattttataggcaaaaggagctgtaatagcttccctgtcacaaatctcattcacacttaaacgtgtttctcctgcaagcgcccgaaggactcttactgcatagtcacactctctcgtaataaacatacctttataacctctctctttagcatttgcattctagttgttgatccttagttgtcttttcctccctgacaaatcgagtataacaactttaaaggaaaaattcaacaacatatctaaatatatttaactctttttgaaaaaaacgtcacttttattcatgaaagttataagattttttatttttctccgaaaatcaacacaaaaccaacaaataatatgaccgttcccaacacatatctgattcttttgctccatgtatcatactttggattttccatcatcttctctacataactgtaactggtacctgctgcgatgagcaaaatgctgtgcccaagtgcatataaaaccataagaagaatcccccagccagtgcttttcccaagccgcgcaacaagtgcaagaagcgccaccataaccgggatcgcacaatgggaagcaaacaaacctccaagagcgcctgtgagaaatgctcctgcatatcctctcttcatggtatgttcatcaaaatggatatgagggatcacattcaccacgccaaatacctgaagtgccataagaaccatcaaaattcccataagcactgcccaccagtgtcctgcctcatgcatatgatgtccgattgcagaggctacagaaccaaatacgccaaaagtaactgccatacctgcagccatagcaagagaaagccgaaatgccttcccggggcttgccttggaagcacctacacaggtaagcagcataggcacagttgccagggagcagggggtaaaggatgtaatgatcccggccacaagggcaagaagcggtgcagcccagaagcttgcagccatacaattagttatggtttccaatattccattcatttataatctcctcacatatctgtctgtcactttttccatcggttgctatctgataatctgcagcagcctcatatttggggcggcgtgcttccatcagttctttaattgcctctacggactttttctcttccagaagagggcggtcgtgattatttttcacacgtcttaaaatggtttccggctgagccgtaagaagaactattttcccatttttcttcatgatctctacatttcgaggctgcattactgttcctccaccacaagaaaccaccacattttcctgatcctggatcttctcaagaaattccgtttcttttttgcggaaatatgcttcccctttctctttaaaaatctgggatatcttcattccttcttccgcttcgatctggcgatccatctcaatttgcttcatattataatacctgcaaaggcatctggccactgtgcttttaccagtccccataaacccggtgagatatagctgtcctgttttcattttttatcaactccgttcgtaaattaccctgttttccaggtcaggctttcacacattatagcagtggtttatttttttgtaaagaaatgcatagaaaaaccaaaataattcttacaaaattcacagtttacgataggaaggaaatcggctatactagagaacagtgagcaaatcgactatattcggaggtaaatatgatttcagcaaataacatcacactgcgtgttggaaaaaaagcgctttttgaagatgtaaacatcaaattcacagaaggcaactgttacggtctgattggtgccaatggtgcaggaaaatccacattccttaaaatcctttcaggacaactggagcccaccaaaggagatgtggtgatcacacctggtcagaggctttccttcctgcagcaggatcatttcaaatatgatgcctatcctgtactggatactgtaatcatggggaacgcccgtctttatcagatcatgaaagaaaaagaagccatttatgcaaaggaagactttacagatgaggatggtatccgtgccagcgaactggaaggtgaatttgcagaaatgaatggctgggaagcagaatctgaagcagctaccctgctgaacgggcttggtgtagatacagagtaccattattcccagatggctgacctgaacggaagcctgaaggtgaaagttcttcttgcccaggcactgtttggtaatccggatatcctgcttcttgacgagcctaccaaccacctggatcttcctgctattgagtggctggaagaattcctgatcaattttgataatacggtaatcgtggtatcccatgaccgttatttcttaaataaggtatgtacccagactgctgacattgattatggcaaaatccagctttatgcaggtaactatgatttctggtttgagtccagccagctgctgatcaagcagatgaaagaagcaaacaagaaaaaagaagaaaagatcaaagagctgcaggaatttatttcccgtttcagtgccaatgcttccaaatccaaacaggctacttccagaaaacgtgctcttgaaaaaatccagctggatgatatgcgtccttccagccgtaagtatccatatattgacttccgtccaaatcgggagattggtaatgaggtactaatggtagaaaatctttccaagaccattgacggtgtaaagatccttgacaacatctcctttacacttgggcgcaatgacaaagtagcttttgtaggtgccaatgagcttgccatcaccaccttcttcaagatccttaccggagagatggagcctgattccggtaattataaatggggcattaccacctcccaggcatacttccctaaggataatacccaggagtttgataatgatctgaccatcacggactggctgacccagtattctgagatcaaggacgctacctatgtccgaggcttccttggacgtatgcttttcccaggagaagacggtgtaaaacgtgtccgtgttctttctggtggtgagaaggttcgctgccttctttccaaaatgatgatctccggtgccaatatcctgcttctggatgagcctaccaaccatctggatatggagtccattactgcactgaataacggactgatcaaattcccaggtgtgatccttttcacttctcatgatcatcagttcgtagaaactacagccaaccgtatcatggaaatccttccaaatggtacattgattgacaagatcactacttatgatgaatatctggcaagtgatgaaatggctaaaaaacgccaagtatttactgtgaatgaagcggacgcatctgacaactgatctgccctgctgcactaacagttgcaatatcaaaaccaatcttgaaatcacaaaagaggaaactgcatctgcagcttcctcttttataatgtagcatatgataatacagacaggatcttcaaaatcctaatataccacttcttatcttacctgaaccttcattccaacataatcagatggatagaagaaagtaattgctgtattcacactctggatccagttggttgtacgcttcggtgcattcatcagcagatagcgaagactggaataagtattggtgtatgccttgttccggctgtaagaactcatcagcttgcccttatagtatacacggtatgccactgcactgttctcaaaagtgtactgctcaaaggaattgttgcttccaagagtacgtcttgcaactgcgcctctctttgcagacatgatcacaggagcacctgtaaggttactgccggtcatcgtgaagttcacacttctgcccttagctgccttcacaagtttcatcggacggtgggatgctctctgcctcacaaaagaaatccccgccttgcctgactgcgtggtataatccacacggatcgtcacacttccccgattaacacggatacaggaaagcattcctgaattgctgcctgcactttgtttgataaatgtaccagctgcgttgttcacataaacgcccttattcgtgctgcgcaccatatactcggtaggctgactgctcttgcctcttgggtaagatgcgatcactgcatcgtatctggtccttgtattggccggagtcacataaaccgtataggctgtgatcttgttggtgccaatgcttttgttcagcacatgataggtctgtcctgcagatatggtaagagtagctcttcttcttgtggctgctgatgcaggtactgttgctgtgatgatcgcagctgctgctatcagcgctgccgcaaaccatttaaatactttcttctctctcattttgcctccttagctgccttttacaggcctgttttgattttcattctccttacatggttatgggagcaagcttgcctcctgtaactttcagaagtccctccaaaggtgctttcagtgtaagaccgatccgaccgccactaatataaatctcctgaaactcaccggcagactgatcaaataccaccggatatggcttcttcatcccgataggactgcatccgcctcttacatagccggtgatctttgtgatgtccttcacatggatcatatccactgccttctcgccaactgccctggctgcagacttacgatccacttctgcttcgataggaaccacaaatacataatacccaccgctcttgccttccattaccagtgttttaaatgactgctcatgaggtgcctggatcatatctgcacaatggataccatcaataaaatcatcgcattcataagtaaatgcctgataaggtaccttctgtctctccagcatccgcatggcatttgttttggtttcttttgccatttctgtcgtcctcctaaagatgcatttatattataatacctgatttatattaatccgtaatatctattttcctttttctggttcttctctgactctgctgtttcttctgttcccacatctggctgtggatgtcctgtgtttttgccccgtccgtctttttagatcccgaaactctttcatccttggccagatccagctttccagtaaaataatcctcaaaatcatcctcatccagcagctcttcttccagaaatttttcttcaagttcttcctgatctgcctcatcctccaaaacttctttctttttgattctctcctcagatgatctgcgatccagctgttcctctcttcttgttgccttcgctgcccttggcttattaatagcaaactggatcagcattccaagaatagcaaatgcagcaccaaaaaggattccgtagggaatctgatccatagccagaagctttgcaagagacaagcctgcagttacgcctccaagaaaactggttcccacaatgatcacttccctgtcataacgcagagccagcacaccaatcccaactccgatcagaatacaaagaaaaaaggaaaaagaactggtgggatggatcagataaatacttaaaaacaggccaagtcctgcgcccaagataaaaatacctgcccggtaaatcataaaagccagaacagccatcacaacaccgatcccaagcatagccgccatataatatgccttttcctcagtatctatacgatacaccaagaaaaagccgattcctgccccgatacagaagccaaagatcatcatccagaatcgcagcagcctgtatccaaggatacagttagtcagcccgaaaacaaatacgatcccaaatacgatgatcatgatcccagatagcacctgaatccccaggatattatccatcatttcccccagcttattaagaatctccacattcataatcatttcctcccactttcagaacatgaaatacatggtcttcatattttcaagtaccccataatggtactcaacctgttccactccctgtaagtatatataatataaagcaatctgctgtattttcttattagcgatcaaatcctgatatgcctgctcatatcctttctgcgtactgaatttgaaccgaacaacggcagcaccattgtcaagtctcattttacaataatcataaacactttgccagtcatagctgtcaaaacatccctgattcagcacataaaagttcttggcagtagccgtgcaggcaggcaccttaaattctgccgatggagtgtaggtctgttcatattcatccggaaaaggacaaagataatcatagatcgtggtcttatgctctgccagctgtacagcatccccttccagaaattccggctgatcaccattggtggcatccagataataatactctccctccagcttaataatattccaggcatgtccctgatcactgttctttgtatcaccatccacataaatacagtaaacacccagatgatccagaagatactgggccgctcctgcatatcctgcacatactgcctgctttttccagaaaactccggcaatactctgatcatcctcagattcctggtaactggcagtatcgatcagatacgtataggccatctgtgccttaacataatcatctgccccctgtgggatcaatgcgtccaattgctgacaggcctgactcattgcctgaaggatctgttgggtttcagtctctgtatagctgtagctgggggaaaacatacaataatccccttctccataagtagtttttatcacctggttcctgttatgcatccagaaaaactccggatgatcttttaaaacagcatgataaaccctgtctaccgattcattgtcaccaatcgtaagataaaactctttttcttttttctttatgccggcttccatctgcctgtaggcccgctgctcctcttcatcaagcagagaaaaataatattcaacctttccaggctctcccccggaaatctcctgttttcgcagctgctgcacctcctgtggctccataccaagaagaccctgcagcagatcctggatcttccctgtctgcctcatctttttcacagcagacaacaccagaagtaccagaaacagaaggatcagaaaagttttaagaaattttcgctttcttttctttttcttcatgcagcacctttctgtttgtttttccagattatttttaactcactaaaaaaactcttattcacccagttcctggatccgatggaggatgtcttttgtattttccctgaaaagcagttctttattatatctgaaatagcgctcacaggaatactctcccagaaagtgaactccattctcgcttctgttcaattcggaaataaagaccaccagctcctggcctcctggaaaaacagcttccataaaatcaaatgcatgttccagctttaaagatgtctgtttaaaagaattatgatactcatcctgctttttctggaataaagctttcagcctttcaaaaacctgtactccatctccattgtcttctgaccttataagtcctaaccacttttcaagagtttcccctgctttccgataacggtaatcctcttccctggtgaaaaagccagcctttttcttcatcgcataatccatttcaaagctttttcccatatcctccagatagatcatcggttgatctgcagaaggacctgtaagtgcgtttttagcaccttttaataattcaaataaaatttccagacctttttcctgctccacagtttcatcaaaggccaggtttaactttgaaagcagaagtcctgtcacacttagcttttcatcaaaggaagcgtgtgcagctttcttaacaagaatatcatcaatctgtccgtccagtacccggtcgatctggtaatctgtccgatatttataatacagttccagataatttgcaaaatccctggcgattcttggatgctgaatatactgaatcaccacttccctgtcaaaggatttgtccagtctttcatatacctgaagcattcttgacagatcttcccatcctcttggagtggcaaatactctgccatctactgtgctttccatggaataaaaattctcagggtgcatattcaggtaagaaagtacagccccgtgcacaccggcctgatatgcatattccttccatgccttcagatcaggctccaccaggattttcttcaccctgtccatagtaaccacatcaaattccctaacagacttattatattccggaggattaccagctgcaacgatcagccatcctttggggatctgatggcttccaaaggttttgcactgaaggaactgaagcattgccggtgccaaagtttctgatacacagttgatctcatctataaaaagaatcccttccctgacgcctgtttcctggatcttttcgtaaacagcggccacgatctcactcatggtatattctgttactgcttttttctgcccgtcaaattccttctgggatatgaagggaagtccaatggcactttgccttgtatggtgggtaatggtataagacaccagtccaaccttgcattcccttgcgatctgttccatgatctgggttttaccgatgcccggtgctccaataagaaatacaggtctttgtgcatttaccggtatttcgtattcaccatattcgtctttcagaagatatgcctgaatggtatttttgatttcttcctttgcacgtttaatattcattgcttctatctccttttcccctgggactgctccagatcctcagggtcaaggatcagctttatggcccatggtggaacgtccacatcctgataatcatctttcataaacacaaaggctgtttcatagggtggcatcttccctggaaaaataccatatccgtcagtaaaatagatcagcccccgcagcctggtaaatttcttttctttttgaagcttttccacataagcaaaaggcggacggaagtctgtacctccctgtccttttactgtaaaatgatccatataatctttcagcttctgtccatctgtgatcacagtatctgactggatccggtcatcgcactggatcatatgtacatgaatacgcctgaaaaagctttctgtttcacttaaaacactgtatgtttcctcaagaaatctcttcaccagatctccctggcaggacatggaggtatcgatcacgatcacgaaatcttctaccttctgttcttcttttgtttccaagggctcgataagcggcatattcccatacaggttcatcccgtaattataaaagatatagtcaaaggtgtccatatctaccttcatttcttctttcaaaacagcaaatttccgcagaaattcccggtaatcatatttttgtctgttctcaacattcagctgatccataagacttttgctgccttttgaggcttcttttgaaaaagtctccatttctgtctgcatcttattacgcagatcttcccattttttcttctgaatctgggactggcttttattcttgcctgaatcgtaccatttcctgtggtcatccagagtaaattcccttttcagttcttctattttggcctttgcaagatgaagactgcacagcctgcgatacactttctgggctgtcatcacctttcctttctccagaagaagggcttctgcctggcggcgcaccattgttaccggcctgtgcacacatttcacatacaaaccatctataatttcttccactactacatcacaggccagattccaatattcctggtctactttgtcatctggataaatgtggcagaaaatacaatgaaacagagtatgaagatacaggcggttcacctgttccctgctttttttaaacattgccatcagtttctctggctgataataaaaaagatctccgtcagatccggctggtgccatctccatatcccctgccggatacaactgtgccagtgcattatccagaaaccgcatattcagatacagctggtttctggtatttttcaaaatatcttcacagatctgttgggcacgaagcgccctctcctgtgtatcatgaacagcgttgatcatttgccggtcctcctaaagcataaaggaaggtcttcctgctggaaagtgtatccttccatattccatcagcatactgactgtaccttcatctccagtcttgccagccattcccagaatgtgatcatatacagccttttctgatctgtccaaaggatacgtttccataagaaaagccaactcttcctgcctctgcccgcaaatcagcagccccgccagctgctcataatgtgactgaatatatagctcatactgttctcttgcattttgccccagttcccagggcgatttcagccttccaaaagccaattccagcagaaatttctcattttcctgggcacaggccatttcaaaacgcttatcatactcttgataattaaaccgcttccctgcaaaacaattacgataatacaacccgcttccatggatctgcgtcataaggatcctggcaggtgtattctcaactccttcttcgtaatattcaggaaaccagagaacagcttccacactgccggataaaaccacttccagttcctctccaatctccgaaagtatctccttaatgccggagtcttggccctccatatgcacatacagctttcgaatattgtgacaccctgtaaaagcaccgcttcctatatccgtaaagcggcttccaaaccacatggtatgcaggcttctgcagttataaaatccatatcttccaatcttttttacagtatccggaaggtacaaagtctccagactttttcctgaaaacaggtattcttttaattctgttacaggcaatccatccagcatacctggaatctccactacggatggatctcccttcagtgctgtaatcaccacatatccattctttttttcatattcaaaactactgttttcttccattgtatgattcctttccccagagaaaaaaggttgcctttttccctgatcgggcttaaactgaaaagcaaacacaaatgttcattggaggtatatcaaatgagtatcaaaatccctattgagacctcagcccggcacatccatctatccgaaagggatttccatcaactttttggaaatgatgcccagcttcataatataaaaagtctcagccagcctggacaatacctgtgccaggaacgagtgaccgttaccggtccaaaaggctcttttgaaagcatggctgtccttgggccattccgatcagaaacccaggtagagctttctcttacagatacacggaaaattggtattcccggagagatcagacagtctggagatacaacagatactcctggctgtacattatcaggtccctttgggcagatcaccatcccctccggtgtgatcgttgccaaacgtcacatccatatgaccccttcagacgcagtagcactgaaagtccaggataatgatgaagtatttgtgcttactaaaagctacggaagggcactgatctatgcggatgtggttgtacgtgtaagctgggattaccgtctggccatgcatgtagatacagatgaagcaaatgccttttccagtgataaggacccttacggtgtaatcgtccggttctttgaccgtaactacaatacagataaatggattgaagatgttctatccgggatcaatcgatagccacatttctacagaaggctacgtcagttaggaaatcatctgagattcgatataatatatcagggcagcgttcatatggacgctgccctgttcttatttggtctcagtagaagttcctgtatccaacacattttccaaagagttatctacatacacctcactgacaaatgcaggtatacctgcttcctctgcctgttcctgatcaccggaaggccctgctgccgcctcctcttccggaggataatgctcagcaattacatcaaatacactttgtccgcctgcttctgtctcctccagaactgtctgggactgaagaagatctgaaagtgcattatttacagttacatcactgactactacctgtgcattaccttctgctgtaaatggctgattggcaggatcatatacattctggcttgcctttataatatcctgaagcgtattcgttactttaacatctgtaacaaaatactgagtattgctattctgtgcaccctgtgctgccatctgagctgcctgctggatagtaggatagaaagacggctgacggatataccggaaactggcactgtatgcttcccctacagtaacaccattctggctggcagagcagtgaacagcgatccagtcacctgcttctgttttgccgcaaagaataccaacatgattattcacgcctgcctctggtcccttctggaataccagatcgcctggctgtgcatctgcttcactgactacattggcctttccccactgatcagaagtgccatttcctacacttgcttccatagcctggttctgatagccattcactactgcccaggtaacaaaaccactacagtcaaggccatatgcacgcctggtaccggtacttttgctgccctctgcagtaacagtctcaacggtaccccagcttggatcctctccaagcactaaagacttaccaccccagaaataaccaactttaccgatcagggaataggcagaagtgatcacatttactctctcttcagatacactatcgccaacgctctctcttacaaatccttttgcagcagtaactactgcacacaaaaggctgcagtctgtctctgtatactttttcagcactgctcgctgatctttgggaatcttattttctttaatatagtggttgatatggtaattaccataggaaaccttggtaatatcactggaatcccggatcacaggattcattcttgcaaagatatctgccagggctgccttacacgatccatcaagtatataggaagttactccctgctgactctgctcatatatgtacactgccagaatatcctgccagttccttaccagcaaagtatctgctgaggaagtcacttcacctgtagtatctgaaacatcggcaagcttgttctttgccttgtattctttctcgatctcatccatcacagaagcaaaatcatctgaaaagctaagctgataattgtcctgcagactgttcaggtaaaaatccttgcctgcatggagattagaaaccatatctgtataatatagtggatctccctcgattgcctctgcctcttttttttctttttcttctttttcctttgtatcttccagcttcttcagctttttctccatgttaaggaaaagctgataattggatacaagagacttttcgctgtctgaaagtgcatcatatgccttacggatcttatgaatctcatccttctgatccagtgtaatatcctcaaaaagagacagggcatcaatcctgtcaataatatccctcactgcctctgaaactggtgcttccgacggaaccggtgttgatgtaatctccggtgtatctgtagttcccggtgtaggtgtagcctccggtgcctgagtcggcgtggccgatggtgaagacggtgtctgggtaggcgtagctgtaggactgtgagtaggcttcggcgcctgagttggctctgccggtgcctgagttggctctactggagcctgtgttggctctactggagcctgcgtcggctctgtcggcgcctgggtaggctctactgttggcgcctgagttggctccggtaccgcagtaggcacaacttccccataactatcatcaatctgttctcctgactcaaatgctccgccatcactggctgcaaaaactgcagctggtccggacagtaccattgctgaaataatcgtcatgcataaacattttgtcagatatttattcttcatatttttcaagatgctcccttccttgccatgaacatccctttactcccctatataaaggtctgatacgtgataaaacggttcgcttaaatattaactttgtctattgtatcataatctttttttcaaatcaaccttcaagaaaatatccgttcccattttatccaattttcactttctcttcacattatgttaaggaacgcagaccttttatgcaaacgcagccatattctcctgtcttctggtacataactgtacaattccctggatcacctgatagcagaccatcaggatatactggatatcctctgtgatatttctctttttacgaagataactggtatggcttacctgtatgaattctgtaagctcttccaagtttttaaaatagacatccctgaaaacataggctccggcagcgccacttttaatgcagatcttcagtctttgcttcaggatcttttcatactggctgtgctcatacaggcttccagtatacgtcctgttgtgaggaaatgtaaaatagtctgccacataatgcagcacttccccaaaattcctccagtagacacgttccttcccttccaggggaccatgctccaccagctgaagcatcttttcctgaatctctccaaaggtactgaaatactcatgcttcttcacaacaaaagatgggcgtatatccggaaggatactccccagacaaaatgcctttctgtgagactgcaggctttcatctacagtcagctgatctgccagatatctggcaagtaaaatatgcgatttcttacgcaatcgatccctctgctttcctgccgctggcctttgtaatggttacacggcatatatggcgaaaacattgtaatgctttcttatctgtattgtattttggcttataactgtatacacgctgaacagctatgtattctgatactatcttaggttagcggcctatacatcatactataacagatatgcagaaaaacttcaaataaacttccaataaactttacataatattttatcaaaaaaagcttatgcttccgttcaaaatgcacaagtattttatcttttgtcaaagtcctctcaatccctggaaatacttgaaaaatcaggggttccgtaaaggtcatacggggtcatctggtatacgtaataattcagccagtttgtgtacaggttattggcgtgagcccgccacaaaagaagaggcctgttttcaggatcattgtccttataatagttcctgggaatatcaataggaagacccttgttaatgtcacgcttatattccccatccaatgtaacacggtcatattccggatggcccatgataaagatcttacgtccgccatctgccatggccaggaataaacctgcttcctcagactctgcaagcacagtaagttccttacatgcatggatatcttcaatcggaacctccgtatgtctggaatgaggggcaagaaacacatcgtcaaatccacgtacaagaggaatcttacgattaagcaccttatgccagaaaaggccaaacattttcttgggaagcattcttttctttaggccataatgatggtaaaggcctgcctgtgcggcccagcacaaatataaggtagatgttacatgggtcttggtccaatccatgatctttacaagttcgctccaataatccacctcttcaaattccatctgttctacaggggcacctgtaatgatcatcccgtcatatttctgatcttccagttcaggaaaagtctgataaaatttgttcagatggcttttagatgtatttttagaatcatggctttctacagtcataaatgtaacatcgacctgaatgggcgtgttggataaagagcggagcagctgaagctccgtttcttcttttaatggcatcaaattcaggatcaggatctgaactggacggatatcctgatgcagtgccctgttctcatccattacaaatatgttttctttttcaagaatctcctttaccggcagatcgctttgtattttaattggcatttatgtccctccttgttgttaataatatttcaagtcgagcagttactcaccacctgaaagaggtaggagtcttctcgactgagatgaatgatcatgcctcttccggatggaccagcttcagaaattcttcctcagaaatgattggaatcccaagctccttggcctttttatttttagaggaatttgacattgtatcattattgatcaaatacgtggtttttcctgtaacagagcctgtgactttgccgccaagagactctatcaatgctttcatctcgttacggttggcaaaatgggtcacagaaccagtgatcacaaaagtcactcctgcaaaaatctgtgtctgggaagccgcttccgcatggagtataagaaaccccatcagccggtccagcttctggttgttctctttatcatgaaaataagaataaatattccctgctaatacaggaccaatgccttcaatagcgctgatctcctccatggatgcctgacgaacagaagaaagatcatctttaaagtgacggcagatcactttggcattagcaagtccgatgccagggatccccaaactgtatatcaccctggaaagagtggtatttctggccttatccaggcttaagatcagattttcataggacttttcgccaaagccttccatctcgataatcgcatctttgtgtctgtccagctggaaaatatccgcaaattcatgaataaagcccatggcaataaacttttccaaggttgactgggaaagcccgtcaatattcatagcatctctgctggcaaacagtgtaaaacctcggatcttcttggctgcacagtcaggattcatacagtacagggcttctacatcattttctttgcagacacgcgcttccccgccacaagcaggacaagtatccgggatcacaagattaccactgcaggtaagattctctgcaatctgcggaatgatcatattagccttgtaaacacggatggtatctccaataccaagcttcaactgtttcacaatactgacgttatgaacacttgcacggcttacagtagtgccttccagttcaactggttcaaaaacagccaccggattgatcaacccggtacgtgacggactccactgaattttcagcagatgagtttcccgtatctcatctgcccatttaaatgcaaaagcatttcttgggaacttagccgtcctgcccagtgactccccataggcaatatcgtcatacaaggccaccagaccatcggatggaaaatcattctttgtaatagctgtagaaaaatagtccatcgcctgatctaaagttgaagcagttaccacccgatattccaccacatcaaagccctgcccctttagccactgaaactgattctcatgagaattgtcaaaatccacttctggggcacttacaagggaaaacgcataaaatcgtacattcctgctggctgtaacctgattattcaactggcgcacggaaccgctgcaaagattacgaggattcttataacgtgcatctacgtcctctatggattcattgatcctctgaaaatcggagtaagtgataatagcttctcctcgcagtacaagacgtccctgatacggaatctgtaaaggaatattcttaaaaacccgggcattgttggtgattacctcaccaactgtaccatttcctctggtgacagcctttaacagccggccattttcataggtaagcacaatggtaaggccgtccagtttccaggaaagcagggtctttcgcggaccaataaactcacgaagcacctcccggtccttggtcttatccagggaaagcattggcctttcatgggtttccttaggaagtgcatcaacagactcatatcctacggaaatggttggactgcctgccagaactgtgcctgtttccttttccagttctgccagctgatcgtacagggcatcgtactccagattgctcatgatctccctgtcttcctgatagtaagccttggatgcctgattcagtttctgggctaattctttcattttgcttaaagctgcttccatgatttcctcctggatctgaattatttccggaagatgaatcccggatcataagagttagcttattatattcttctttggtgatctctctgtagctgccaggtgcaagaccctgaattgtaagattcatgatcctgatcctttttaaggtacggacctgatatcccagatattcgcacatcctgcggatctggcggttcagcccctgtgtcagaataatccgaaacgagcatttacctgcagcaaatacctggcatggccgggtcactgtatccaaaaccggaactcctgtacgcatatgcatcaaaaagtcttctgttatagggtgatccacagttaccagatactccttctcatgaaaatttctggcacgcataatgtgattgacaagacttccctggttagtaagcagaagaagtccttctgaatccttatccaaacggcccacaggataaatgcgaaccggatacttcagatattccgtaaccgttgtctcttcatattgcttcttagtactgcacaccactcctctgggcttgtaaaaaagcagcagcacctttttctcttcttttttaatcggtttatcatctacaaaaaccctttcctcaggagaaaccttatctcccggacaaagggtgcggccgccggctgtaatgcggccggccgaaagaagacggtctgcctccctgcgggagcagtaaccggattcacttaaatatttattaattctgattttttcgctcattgctatattatatagtcttttttctgtgatatcaagaaaaagcttcacgatcatcccctatttgtgatatgcttcacgatcatctttttgtgataagcttcgcggtcatcttcctatttgtgattgcacgaaaatgaagtgtgtggtaaaatctattttatgttggagatttttttctccaatcttttattgatttactgacacaaaggaggaatcatatgtcaggccgtaaacaacggaccaaccggcctcttcttataactgctgtgatcctttgtctggtgtgcggtatactgcttacccgtacctctccaggctctggatctatggatgataaaaagcagccggatatgttcgtagcagaaaatacagatactctaaccccaccggctcaggatacggtttccggtgacacaccagaggttacacagcccccggaagtgctgccaaccgataccccagttcctgaaccaactacagttccggctgatgatgccagcgcatcccaggtttctccggaagcagcttcaggagtgtggacatccagcgggagcaactggtactttatggtgaatggtgctgccctgaccggatggcttacagacacagataacaaacggtattatttcgattcgaatggcgtaatgcagaccggatggctagatgataatggcaatcgctattacctgaatggagacggggtgatgcagactggcgatgtgatcgttgacggacagctttgccacttttcttcagatggtgtgatgaatgggaatccgtctcctgtttcagatcaaacagaatcgtctcctttactgtactacataaaccctaatcctgagaaagcagatgcaagctcagatgccgatcctgcagcaacaggtgcaaactccgaccaggtttcaacgccagatgctgctacagatgcagctgcacctgtagcacagaacagcacagatgtacagacatttcctcaggatacaccagttcctacacccacaccagttcctgacaaaaagatagctcttacctttgacgatggtcccagtgattataccgccaggcttcttgactgtctggaagcaaacaatgctaaagccactttcttcctggttggaaatatgatagattactattctgaagatgttacacgtatggaagccctgggatgcgaactgggcaaccattcttatgatcacacagatctgtctactctttctgctgaagaagtatccaatgagattggacagacagatcagctgctgaacaatctggtggggcatggagccactgttgtacgtcccccttacggaaatgttaatgatacagtaacttctgtgattgcaactcctatgatcttgtggaccgttgatccagaagactgggatgaaggagaagatgttgaccgtctggtaaacgcagttcttgataatattacagatggctctatcgtactgatgcatgatattttcagttcctctgtggatgcagcagagattctgataccaagattgatccaggacggttatgaactggttacagtccatcaattagccgaaagcaaagggatcactcttcagggcggagtgctttacaattcgctaacataattctagtacagtgaatattaagtaaccaccatattgactggccttaattctcactgtactagttcaaaaaaacagctgcagatctgatctgcagctgtttttttaccctttattcagttttttcttccagaagtccactgtaaatatatgcagtctgaccttcatactccacctggatccaatctccttcagaaccaagcttctgaacttcctcaccagcagaaagaccaccaataatatctgcatcactgctggcagcagcacgcacattacagtcttctgtcactaccagtgtagttccatcagatacaatagatgaatcactggtatcctggccaaggccatccagaaatgctgtcaatgcagaatcacctgcctgtgcatcctcaagctgcttgcggatatcagagtaaagtgtctttacatcctcatctgcttccagcccatcagtataggcagaaatctctgtatcctctactgctgatgcatcgatcttccactggccttcgctgtccttatatacataaaactgactcaatgccggtactttcgtatcaatatccttgcaaatatagtaaaaacttgcatagaccacatatgagtcatccttcagcccctttttcacataaacatcccgcacttcatacccttcaatatagtcctttgcgttagtgatctttgattcatcggacggtgcaagattgtctacatacgttttaagcgttgcaatatctttgtcccccagagccttgtaatagcccgtaattaatgcagtaatctctgcattgcctttttccatgggattggcgtctttcttcccgtcagtctccccatcttttgccggagaagaaggaacatttccctggttatcctgcgatgctgtctgctgatctccctgcccctgatcggtacccttcttacctttaacacaggcatggattccaaaagccaaagcaccaacgattaacaaaatcgctccgcctaacataaaatagcgaaggttatctgataaccattctctaaaattgtccaagttcttgtcctccttataaaacaacgcaccggaacgctgggtcgttccaggcagcacacctgaagggaatcgaacccccgcacatggtaccggaaaccactgctctatccactgagctacaggtgcttaaacttactgttgaattatcaaagtacactacttcaactttaaaaaagtatatcacaatctgcatcagatgtaaagttttttcttttggttgaaaattcatgtctaatgcggacaattcaatgatatcaggataccaaaaccatgcatccacctaagtggttgtacagtcctggcatccttacatagaatcattattcctttttcagatcgcaaaaacgggttttcaccgctgtcagtactcccatcatcagcaccacaccgatcaccaggcatagcgggctctggataaagccagcaaatatataagtgataaaggataccactgctgccaccacagcataaggaagctgtgtggacacatggcttacatggtcacactgtgcacctgccgatgccataatagtggtatcagaaataggcgaacaatgatctccacatacagctccggccatacatgcggaaatagaaatgatcatcagatctccgggtgtgttttcaaacacatgtacaacaataggaatcaggatgccaaaggttccccaggaagttcctgttgcaaaagccaggaagcaggcaaccaggaaaataatggcaggcagcatgtttacaagaccggaagcagaagattttaccatttcagctacgaattctgatgctccaagactgtctgtcatgctctttaatgtccatgcaaaggtaaggatcaggattgcaggaaccatggatttaaagccatctggaatacatgccatacaatctctgaaggataataccttccgcaccaggtacaaaagcacagtgatcaccagaccaaaaaagcttccaagtacaagtcccacagatgcatcactttgggaaaaagcagttacaaaatcggtgccgtcaaaaaagccgccggtatagatcattccgatcacacagcagattacaagggaaatgatggggatcagaagatccattactttcccccggggattcacctttccatcttcttcagcacctgcatagggtcttgcagcggtagtaaacaagtcgccttttaatgcattagattcatgaacacccatagcaccaaattctgctctcattaaaaccatggataccatcattacaatagtaaggagtgcataataattatatggaatggcacgtacaaatacagacattccgtcttctcccgggacaaacccactaacagctgctgcccatgaagaaataggggcaatgatacaaaccggagctgctgtagcatcgatcagatatgccagttttgcccttgaaacattgtgctgatctgtgatgggacgcataacgcttcctactgtaagacagttaaaataatcatcaataaagatcagtacacctaaaagaatcgttgcaagctctgctccaactctggtacggatatgctttcctgcccagcgtccaaaagccgcagaacctcctgcccggttcatcaaacataccatggcacccagaattacaaggaataccagaatacccacattgctgcttgaagacagaacactgatcattccttcagaaaaaatatgattgactgtgccctcaaaattacctcctgaataaaggattgcacctaccaggatcccaaggaacaaagagctgtatacctctttcgtgatcaatgccaggacaattgccacaactggaggtatcagagaccagaatgtggcatatacagccggttttgcagcttcttctgcagccagcacagttaccggacaaaccatcacaaaccatgtgatcattgccagaactacggatactttgttacgattgtgcttcattatagatttcctccctcattttgaacccgggcaattctgacagatcattaacaggctatggtcttttgcgcctttaattacgcaaaaatagccatgaacacttccccgctatgggacacattcatggcatttattctttcacaggatccacacctttgatagcgctccacaacaagtgacagtctgccgcatattctgcgtcagcccagaaccttcctgtatggcataagaaagctcttcggcggtcttccctttctctttggccaatctgccatgactggatatcttctcgtatccgcagccaaaaatactgatgaaccccgcacctctatcattatttcccgtattcagtttcctttaatcatggtagcagttttccctaataattgcaaccttttttttatagatgctcttgtttgaaaactccgtactgattcacagtgccgatcagacgatatcctttgccttccagatattcctgtttctcctgagttggaagtgcaaagacaaggtaattacagcctagctttcttaccgccttcaccactcttttcagatccggatcaggagaagaaagctcctgataaagccgcatggatgaatagtgctgggaaccttttcctgctctgctgtaaggcatgtaaaaggaaggctggtacacccggatataagcagccaggtaatcatctgcagccacacatacggtctctccatcttcctgctggtcactgatcagattacacacctgagccacctcatccggcaccttctggtaattgtgaacctgtacataattgtcctcactccatacagattttccggatatgccaatcactcccatcaagaggatcagcacaagcccctgcagcatccatccgcccttttttgccttaagaccagcctgctctgccagggcagtacctgtatatgcaagaagtacagtaacaggaagaagccagagtacacgccagtatacatcactgccaatacatttctgtataattcctgcactcaggggaaagaaaaacagcacaagcaggatcgctgtatatccaagaagaagccttgcttctttctttttcctgaaaaatatcaaaagcagaattaccgccaaaaagatcagatactgataatacccgcttccccagaataaattccaggtatccaggattcctttgatcatttctttcataagccacctcctactgtatgaaaaagtaaatacatccaagtgccaccggtgggaggcagcagatcactccatacaaaagccttctcagatcccgctgtttgtacaggctgatcaaaagaaagatcccggtaaggacaggcgccagtatgatccccatagaagataaaagacaacaggccagttctgttaaaaacagactgatccatggatattctccttttttatccaccaaaagttccatacataagaagaaaagaaaagggagaaaaacaccagtaagtaaagcttttccctgccagatacgaaccatctggaaattaccgctactatatacagaatagccggaaaaccagattacaacagcagaaagaagcataaagatccatctgcttttctcattatcctgaaaccatttttttccatagccccacagtacagcatagcctgtcaataaaaagactggcggaaacactgtatgggccataattgccggatggagttccccgcacagctggctgacaacagccagaaatacaggaaacggagacaaaatgtaccttcttggaatctttgtataagcatagcctgtatatggactgatagaaaaaatggtatctgtatggatatctgttactgctgttcccacataaaaggaatcatctgcatccatatgtgcatagcgcactaccacatacatctgcagcaggatcaaagccaatgccaggatcataggaatagaaaaacggattttcccttttttcagtcttcccatatatgcatctactgcatcttttttcagcagacaccacatcccccaccataccattatgatccccaggcctccatagcacacggtcagaatgtgaagcggcagcccaagccagatcatcagcagggtaaggatctccataactgcaaataaaaaagcataacctgtgagaaaacagtttcttacagaataaatctcctttttccgaaaaaacggtgctcctgctgcagcaggcaccaccagaagccagaaagcggccagtatcattttgatcataagccccatcttatacctcctgcatttctttggcgattcccattgcaatcttttcaggtgtgatcggcagttcccggatccggacccccactgcattgtaaacggcatctgcaatggccgggcaaggggtatcgattaccagttccccaatggatttggccccaaatggaccgctttgttcatagctgctttcaaattccacacggatctgtcccacatccattctggatgggatcttgtactgcataaaggaattattccggatcctgccggtatccgtatactgtacctcctctgtaagagccataccgattccctgcacgatcccgccttccgtctgtactctggcaagattgggatttaccggtgtcccgcagtctaccacagctacataatccgtcacttccactgatccggtctcaggatctatctccacctcagccaaacctgccatataaggcggcggggagatcatggaggaaaatgtggcagttgcctgcagctcctgaacatttccacaggtggcctgtacagcgatctttgcaagtgatacctgccttccctggccggttacacaaacaccatcaaacctggtatcttccacaggaagttccaacattccagcgccaaatgcctgaatcttttcccgcagcatactgcaggctttaagcactgcatttccggtggcataggtagtagcagatgcgtaggatccggaatcataaggtgaaatgtctgtatctactgctccaaccaccacattatccagctctgtatccatacagtcagctgtcatctgggacaaaatggtatcacagccagtacccatatctgcacagcccagggacaaggtataagaaccatcctcattcagctttacagtggcgccgcccacatccacacatgcaatggaagagccctggagagccagtgccatacctgctcctctgatctttccgtttggcattaccctggagggatatctttcatcccagtggaacatttcttttgctcttttcaggcacctgtcaagggaacagctggtagcggtagggctgtttccatcatagccatgtaaagggccgccttctacaggcatatttttctctctaagaaccactggatccatccccatctgatgggccaattcattgatcgcagattctactgcaaaaatcccctgggtagctccgtagcctctgtaagccccggaagcctgcacattcgtataaaccacatcataagaaaaatgataggcctgaagatgacgataaagagccagtgccttatgtccggtcaaacctactgtcgtaggcccgtgatccccgtaggctcctgtattggaaagcacctttatatccagtgcctttacaatcccctcctggtctgcccctgcctttacccgtacctccatttcatgtctgggagaggcacaaatcagggactcatatctggaataaacgattttggaagggcgtcctgtgatccaggtgaccaatgcaggatatacctcgcatactgccgtctgctttgcaccaaaaccgcctccgatccttggcttgatcacccttacctttgaggatgggatccccagtgcccttccaacgatccttcgtacatgaaaggggatctgtgtggaagtcaatacattcagtcttccatagcaatccatatagcaacaggtacggaaggtttccatcatacactgctgattagctttcgtatggtacgtctcgtctaccacataggcgcaatcggcaaaaacagcatccacatccccacttatctcatctccggatgcagccagattccttttattatctgcaccaaccggaactttcgcttcccagtcctcttccggatgtacaagaaccgggttatcctttgcctgatgcatgtccagtacagccttttcaacctgatagcttaccttgatctttgccagagcctgatccacggcagcttctgtttctccggctacaatcgccaccggatccccagcaaaccttaaatgtacatccaggatcttgcggtcataagggctaagctccggataggtctgccctgcaacagtaaaacgctgatccggcacatcctgatatgtaagcacacagacaatgccctctacctttttggctgcttctgtacggatctcacgaacccaggcatttgggtggggacttcttaaaagctttaccacaagacagtctttcggtgcaagatcatcagtatatacaggttttcctgtcacaagggccatggcatcctttttaggaaccggatgatttacatatttcattccctgtattctcctttcctgtcctgtttatatctaaggtatttcagaatacttctggtctgtcccacaaagccggagcagcggcacagattgcccgccaaatattcccggatctgttcttcatccggatcctgcagctcttttaacattgcaaaaacattcataataaaccctggattacaaaagccgcactgctctgccccctctcctgcaagaaaggcgccaaactcctgagcttctttttccatgccttccagggtaacaacctttttcccctgtacgcgaagagcaagcatagaacaggaaagtaccggacgtccctccagaagcacggtacaaagaccacagttcgctgtctcacatccccgtttcacactgaaacatcccatctgacgcagcagatccagcaaaagagtatccggctgcacttcagcttccctgtgaacattgttaagccaaaaatccattttcatttaccgttcctcctatatctgtccatgctcttcttgtaagtacctgtaccagatggattctgtactccttgctgcctctcatattactttcaacaggcacatgctgagcagtccagacactatatctgtgaatagcgtcctttttcttttccggatccatggcgcaaagtccctttaaaatgccctccggatcttgcagaaccattgcctttccaggccttgccccgatcactgtccgcacattctcccctgccttggaggcgcagcaggtaagcaccggaaaatctgtctttgtatttcgctggctcagataacagatcttggttttctttttcctgatgatcaggcgcaaaaggatatctctgtccttttccatagagacaaattccgaaaggggaatcctgcctcctttatacaattccacccaggtatccatagccaggaacagggtaagcacatctgaaaagccatatcttccccagatgctccccccaacagtagcacagttgcggaactgcacccctacgatatgacgaagacattcctttatggctccctctgtatagtgaagaaggcctggatgcacctccagatcatgaagaggcgtcatgcagccaatcacaaattcctccgaatcttcctgtatcctgcacagatccagccctgaaagatctatggcagtggacactctgcggtttcccattttcagccataccattcctcccaggatcacggctgtttttttctggttcaattcataggcctgctggaggctctctgcttttacatagcttttaatcttcagcatgtcaaaaaaatacccttcccttagtcttcaagctccaggagcacatactggaagcctgataattcaatttccatacctcttgtatctttgcggaatgtcccctgctcaccgttatcccttggacatccccaattcacactttctttattgttcagcaccactttttttgcaggtgcaggcagctgtacctttcttggatccttctgaaagttagccagaaccagaagtgttttctctccttttcggaaataagcgatcagattcttttcttcttccagataaggaatcagctggccgtaaacaatggtttctttatattcttcacttttacgaagcctggtaagctttttgtaaaaggcaagcactgaatcctcgtcatttacctgtgcctgtacattgatctgtttgtaattaggattaaccttaagccatggctttcctgtggtaaaaccggcatttgcgccatcatcccactgtaccggagtacgggcattgtccctggaaaatgcactggcaaccgcaagtgcttcttcatcactaagtcctgcctccctggcaaccttatattcatccagggtactgatatcatcgatctcatcaatagaatggaaatccaggttttccatgccgatctcctgcccctgataaatgaacggaagaccacggagcatgaaataaacgcctgccagaagctttttagcgtctacgcatcgatcctggggctgaatataataacatactcctctgggctcatcatgattctcaataatattagacaccatgcccatgtcgccgatctttttctgtgtttcaaaaatacaatgcttatattcatctggtgtaaggtatctttgggaagcataccatccgtcaagacttttcccgaaaatatggctgttaaagtcaaacatggaagagaaatatccctcatccccgataaaatccttcaattcatcatcctttacattgaaaacttccccaaccgtaaaggcattataagggcggaacgctttcttggccatctcccctaagaattcaccgatcccatgggcatctgccagcatattccccatattggacagaccatcctcacggtcagcgggataatcctggaatggaagctttttcttaatgttgataatagcatcaatacggaaaccgcccaatcccttctccatccaccagcggatatttttgtaaacctcttccctgacctccgggttctcccagttcagatccggctgtttcttatggaatacatgaagatactgcttgtccgggtgacctggcaaaggctcccacaccgggcctccgaaatagcttctccagttgcagggcagcttctccccttcctttctgtcagtaatataaaagaaatttccatattttccatctggatcctggatcgccttctggaaccactcatgctcatctgagcaatggtttactaccagatccatcagaatatacatctggcgtttctttgcctcatggatcagatgctccatatctttcatagtgccaaatcttggatcaatgctgtaataatccgaaatatcatatccctggtctgcaagaggtgatttatagataggggaaagccataaaatatctacacccagatccctgagataatccagtttttctatgataccaggtatatccccgatgccatctccgttagaatcataaaagcttttgggataaatctgatacgctactttatcatgccaccactgtttcttcataacaaagtcctccttataaacacactgattataaacacactgaaaagaggatgttgtataagcctgtttcctgacagccgactcataccacagcctctttgctatttgtaactgttagcttctcttaagcaactgtctgccggaccgttatccagcttatctgatattaacctgaataccttaaagcgtcaataggttttttccctgctgctttctttgccggataaatcccgaatacgatcccgatgaaaatcattcgttcaatagtcataatttttccgtcatatcgccatatattttcaattattttattattatttatggatttttcacaattattgtgctataatactttcaaatctataaaatagtctgtaatttccggaaggaggaatgattcatgagcaagcagatcattacaatcaatcgtatgtttggcagcaatgggcgagtgatcggccaggcgattgctgatgcgcttggattaaaattctatgataaggaactgattgagattgccagccgggaaaagggagttcctttcgatgagtttgccaaggcagacgagaaaaaggcaagccagtggcgatattccgtagaatacgatatccagatcgacagagaatatcatttcactcctatcaatgatgtactttttgatgcccagaaggagatcatactgaatctggcagacaaagaagactgcgtgatcgttggccgctgtgccaattatatcctgaaggacaaagcactcagcctcttcatctatgctccttttgaagaccgtgtgaagacggtaatggagcgtacaggcagagaagaaaaaagtgcccggaaaatgatcaagaagatcgacaaggatcgcagggcttattatgagtactttacagatgaatattggatggatctgcttcattacgatctatgcatcaacagcagccgtttcactaccccgcagatcatctccatggtaaaagaaagcctttcaaacagataagcttacagtataggccataagtggcaccctagaacaggggcagctgcattttcacctgcggctgcccctgtctttctatttctgatgttccatattcaagaatgctttcaggaattcatagatctgtccctctgtaggcggacagccatccagatggtaggtaaaccctctggtacagtggccgattcccagttctccactcttttccctgtatccctgaccaatacagatctttgtttttagtcggtcaaacaatccttcttccctaagcctgtcaagggcagggatcagatatccataacaggcactacaggattctacttcttcgactgcatctttcagttccacaacttttcttgatctgggaatttccttagctgcttccttatccagcattcggatctctgcctttgtaatgtcactgcatcccacgcctagctttccggccatttccacataaggcacctcccaaacctgataatgcagcatctggcacacatatgcatctatcagcaccggatcccttccggcaagaacccggttcataaccactggatgtcctccatcttcaaagtcaagatccccacatatattatccacaacaataaaatcctgatgaatgccaaggcttaaatgggcaatgggatcatgcagacccattgcatgaaatctgcgtttctcagaatttgggatcagtcctttcatatttttcaaggcacaggtgatttttgtctggcaatggccttttaacaccggcacattgatcaggaaatcaagatccagtaccttctgacacacatttaaagtcataccgccacactctacagcaacgcccttgtctttttgcatatcccagaaaggaacctgatacttttgggaaagtgcctcaaaaccacacacctgataagcctcctgtgtacggtcgcccacccatgagccttccagcataacgatcttatgaaaatcatatttctgaagatactcaatgattccggcaactacctccggatgggtagtaccaccccaggatgcttctacaggagatacaagattaggcttgatcccgatcagtttctccctgtccccaatctgaccggcaagatcactgtcctccagaagaagcttcgtcatttctttataatctgtaccgcatctgataaaaatctgatttttattcatatgcaatcctcctgaaatcttctgcttttgtatcataccagcccaagaataataatgatcaggatcagcacaggaagcacaaactgaagatatggcttcagtatccttggaagcttcagcccctctcctgcattacattccttgtaatagttatcaaatccccatccgaatctggtcacgcagaacaaaagatagatcagtgatccaatggggagaagcagattgcttacaaggaagtcttcgctgtccagtacatccctgccgccgatcagatgcagatcactccagatattataccccaatacacagggaatgctggcgatcagcacgatcactccattgatcagtacggctttctttctgtcaactttgtacatatccaggctaaaggaaataagattctcaaaaaccgccataaccgttgaaaagcttgcaaatgtcataaacaggaagaataaagatccccagatcctttctcctgccatatttacaaaaatattgggaagagtaacaaagatcagagatggtccggcatccggctgtacgccgaaagaaaaacaagccggaaaaatgatcagtccggacataagtgccacaaaagtatccagtgctccgatccgaacagcttctccggtaagcgtatgcttcctgtccatatagcttccaaaaatctccatagctgcgataccaaggcttaaggtaaaaaaggcctggttcatagctgccgcaatcacattccagataccaaccttagaaacctgtgccacatctggtataagatagaacttaataccgtctcctgctccaggaagcaacatacaatgtactgccaggatcacgatcagaagcagaagtgcagacatcatatacttactgatcttctccacgcctttctgtaatccctgactgcataccagaaagcctagtacaaccgtcactgccatccacagtcccatctcttttggtgaagacagcaggctctgaaatacatttcccacactttctttatccataccggaagtaaatttacctgtagcaaatttgaaaaaataactaagcatccaccctgaaactgttgtgtaatacatcatcagcacatagcatccgatcatacaaaaccatccatgaatatgccatttactaccaggcttctccagtaccttataagccagcactgcacttttcctgcttgcgcgccctactgccagttccatggtaagcaccggcactcccatcatcagcaggaaaatcaggtagagaagcacaaaaatgcctcctccgttctgtcctgccacataaggaaagcgccatacattaccaatacctatggcacatcctgcacttacaagtaaaaaacccagtcgtgattgaaaactttctcgcttcataaaaactttttctcctatcgttcatgtccagtcaattttaacacaccagtcataacagggcaaccatagtttcatttagcggaaatttgtatgcaccaccatttcatttagcgaaagtttgtccaagacgcagaaaaagcaccgcccggcaggcgatgctcttcctgttttatggaagtatctgattatatcttacttgcaataccatatcttacttacgatatgcttttgtgtaagtatttgtggtatttacataggattttattcctgctccaagaagcttcagagccttaaccggaacatatcctgtcacaccatttgtaaatactacctgataatagccattgatcttcgcactgttaagaaccactttggccttgcactggatcacaccgatcctcttgcccttgccggtagcgtctgcataaacgccggttctctttgttgttctggcaacacggtatactgttatctgtggtgtactgctgaacttcttagttgcagtgccggttccaaggtatgttgtctttgttgcaacaccatacttaaatcctgcatccggtcttacgcaactcttcagtacatatccgctgccaacactacctgtaccataacgtactctgtagtaattgcctgtctcacctgtgatcagtactcttgtagctacaggagcaactgtgttagcacctgtaccaacgcctgtatagatccatgtagtggtggaaatctgaccgttggacttcacagctgtacgttttgtcagtgcaccgctggtaatttttacataagctgcacgaacatatccatatccgccgttaaacttgatcttataccactcatctacagtatccacgatagtaacagctgtacctctgccaagctgtccgatctgaataccctgaaggctggcagaatttcttacaaacagggcacttgcagttgttacaccatattttacagtgtatactttcttgccaggttttactcgcagatagcattttgcaacatgtccgtttgctgtaatagctgtgatcatggttgtaccggctttcagacaggtaacaacaccaaattcgtcaacagtagcaacctgaggtctggaactggaccagaagatggtacttccaactcccttagccggaattgcggtagccgtcatcttgaacatgtttccaaccttcttggtcagcttcttagcacagatggtaacgcctgttaccttctgtcttacatttaccttaaccttatctgtgataacaccatggtgagtatcatttgctgtaatagtgatccagcagcttcctgcacccttcatcacgatcttgttggtataggtatcatagtaagcaacatctgcattattggtagaccatgtcacaccagtctctgttgtatagtccggagtgaatgtataaccaatatcatgtttctctcctgcaaatccggagatcacttcctcactaagcttaacgccggtaggtgctgcaataacctttacaagcatctgtgctctcagcttattgtaggagtatgcagaaatccatgtagttccaagcttgtttgcatggatcttaccgtagctgtcaacagatacgatagaagaatcatcggatgtccatgtaatgcttgtatcagatggtgtagtagcaccgtcattgaagatcggtgacaggtaatcatcctcatcaagatagatggtcattgcatctttctcgaatttcagggaattaacatctgtcttgatgtacagcagtgctttcgctgtttctgtagtaccatctgcaaatgtcatggttgctgtaatatttgcaagaccggcttttgctgtcttggataccatggcaacgcctgtggaatcgatcacaacatctgaattgtcactgctccaggtaagctcacctgcgtatgcttcttccggtgtaagtgtagttgtgtactgcacattctcgcctggatatacttcgcttcttgtaggcgtgatatccagctggatgtcatcctcagcacctacaatgatcttgatcatgcctactgccggtgtgccattaccatctgtgccataggtgccattcatgcatttcgcataaatataagtggtacccttgccaacggtagtaaccttaccattctggtcaacagttgcaatatcttcattctcagaactccatgtgagagccttatcataagcttctgcaggtgtgatcactgctttcagctggatggtctcgccacgtttcttagcataaatatcatcatttgtatctgtatctacccgtctcacttctacagatttaacaggtgtcttcacaaatacctttgctcttgcagatgcagtctgattattgccatctgcatccgtccaggtaatggtagctgtgatataggttgtgccgcccttcttagctacgattctgccgtctgtacttacagttgcgatggtatcatcatcagatgtatactccacctttgtatattttgcattggcaggatttggtgtagccttgataaatgcgatctcatctacccaaagctcataattatcctgagataaggttacgccctcaacctttgcgtctacgatcacaaggatctttgcacgcagaccattgcttgcctttgcatatacataagtgcggccaacgcctgtagcagtaacaacacctgtatcgtctactgttgcaacagaagcgtttcctgtgctccaggtaagactggtatcataaggtgttgacagaccgtcattccactggatcagggataacagatcgtctgtatcaccaacgaacagatttctcttgtcctcggtaaatgcaacctttgttacttcctgctatgcggtcacaaccagctgtgcggttgctgtctcattgtttacctcagcagttgctgtgatcacaaatctgcctgctgcaagaggaacaaagctgatcttcttaccatttacagaaagtgtataatctgtgcctgctgctgccagattaccatccagttttacttcataatctactgctgcatcttccggatctacagtaacatttgcctgaacaacttcacctgtaggtacggatacggaatctttatcaaagctgatagctggagacgcataaactgttaccttaaatgcaagctctgaaccatttggagcttttgcaatcacataggtaatgccaggtgctactgctgtcacactgtcaccagtgatctttgcaatagactcatctgcacagctccatgtaaccttgcctgcagttgcttcaacagtcggaagcttcttggacatcttatcagcaacgccaacctgaagtgttgcttcccagtctgcgggatatcccggtttgaatccgcctgcagatacagctacgataaatactaccttagatccatctggtgctgtaactgttacagtagtattgccaactgcctgtgcacgaacaacgccgtgggaaacggtagcaatggtcttatctgcagatacccagttaaatgttgcaggatctgcgcccataactgtatcttctactaattttgcaagatccttatgactttcatcatcagatccgtcaaggatcagatttacaatattactctcgccggccttcaactgcacgctggagatatcttctgcatctacagtgattgtaaatacagccatacttccatccggtgctgttgctgttacaactgccacacctgcggatttggcaactgcaacgccgctgtatacctttacaacagactcatcagagcaggtccatgtaagctggcttaacagagaatttgtaccaacagctggagcactgccgcctaatcctggagctgcaagacctccaatcaggtcaactgtcaactcttttgtcaggtcatgagtctcatcctgccccatcttaagggaaatctcttcctgcccggtaagcttaacagtcacaaccggctcagccagaaccttaacagaaacaccaacgctgcttccatccggtgctgtagcaactgctactgtatgaccagccttcagtccttctactttattgcctgcgattcttgctatatctgtgtcaagaaccttccatgtaacaacaccaccgtcagacttgatctccggaagagctgctgtctctttatctgtaacattcagctgaagaacaatctgcttcagattatctgctgtcaaagtagagtcatcaaatccacctgctgaaactgtcacaataaaggatacggttgaaccgtccggtgctgtaactgttacagttgcaagtcctggattcacagcctttacagtaccattagcagcaactgcaacatctgtattatcgctgctccatgtaaatcctttaacatctgcacctggaacggtagttgactctaccagtacggaaaggtctttgcttgcattacctgcactgtcaagtgtaaggttaattacatttgtatctggtgctatcaaagctacatttgcaagagccttcggattcactttaacagtaaatgttacataatagccatcaactgtggttgctgtaattacagcggtacctggttttaagcctgtaacaacaccaccgtcaacctttgcaacagaatcatcattactgctccaggtcacgcttgtgatatctgccggtgctccacccttagtcagtttaatgtactctgtcaggcttggagcatatgcttcaccttctgttacctcgattgatttctcagctgtagctgtataatcaatcttaacaggatctggtgttgtggaatctgtgatatggaaggtaaaggtgatcacctgtccatcatactcagctttcacattggtggttcctgtaccgttaaaggtaacaacaccatctgctccaacggatgcgatctcatctgcggatgcggtataagttacatctgtatcaagctgatctgttgtattcagaagcttcaggtatgccttcagatccaagcttgtctgctctgctctgtcaatatcaaactctgtctgagatgcttccatcttaggctctgcaacaacagtcaccttaaatgttacatagtaaccatccttggtagctgcgatcacagtagtttcgcctgctttcacacctctcaccataccattggatacggaagcaattgattcatccagggatgtccatgtaatgtctcgggtgtcaccgccattggtcagttccactctgtcgcgaagattttcatcaaatacttttccctctgcaacctctacagtggactcagcatttgctttaaagttgatttcaactggtaacggagctgtggtatctttaataatgaaggtaaaggtaacagtctgtccgttaaggtctgccttaacttcagctaaacctgtcttcttaaaggtaaccttgcctcctgcaacttcagcgatctcatctgtagatgtggtataagtcacatcattcagcgtatactcatctgttgttcccggctttgtctccggatttgtaatattcaggtaagtattcagatctactgtcttattatctttcaaatctactgcaaaggcggtctgtgtagcattcagcttcatagcgttctttacagtcactgtgaaggttacataataaccatctacagttgttgcagtgatcactgctgtaccggctttcacacctgtaacaacaccgttatcaacttttgcaacagaatcatcattgctgctccaggtcacatttgtaagatctgtaaaatcactgccctgttttacttcaatgaaatcacgcaggttcttctcataagcctgtccttctttcacttcaatattctgcagagcatttggtgcatagttgatggtgatcggatccggagtagcggaatccgttacattgaacgtaatgatcacatatgcatccgtattctcgatctgagcacgtacataagtagtacctgtattgccggtaaaggttacaagtccatcatcgtctacttgaataatgttctggttgaagtctgaatatac

SEQ ID NO: 30 - DNA, 12919 bp, Unknown
  gut microbiota DNA sequence
atcttgcctatcgtcctgcgtcggtctgcgttgtggtacatacagatcaaattttcttcttccacggtaaagtgcatcattcctcatacctccaattcatttttcttggttctggccgccgcctttttcgggctggtggcctgtttgctgtcggcaagctgcttgcggatagatggccggggcttgcgaatactcacatcacggcgctcatctttgttaatcatggcatataccccatagggaagctggaagaccgaaatgtattttccatgtcaggtggtgagaaacagcttcttgcgtttgcatcagtatatgccatgaatccgcagatttatgtgttggatgagccgtcggcaaatcttgatatggcaggaatcaaacggttgagtgaaagactgagggtaattaagggaaaagggcatgcggtagttgtggcggagcacagactttcctgggttcagcaatttgtagaccgaattctttatatgaaagatggacatatagaacgggaatttacaccatcggagttcaggactttgtcagattcagagcgggaacagttgggattaaggcgtatagtgccggaacagatacagattccggaaatttccggtgacttggaaaatgcagagcttaaggtgtgcaatctttcctttaagagaaagaaacagatgatttttcagaatattagtttatctgcaagagcgggagacatcatcggtatcacagggaaaaacggtgccggaaaatctactttttgcaattgcttgtgcggtctgcttaagcccaaaggcggcgagattctgtatcaagggaaaaagctgtcggaaaaggcccggaccaaactgttcgggatggtcatgcaggaagtcaatcatcagttgttttcagatagtgtgaaaaatgaatgcctgcttgcaaatgaagacgcttccgaacaggaaatcagggaactgcttgaaaaatttgacttagaagagtatgcagaatatcatccgatgatattatctggcggacaaagacaaaggcttgctatttgccaggcagttatgggtggaaaaaagctgtttattttcgatgaacctaccagtggactggattttaggcatatgtgtcaggtggaaaaattgatgaaacggctggcagaagaaaaatatgttattatagttgtagcacatgactatgagtttttgaatcgagcttgtaagaggtatattagaataaatagttgacttttaggaaaggaaaacggattaaaggaaggaattactcattcatgaacagctgagattatgagagaatcaattaggaaaaacagggaaaagataagccggagagaatatgatcaggatataggacggtatagcataagcagaacaagtcggaggtcgcagattacatggtgacttccggcttttttgcgtgagcagttactgtgaaagaaaagtaacaaatctcaatgtgtaagggcaatcttctcataaggcaaattattgatacttaataaagcaatatatgctatactgagaacagttgaaattcattataattatcagataaacagttaaggcaggaggattataccatggaacgagtagtaaattttttgaaagaagcagaaacatattatttggcaacagtggaaggagaccagccaagggtaagaccttttggaacagcacatatttttgaaggaaaactgtatattcagaccggaaaggtgaaagatgtttcaaaacagattcatgcaaatccaaaggtagaaatctgtgcatttaagaatggagagtggcttcgtgtagcaggagaacttgtagaagatgatagaagagaagcaagacagtctatgcttgatgcttatccatctttacagaatatgtactcagcagatgatggaaatacagaggtgttttattttaagaatgcaacagctacattttcatcatttacacatgaaccgaaagtagtgaagttctaaggataacataagatggcaaaaagtaagaagacaaaaatacataaaaagatagatggtcagcttttacagatgaacaagaagtttagtgatctcaagatgaaacagaaggataagattacaggctgggtgtatgaagaatataaaaagtatgtaacagaacatgataaagcacctgattcgctggcagatgaacagattgttgaagctgtacttgataagataaatgaggcacaaatctggataccaggtggagaaatatacgattattatcgaagaaagaaaccacaacttcaaaagaggcaggataatgaaaaagtgattaagtttaaatcttatgtcagcttttataaaagtattgttgatcaggataaggcatccgttgttatatgcaatcttaagcatgagattatttacatgaatccggcagctgttatcagttatgcgaagcgaggtggcgataaacttattggaaaaagtctgttagattgtcacaattcggaatcaagagataaaatacagcaggtagtggactggtttgcagtagatgaaagtcataatatcgtttacacttttcacaatgagaaacagaataaagatgtttatatggtggcactcagagatgatgggaagttgataggatattatgagaaacatgaatatcgaaatgcagagactatgaaacaatacgatttgtggtgatgatatgacgaaggataaatggtacaagcagttatttgagcgactgaacaattccaagttccgaagcagtttccatctaaagcagaaagatattgattacataaacgaaaaaggactggagagaatcagacaacatgcagaggattttatctcaaaaagagaagctccggcatatatagcaaatgatggcaagcagacaccaatgcgtggtcacccggtatttattgcctagcatgcaactgcaacatgttgcagagagtgcatccggaagtggcataaaatgcaaccgggaaaagaactaagccaagtgcagcaggaatatctcgtagatgtaattatgacatggattcaaaaagaaatggagaggtactagtgcagatatttgtagatgcagatgcatgtccggtagtaggtattatcgagacaatggcaaagttaaaagaaggtgcacagagtgggtctatttaagaaaaagccagctacaaagacatatgataaagaaaataagaaaccagtaatcaaagtgagcatatgtaatggcgagcaagtagctgggtttaaagatattcatacaggtaaaatagaggaggttatgctgattaagaaccaagcagaccttgatgcattcaagaaaatgtatggaatagatggcgagatagaaaaggaatattaaacaatgtatttgattaagacgattaaaggtgacataacaaaagttaccgatgtgcaggcaatcgtaaatgcagcaaacaactcccttcttggcggaggaggtgtagatggtgcgattcacagagcagcaggaccagaacttctggcggagtgcaggacacttcacggatgtgagacaggagaagcaaagataacaaaagcctataagctgccatgcgattacgtgattcatactgcaggaccgatatggaacggcggcaggaatagagaagaggaacttcttgctaactgttattttaattctatgaagctggcaatggataatggaatcaggtctattgcatttccttccatatcaacgggagtatatagttttccggttgagttggcggcaaagattgcgatacatacagtaagcagattcttgcaggataatctaaattgttttgatctggtggagtgggtactttttgatgctcatattgaagaagtgtataaagctgaggttgataagatatattaaaagattaactggtatggatcaaacaagaaatccgtagatattttatactctacgaagcgtagaatccgcatatattcaccattctctacgctacgtgggtgttcagtgataaaacaatatcgaaatgggagtgtgaaaacggctttccggaagcatcactgctgttaccattgtgtaatgaattagaaataacagtaaatgaacttctgaccggagagagaatttcccagtaaaattataagaaaaaagcggaggaaaatatggtgaatatgattagagaaaaggaagagaataagcacaagatacttaaaatgtcctcactgtaagacaagaacctggtgtaagaaagtcatgaccaaagagtgctgatcaaatcatatagacatggtatggcaacagcaggttgcttttcagaacatgaatttatctgtatgatatggttatggaggtgacgacgatggaaacaaaaaatattattttgaaacttcgtactgaaagaggaatgtcacaggacgagctggcagataaaattatggtaacaaggcaggcagtatcacgttgggaaaatggagataccgttcccaatacggatacattaaagctcttatcgaaagaatttgatgtttcaatcaatacgcttttgggagaacccagaaagctgatctgtcagtgttgcgggatgccaattgatgatgattccatattgggacgtgataaggatggcacattaaatgaggagtattgtaaatggtgctatgcagatggaacatacacatataacgatatggatgaattgattgatgtatgtgtaaagaatatggtaaatgaaagctttaccgaagaacaggcacgcacttatctgaaagaaatgcttccaaagttagattactggaaaagatatgatgagcttagtgacaatgggcagtttgaagagtttaaaaagcaattgataaatgaaattaatgatctacatatagacggacttccaagggtagacaaactaaatgcacttgtagggaaatatgtgaatctggattatactctgcctaatggtcaaaaagtgaaattccttgatgatcagaaaacctatctggggaatcaactggagtctgaatttggaggagacaggtgcttcggtattctggcaggtatggattttgttctagtatgtacatatgagaaagctggtgaaaatccagaacttctgatttataaaaagagataatataaacaaaaagaaaagtcttgacaaataaacgaccgtttactattataaaaatgtaaacggtcgtttatttaacttggaggttatcagcgtgagtaatagaaaagaagaaatattgattgtagcactgcatttgtttgccagagatggttatgaggctgtctcagtcagccagatagcaggagaacttgatatgacaaaaggggcattgtaccgccattacaaaagcaaaagagatatttttgactgtattgtgcagcgtatggaacagcaagatggtgaacaggcatccgaatatgatatgccggaagaggaaaaagaaaaaatgcctgaacagtatgagaatgtgtctctggatgatttggtggaatacagcaagtcaatgtatgaatactggacagaggatgattttgcatcatcgtttcggaagatgctgacaattgagcagtttcgcagtaaagagatgcagaatttatatcagcagtatctcgtagctggacctgcatcctatgtgaaagatttatttgatagcatgggatttacaaatgctaaggataaagctgtcagattctatgctgtcatgcatttttattacagcctttatgatggagcagaagataaggaaaatgtaaaagatgaatttgtatcagctataaaaagcttggtacaagatttgaagtgaaggagaatcagatcatgaaaaataatatagtaatccgtttagaagaaaaaagtgaatatcgaaaagtagaaaatctggtaagggatagtttttggaatgtataccaccccggatgcctggagcattatgtccttaaccagttaagaaatgatccggcatttgtaccggagcttgattttgttatgtatcaggacggagaacttatcggacagaatatctttgtgagaactgcaatcacagcagatgacggaagaagcattcccattatgacgatgggaccaatctgtatcaaaaacgaatataaacggaagggatatggaaaaattctgcttgattattcattggagaaagctgcagagcttggctgtggagcgctgtgctttgaaggaaatattgatttttatggaaagagcggttttaagcaggcaagcgagtatggtatccgatatcatggattgccggagggggaagatgcatcattctttctgtgtaaggaactgatacagggttattttgatggaattacaggagagtatgcaacaccggaaagttatcttgtagatgagcaggaagcagaggagtttgataagcagttcccatataaagcgaaaaagaaactgccgaggcagattttttagatatgaggttggtagcacgaatctgataaggtttgtactgctttcgtattattgacgaaaactgggattattatgcatcttggcatcggttttgtgcatgttagttgtctgcatatggacaatgaaattgaatcacgatagagtaattatggtagcaaattggtaatatgatttagccggaaaggaaatacacatgagggtaacggaaaaactcgtaaaaagtccggaagaagaaggagtgacccttgcgtacataagacttactaaggactttgaagagataaaagaatatgtacaacataaaggggatactctgaccggatataagaaggcaagggaaagggcatctgtcagaatagaggatattctgtattttgagactgtggatggtctggtatttgcatatactgtggacagtgtttatgaaataaaaggcagattgtatcaggtagaagacaaggtcaagagaagaactatatgcagagcgtccaaaacaatgcttgtcaatgtagagcatattacttccgtacggactgcattgaacggaagactatatgccagaatggaaaacggtgaagaaatattgattacaagaaggtatgcaaaggaaattgaagattgttttatggaggatgatgacgatgaaagaatttgatccgaagagagagtttctctttgattacataacggttgtggcagaatgtacatttgcaattgcagtgatcggcagtctctttgcaagaaataacagcattagctttatctattttttcctgccgtttgggttggcattcatttgtatgattccatgtattcctatttatttgaaggaagatatgacgattcctcagatcatgtggcagagaggtatagagcttgtagttctggaaattgcaatgtgtgctgtgatttatctgataatgggagacagcgtttctagaatagtttatgtagcaatattgatttcaacggctgtctgtgatgtgctgtcatatcttgtgaagtggtatctggaaaaagaagaggcagataagataaatcgaaagattgcagagcacagaagaaaaaaagagaatgaatagggggataaggatgaaagatcaaatcagaagttttatccttccgggtggaaacatcgctgaaattgatactcgagaggtgaaagcgtgtctacaagccttaatgaaacgtgagattttgattgccgggatctgtgcaggggttgatgtgctggatcatgctgggattctgtgtgatgtgaaatcaacccattcctctgatgcggacctagtaacggataaaaatgtgataactgcacgagcaaatgcatatgtcgatttagcagttgaagttgcgaagaagctgaacctgttcgccagtgaagctgatcttcaggaaacaatcaacttctggaaacattatcaaagagtgcagtagtacggaggtgtctatggaatatctaaggcaaattacagaagataattttatggaagcatttcatttgaaacttgcaaacggacaggaacgctttgtttcccatccaattcgaagccttgcacaggcttatgtttacaggaatcaatgtcagccgtttggaatctataaggatgatactatgattggttatgtcatggtgatttatgattatgatattccggaatacaatatatggcatatgatgattgacgaatctaatcagggacaggggtatggaagtattgcattggatctgacgattgagtacattaaaacgaaaccctttggaccatcagacaaggtaacattaacctgcaatatggacaatattcatgcattaagtttatacaagaacaaaggctttaaagagactggaacgatggatgaagatgagatagagctatccttgatgttatagtaaaagcgcagaatttgttatggaaatttgggagaaaagagaaatttatgattgagtatagtgaacttcagataggctgtatgcttattgtaatttatattgcatttatatatttccgtgagcgatatgcctataaggttcaaaagaaagaaatcgtgtttgaattattgctttttacgggaatattcagcattgccgtttgcagtaaatatggctgctgtgatcttgtttatgccaaagattacatattgtcatggagagattacaaattattcgatgggaattccggtgtatacctgttacattatggtagctgtttatatgcttggtagtgttatattactgatatgcggaagaaaaaatatggggtataataagctcattacaataacaacctgtattgtggcggcattagcagttacagtatatcagatgatacatccgcaggcgcttcttacaagcctggtgtcagtttttgtaatcataggggcttatcttaatatggagaatcctttgcttcagaagctgcgtgctcataataaagagatggtaatgggatttgcaactctcgtggaaaacagggatggcagcacaggaggtcacatacgccgtacaaccacttattctgtttgtttcgaggacagctatttcgaagtgggaatcgggcagagggtatccgagtatagattctctaaaagaaatttcaacttttttctctgtgacaattgatgaactgttatctggagaaaaactactttcaattgcggagaaagaaaataaatccaatatgcagaatctgtgcagcattctgatcggggctattgacttgtttcattttctgctgattgtgctgcctctgtatccaaaatcaatgaaagaatatattgcatccgtgaacctattcggttatacagagacatcagcctttaataggatagtctattgggtattattctttttattaatgttaattggagctgcagagattatagttacgcagttaaaaattgagaaagtatacaagatggtaattgtattttccatgttgcttggtatcgtagcagtactgtttctggctttgacaggggagacatatgcaacagcactggcatttctgcttttggtgttgaaagcaggtttatacatgaaaggaagatagagaggcaagattcatgagacaattagttttatatattcatggaaaaggtggaaatgctatggaagcagaccattataaaacattatttgcaggatatgatgtgatgggaattgattatcatgcagacaatccgtgggatgcaataagtgaatttaaagagttttttcacagatataggcaatggtatgattcaattattctaatagcgaacagtattggagcttatttttcaatgtgtgctcttaataatgaacaggtagacaaagcctttttcatttcaccaatcgttgatatggaaaagctgattcttgatatgatgggatgggcagatataacggaagaaaagttacgtgaaaaacagttgataaccacaggatttggagaaacattgtcctgggaatatttgtgttatgtgcgtaatcatccggtcaattggtcggttcctacttatatactatatggagataaagataatctgacatcacaggaaactatccataagtttgccaatgatgtcaatgcagaactaacaataatgcaaaacggagaacattggtttcatacagcagagcagatggcatttttagatgactggattagaggattgttgaaatgaaaaaggcaaccaaaagaaaaattattttatccggaatactttttcatatgatattagtctttactgcctgcagcttatgtaataaagctacatttataggggatgagatatcggatacagatttttacgatatagcttttgaacagatgaactcgacacattctcataatatagatatggacgccggtgaaagtattaaggtaaagattatcagcaaatccgggaaaatttccgtacaaatatataatgaagatgatcagccagtgtatagaggtgatgatgtaacggatgcagaatttgaaatacagattaatgaaaaaggaacataccggttatgcgttagtggaaagaaagcaaaagggcatgttattttttcaagatgcaaagaggaaaaggacataaagaatgaaaaagaaaagtgaaaaaaatctgccgttgtatggtataggtccggttattgtatttgggcagttactgattgccggtggcgcaattgccatttcatataaatttaaatgggatcgttatgaatatgaaatgctaaacattccattaaaaatcattggtattttgtctgttatctttggattgtatttaaattattcagcgaaacatatatcaaacttatttgaaaatgtatcagagaatagattgattcaggatggaatatacggatatgtaagaaatcctgtatatagcgcagctttttttgtaagtattggaattgtcagcatgacaaacagacttattcttttagtagctgttggcataatttgttggagctatatgtcactattattggttgtcacggaagaaaaatggctaagagatttgtatggaaagcaatatgaggattattgcaatagagtaaacaggtgtattccatggtttagaaacaaagtattgtaatatacttgcaagttaccgttgggtaactataatacaaagtgaccaaaaggtaactaaatgtcagacgctaagacgcagagcaggaattgatttgctttgcgtcttttttctgtataaagatggtctgacaaaaaagggacatttagtttttatgatattatagatttcataacttatttcttatttttcggtattctcttggcgaatatcctttcagtttgtgaaaaagccggctgaaataaagctggttatcatatccgacaatcttagaaatctcattgatagaataagttgttgtttcaagtaacatctgagcattgttgatacggattcccacaatgaattgcattggtgtagaaccagtatattttttgaaatttcggataaaccagctgacactcatgccccgtgaggtagcataatcatcaatattgatattttgattgtagttttcactgaaaaaggtaacagcattatccatctcatgatcaagatattcattttttaatatgtgctctcttgtcagttcccggtggaaactgatcagaagatgacgtagcaaaaggacaagcatttcctcataattatcttgacagcgttggagctcgataataatacgcttgaaaatttgttcatattcattagatgtaccaacttgaaagacatgttctttatctggaaacccatattgacgtaagatattttttacattgcttcctgtgaagtgaatccagtatacttctgtcttatcttctccgtaatattcatatttttggagttctttcggtctgtacagtacaatgttgccggctggaacaatcgtttcattatttacattatcaaaatgaaaatgcccacaaccagcagtgatatatataatctgataatccagacgaccccttggacggtaggtcggaagtttgggatgtctggaaagacggtaagtaccacagctacctacaatcagcggacgacttttgtctttgaaatccatatgtgagtggttcaaataaccggtgttcaaatacataggacagcacctcttttcgcactttttatcattgtatcatttagtgcatattttgtctaatccaattcatagacatattttgcggattaggataagctatatatagcataactaaggaacgtaaacaaaaaagtaaagtataaggtttgctttagggaaacaaagaacaaaaaagtatatgtattggaggagagttatttatgatcgtaccacgttattatgaaaatctaagcgtactgcacgaaaacacaatgccagccagagcctattatattccggcatccaaaagaatggataacttggtggaacacagagaagaatcagatcgtatgcagttattgaatggaacttggaaattccagtattttaacagcatctatgacattcaggattctttctttgagaagaattatgatacagaaaattttgatgagattcaggttccaagtgtatggcagatggcaggatatgatacacaccagtatacaaacatccggtatccgtttccgtttgatccaccatatgtgccacaggatattccgtgtggagcttatgtacataattttgagtacagcagagatgagaaagcatcaaaagcttttttgaactttgaaggagtagacagctgcttttatgtatggatcaatggctcttacataggatacagccaggtttcacatatgaccagtgagtttgatgttaccgatgtacttcaggatggaacgaatacggtggcagtgttggtaatgaaatggtgtgatggttcctatttggaagatcaggacaaattccgtatgagtggtattttccgggatgtgtacattttgaaacgcccaaaacaggcaatcagtgattatcatattaaaacaagaattgaggatatgcttgcgaaag

SEQ ID NO: 31 - DNA, 14584 bp, Unknown
  gut microbiota DNA sequence
agaaaaaagtcgtcgtacagcagacacatttggcttttttttatggaactcttgatatatatcaagataagcaggtttgcactcttgacaaattttgagaagaaatttatattacacgagatttagtacatgatgtacttgtatcatgccgttttatacggtattagctggttttgtacagtatcatgcagcgtagttctctgcatatcaggttttggagaaaagaatatgattattgactttcattcacacatacttccggggatcgatgatggatccagggatctggacacatccatggcaatgctggagcagatcagggcacaacagacagacattatgatagcaacaccgcacttttgtgccacacaggacaggattgatacttttcttcaacttagacaacaggcctatgatgctctttgcaaagccacagcagagcgtggatggacagactatccacagattctgaccggcagtgaagtggcattctttaatggtatcagcagatcagaagagatctgcagactcaccatagaaggcacagatcttctgctgcttgagatgccctttgtcccatggaatgaacacattattgaagaagtttccggcctaatccagaatcgtcatttacggatcatgatcgcacatcttgaccgtttcatccggatgccaggcaacaagaagtacatctgccagttattggaacttccggtttacgtacagcttaatgcagaatgcctgacaaactggagatatcgacatttcttcctgaaaatgctggaagagggcactgcccatgttcttggcagcgactgccatggagcccatcaccgggtaccgaatttaaaggctggcagagatatgatccaaaagaaaaagggcatacagcttctggagaagattgaccggcagggatatgaattattgtttgacaatgggcagacggtgcccacgaaagcagcaggatattcagaaaaaaaacggaggagtaataatgtctaaaaaagtatgtatcacattcagcgtgatattatttatcattttggcagcacttatgtattgtgaagccacccatccggcaggcggtcccgctatgctgaaagagatgatgaagtgatctgcctgaagaagtttagaaaaggaacagtatgaccagatacagaaaaaaatcagaaatcaagcgtatatatgcgaagattgggatatttattgctatacttgcagcaggattcgctatcatatcctgcatccttggcatggcagacaggcagtccctgaagaataccgttcagaagaatgaggataataagatcctctatcagggtactgcgtatgtgccaagaggaaatctggagacctatctttttgccggtatcgatgatccgggaaaagtggaacagatcagtgaatatgatggcagcggtcagtgtgatgtactgatcctgttggtacgggatcgaagtaccgatcagtgccagctggtaacgatagatcgaaatacgatcacaccggttcagagtctggaggatgatgggaactacatcagtacagatgatatgcagatttcactggcacacgccatgagcctggatcatattaccagggcagagaatacagttcaggcagtgtccactcttctgaatggagccaggatcgactattatgccatggtaaatatgggagcgatccagacagtgaacgatctggtaggcggtgttactgttactatccaggatgatttcaccggtgtggatgacagcctgaaaaaaggagaaaccgttactttgactggatctcaggcagagcattttattcgtggcaggatgacgatgaaggatgatgataccaatcagaaccgtatggcgcgtcagacacagtatgaggatggcttcaagacagcattccggcagaagtgcaaggaagacaataccttcccgcttcagatgtatcatgtgctggaagattatatgactacgaatatcaacgccaaaaagttcagtcgcctgtctcttcttttgacagatggcagggaggttggaaggctgtccattgatgggaaatatggcgtggatgacagcgactggcagacctttgtaccggatgaaaacagtctggaacaggtgatcctgaccttattctatgagaagcagaaatagattcttgtaagaaacaggataaaagatgctttccaatatgcattgaataactatcaataagaaaacagtacaaggagaaaggaaaatgaatcagaatcaaacaaacgaggagatggagatcgatcttctggatctggcaaacaagctgctggataagtggtattacctgcttctctgcctgctggcaggtgcggtgctgctgaatgcatatgcttttttcttcattgaacctacctacgattccacatcaaaattatacgtagtatctgcatccgatgactcagtggttaatctaagtgacctgaatctgggtacatcccttaccgcagattatgaagaactgatgcttagctatccggtattgaatctggttattgataagctgcacctggatatgacaccggataatctgaaaggactgtattccttaagcaatccggctgatacacgtattcttcagatcacagcaaccactacagacccgcagctttctatgaatctggcagaagcaatggcagaagtggcagtatcctatcttccggagactatgagcacactggcaccgaatatagcccagcatgccaagatggcagattataaggcaggtccaagctacaaaaagtatacaatgatcggtgcacttctggggctttttattatggcagggattctggcggcacagtatcttatggatgataccatacatactgcagaagatatggagaaatattttggcctggtaccgcttaccacgattccggatagcgagcaggtggttgattttgaagaagaggtacattccggaaagagaggacatagaagatgaagcagctgacgatcacccttcctgaattgccatatgcagtagaagaggcaatgaaccgtttgcgtatcaatattaaattctgtggcaagaatacacgaaagatcctgttgacaagctgtctgccaaatgagggcaaaagcacggtatcttcctacctgtggaagatgctggctgaggccgggtttcctactgtgctggtagacgctgacctgcgaaaatccgtgatgagaaagcgcctccagatcgaatacaaggaggatgtgcgaggcctgaatcattacttatccggcatggcagaatacgatgaagtagtctatcagaccaacgtagccaatggatatctggtgccgtgcacacagcttctggaaagcccgtctgccttactggaggacagtcgtttccgggatcttctgaataccctggcagagaattaccgttttgtcataattgatacaccacctcttggcagtgtatctgacagtgcactgatcgcttctatgtgtgatggagcagtactggtcatacgtgccggagttactccaaagggcatgatcaagcaatccttatttgaattggagcaagtcaattgtaaactgcttgggactgtactgaaccgtgtagaagtacatagccgtgcctatggcaaatattacagcaagtattatgggaaatatggaaagaaatatggatatggttatggctatggaaaagaagaaaaaccggatgcaggcaaataagctttgcaacgcaggaagataagcgtgcatccgatgatatatcatatggatccggaagcacaaagctataccggaatggcgcacagacgtcactgaatcttggataaatggaaggtgcgtggaagcttctgtttattgatacatgcaacaaaaggagtgagaaacatgaaactttctaaaagaatcgcccttatttttgcttctttactgatggttctttgtgtatcagtatcggtatccgcaaaagaatcaccgacaaaacaatcctttaaggcttctctgaagcagtctgcagtggtatatgatggcaagactcataaaccatctgtagttgtaaaagaccttaatggcaaaacgcttaataagaagtactacactgtacaagcaaagaaagtgaaaaatgccggtacctataccgttactataaaaggtaaaggaaaatatgccggatacgttcaaaagcttacttacaagatcaaactgaagaaacagaaagtatctgtatccaagtcgaatattacagtaaggtacaacagaaataaagctacaagccaggtggttaaagttactaagaagaccggaagggttacctacaaaaccaacagctccaggatcaaagtcaacaaatatggcaagatcactgtggctaagggcaccagaaaaggtgtttatcgtataacagttactgttagagcaaagaattacaggacagtaaagaaatctattagagttactgtaaaataagccggctatttggcaaaaaagctttagcaagttccccaaccacgcaggggaacgctggcttattatagcagtaccctcagaattacagaggtaatctcagaccattatgttactaccaatatacgttttgaaaaatagaaggaaaaagaaaaatacatgtatagaaaagattctgaaggatggataaagcatctggactttattattttagatttgatctgtttgcagatagcatttatattggcgtatgcgtttagtggatatgggatcaatccatatacaaattttaattacagaaatatggcagtatttatcgaaatggcagatctgctggtaatgtttgaagcaaatacaatgaaaaatgttctgaaacaagatttttacaggggatttgttttaacggcgcgccaaggggtgacgatcggggcactttctttagtatatctgttcatgttacagcggagccatttttattccagacttgcgttagtgctgactatcataatatacatattgcttacgtacctgataagagtgctctggaaacgccatctacgtaaaaaaatgaaagaggatggggattgctctttattgctggtggtttctgaagatgtggctaatacagtagtagagaacatgataacacataattatggcagatataagatcgccggtatcgctgtcattgataaggagatgacaggtcaacatataggcggtgtggaagtggttacggacatggcgaatgctgccgaatttgtatgtaagcaatggatcgatgaagtactgattgcaacctccggcacggtgccttatcccaaagagctgatccggcaattcacagaaacaggtgtgactgtacatctgaacctggtaaaggtacagagcgtaccaggcaagaaacagttcgtggaaaggatcggagattatacagtcttaaccaccagtattaattatgcatctacccaggagcttatgctgaaacgtctgatggatattgtaggtggcttggttggatgtctgattacagggatcttatttatattccttgcacctgccatctatatagcatcccccggccccattttctttgcccaggagcgtgtaggaaagaatggaaaacgtttcaagatgtacaaattccgcagtatgtacatggatgcggaagaacacaaagcggaactgatgaaagataataaactgggtgatggaaagatgtttaaactggatttcgatccacgggtcattggaaataagatcctgcccgatggaactcataagacaggcatcggagaatttatccggaaaacaagcattgatgagtttccgcagtttttcaatgtattaaaaggagatatgtctattgtggggacacgtccgccacttatttccgagacaaacctatataagcttcaccatcgtgcaagactggccattaagccagggataaccggcatgtggcaggtgaaaggacgcagcacgattaccgattttgaagaggttgtaaggcttgataaagaatatattgagaactggaactttggaatggatatcaagatcttacttgaaacattgttagtggtttttgataaaaagggagctgtctaagcttcagccattttaaatggattgtataatggagaaaagcgatggaaaagaacttaagattggctgtatttggccacaaacggtggtccagagagggcggtatcgagatcgtggtaaaagagctatgtacccggatggctcgcatgggatgtcaggtaacatgctacaacaggtcagggcatcacgtcagtggggcagaatatgacaatacggatcaaatggaatatcaggggatctgccagaaatatgttcccacgatcgaacagaaagggcttgcagccgtaagttcttccttcttcgcagctctcttttgcgcactgggaaaatatgatgtggtgcatattcatgctgaagggccggcttttttcgcatggcttcccaagttgtttggcaaaagagtcatagttaccattcacgggatcgactggcagcgtgagaaatggaagtctggttttggatccagattcatccggcagggtgaaagaaatgcggtaaaatatgcagatgaaataattgtcctgagcagaagtgttcaggattatttcagtgatacatatggcagaaccactcgattcatacctaacggtgtgaatcctccggaactgaaagcagcggagcatattacagccaaatatggactgacaaaggattcttacatcttattcctgggtcgcctggtaccggaaaaagggatccgatatctgatcgaagcattcaagcatgttcacacagataaaaaactggtgattgccggtggctccagtgatacggattctttcatgaaggagatggaagatcttgccaaagaagatggaagaatcctttttaccggatttgtgcagggccagatgctggaagaattatatagtaatgcctacatttacacattgccttcagatctggaaggcatgcccctgagcctgctggaagcaatgagctatgggaattgctgtctggtttccgatattccggaatgtgcagaagtagtggaagataaggcactgatcttcaggaaatccgatgtgaatgctctcagggaaaagctgcaagatgcctgcgatcatcctgaaaagatcaagaagtataaagaacaggcagcagactttatctgtgggaaatacaactgggatgatgttgcagaagaaacgatgaagctatacaggagaacatgatgagaagtttgatgataaataaatttttatatcccaatggcggcagcgagacgtacatattcaaattgggtgaggcactggaacagcacggacatcaggttcagtacttcggtatggagcacgaaggccgctgcgtgggcaaccgggtcaatgcttatacatctgacatggacttccacggcggcagcaaactgagcaagctgacttaccccatcaaaactatctacagcaaggaagcgcgggtgcagctgagaaaagttctggacgactttaagccggatgtctgtcacctgaataactttaactaccagctgacaccttccatcattctggaaatcgtgaagtggcgcaaggagaccggaagagattgtaagatcatcttcacggcacatgactaccagctggtctgcccgaaccacatgctgaacaatcccaacacccaccagaactgtgagaagtgcctgggcggccatttcgcaaactgcatgaaaggcaagtgtattcacggctccacggcgaaatctgccattggcatgatggaagcagaattctggaagtggaagggtacctacaagtacattgacacgatgatttgctgctctgagttcatgaagcacaagatggacagcaacccgctgtttgcgacgaagaccgtggcaatgcacaacttcatcgataaggtggagtggaaggaaacggaaaagaaggactacgtcctttacttcggccgcttctcggaggagaagggtatcggcacgctcatcaaggtctgtaaagaactgccggatgtacagttcatcttcgccggtactggcccgctggaagagacagtaaatggtattaagaacatcaagaacgttggcttccagaaaggcgaggcactggagaagctgatccgtgaggcacggttctccatctatccgtctgagtggtatgagaactgcccgttctccgtgatggaatcccagatgtacggcacgccggtgctgggagcagacattggtggtatcccggagctgattcaggtcggcaagaccggcgagctgtttgaaagcggtaatgctgaagatctgaagaagaagatcgaaaaactctgggtggataaggagctgtgtgcggagtacagtgcgaactgtaaggacatcagcttcgataccattgatgagtattacgagaaaattatgaaggtttatagataaaaagagagatagaggtattagaaaaatggctaacaataacgagaaaaagttaaatggtactgtcatcgtcacttatcgctgcaacgctcgttgctctatgtgcaaccgctataaagcaccttccaagccggaagaggaaatcagcatcgaaaccattaagaagctgccgaaaatgtacttcacaaacatcaccggcggcgagccattcatccgtactgacctgaaggatattgtgcgtgaactgtacaagaagtctgaccgtatcgttatttccacaaacggtttcttcactgaccgtatcgttgatctgtgcaaggagttcccgcagatcggtatccgtatctctatcgagggtctggagcagaccaacaacgagatccgtggtctgcagaacggttaccagcgcggttacggcacgctgaagaaactgcgtgagatgggtatgaaggacgttggcttcggtatgaccgttcaggacaaaaatgctcctgacctggttcctctgtataagatctctgatgagatgggcatggagttcgctactgcttctctacataacagcttctatttcgttgaggccaagaacatcatccatgaccgtccgatggtcgcaaagaactttgaaaatctggtcaacgaactgctccgcagcaacagcccgaagaagtggttccgtgcatactttaatcacggcttgatcaactacatctatggccagaagcgtctgctgccttgcgacatgagtttcgataccttcttcatcgatccgtatggcgatgttatgccttgcaatggtaccaaggataaagaggtcatgggtaacctgaacaatcagacttgggatgagctgtggaacagccctgaagcagagaaagttcgtgcaaaggtccgctgctgcgaccgtgactgctggatgatcggtagtgtaagtccggctatgcacaagtatatctggaagcctgctacttgggttctggtacacaagttcaaggcactgttcaccaagcatccgtacagcatgtatgagctgaagatttgccgtgattaccgcgacggcaaagttactaaagaggatctggataagtgcagcacctgcgatatgaactgcgtgatcaacaacggtctgagtgaagcttctaaggagcagctgaagcataagaccggcgaggaaatcgtggatgctgatattgcagcacagcagatggagacgaagtgatgaatatcctgtatatagcttattcatgtaacccttttgctggaagcgaagataaaatcggttggtgtgttccttatgagagttcaaaaacaaataaagtttatgtgatcacaaaagaagagcaacgtgaaccagtcgaaaaatatttgcagagtcacccacttggaaatataaagttttattatgttgacatcccgaatttttacaagaaaatcttcaagggatttatgtattctggaagacttaatgtgtggaatagacaggtgcttcctcttgcaaagaaaatctgtgcggatcaaaaaattgacgttattcatcagattacaccaattgaattccgtgcaattggagactatggaaagatagcaaatatcaaatttgtctgtgggccacttggcggaggagagtctttgcctaatgggttaaaagattacgcaaagggacatgaaatcattgaagtcgttcgttcagggataaatcgttggtatcgttttaagctgaaaatcacaggcaaactaaatcgttgcgattatattatgtttgcaaataaagagactcaagaattccttgtggggggagggcagaactaaactgtccgtatgaattggtctttgataatggattgagaccggacgaattagtgaactggacagaaaaggaaaaagtaaatgaagaattacaatgtaagtgacgagccagtaactgaggttgcggtagatataaatgatattaaagatactagcaaagaaaagggcagaaatgaagaatgcgtttttctggttgccggaagaatgatttatcgaaagggcttggatttcctttttgatgcattgatgagaattccgcaggaaactagatatcaggttagggttgtaggcgatggcccggagcttgagcatctgcgtaaacgctgtaaggataacctgaacttgtctgagcatgtgcactgcatgggatccatcccctatatggaaatggaaaaggaatatgcagatgcggatgtatttattatgccgagcattcgagagacgacaggtacggtcttattggaggcaatgtcaaaaggtattccagttatcaccattaataagtttggcggagcaactctttttgataaagacacggggtggctttatgaaggaaatacgaaggaagagtacatcgagaatttgaaaaaggctattcttgaatgtattgctaatcctgatgaagtaacaagacgtggaaaaaacgcgcgaaagaaagcagaaaagtatacttggcaggaaaaaaataagaagtatcaggcaatatatgaggaactgctgaaaaagtaagatgtgcagcatagaggagagtttaaaatggttggagtatgcataaaatatatgcatgaaaattacggaggcatattgcaagcatatgcaactgttagttatttggaaaatcaaaatattgagtatgagttggttcgatatactagaaagaagactgtgacagaagcactgaaagatgtgccgcgtctttttaatgcagtttggtttaatagcagatatgagggaattcagagaaaacttagtctaaaaaagcatcctgagtatgcaaagaataatgaagttcgtatgaaagcatttgccggattcaaaaaatgggcttttaaggatttctccgatgagtatatcggctatgcggcattacgcgagggtggaaagaaatattcggcggttataacaggaagcgatcagctttggagcccagcaggattgccaacgaattattacaatttgatgtttgttccggatgatacgctaaaaatttcaattgcttctagtttcggagtaaaggaaattccgtggtatcaaaagaaaagaacgatacagtatttgaatcgcattgaatacattagtatgcgtgagaatcgaggaagtgagattgtcaaggaattgactggtcgagatgttcctacgattttagaccctgttttctttttgagtaaaaatgaatggctggagagaattcctaataaaagagaaatcaatgagccatatatttttgcatacttccttggtgccacacaggaatatcgcaatgcagtaaagaaattagctcgcgacaagggcatgaaagtcgttgcattgcgacacatggatcagtatgtagaagaagatgaaaactttggggactttgctccgtatgacgtgagcccagagagatttctgaatcttctgcgaaatgcagagtatgtctgcacagattctttccacgggactgcattttctattcttaatgaaaagcagtttgtggtatttaacagatatgctgaaaattccagcttttcaaaaaattctcgtattgataccctgtgtgtgaattttggtctagaaagtcggcgttataaaaatggaatggacttatcagacgttgtaaaagatgatattgattataaagctgtaggggaaaaatataaaaaccttaagcaggtaacagatgaatacctcaacactattttgcgtgaaattaaagggcgtgcttaaaaggagaaattgtttatggcgataggcagtaataatagatatgaaaatttagatgggctaaaagttattgctgcttttggcatcgttgctatgcacgtgtcatctaatatgggacatcctcttacatcagaaatcgctaccaatattatcggtagcatgacgcattttgtaaagttatttctgattttgagtggatttggaatgtgttgcggatattatgagaaattcaaaagtggaaaagtaaatctggaaaagttttatatccgtcgttttgaaaaaaatctcccgttttttgcattgctggtatgcattgacacattgtttagtataaaaacagttttatggagagatgttttctcttcgcttacaatggcctttaatttgatgccttcacatgatatgtcagtgattggtgttggttggacactcggcgtgatttttgttttctattttatgtttccgttctacattttcttgctttctacaaaaaagagagcatggttcacggtgattatttgctatattttaaattggtgctgttgtaattactacgaatctgtaggtaaaacagatggtgccaactttttgtttttatcagtttactttgtaattggtggagttttatatctctataaagattatattcaagaaaaagtgagtggaatcaatacattcgtgatactgttggcgacagccgttgtaacaatggtatggtatttgactccaacaaatgagttctctctcttttttacagtgaaaacaagtatactgtttgcgatgtgggttatatttgctatatctcagccgatgaaattattaggaaacagtgttacaaagacattaagccaggtaagcttggaagtatatctttctcatatgatgatattccgagtcgttgaaaaattgggaattgcgtatcgaatcaacaatggaaatattgcttacattgtagttctgtgcctgaccgtcgtattaacaattgtttttgctttaattgctaaaagagtgattgatatttgttttagaagactaaagaaagcggagagataaaagagtgattgagattacagataaagtgaaatgctgtggctgtacagcctgctttaatatttgccctaaaaagtgcatttcaatgcagccggatacagaaggctttttatatccaatcgtcgataaaaagcaatgcgtaaactgtggtttgtgcgaaaaagtatgtccgatcttgaattataagtcaattgaagaaaaaacaccggaagcctatgtgattcgcacaaaaaatcataatgaccttatgcaaagtacatcaggtggcttttctacgcctcttgctcaatggttttttagtaagggtggcagcgtttggaccgcaagctatgacgataattggaatgttgttcataaagaatttactaaggatgatgtggatttctcaaaaacgagagggtcaaagtatgtccaaagttatttgggagatacatatacaaaaattcaggatgaattaaaaaaaggacgatgggtttgctttattggtactacttgtcaggtctatggattgaaggcattcttgaaaaaagactatgagaatttaataacggtggatttggtatgtcatggaacaccatcacctaaactgtgggagaaatatatagattttcaaaccaagaagtataattcaaggataacggacatcaattttagaaacaagacatatggctatcatagtggcacaatgatgcttagatttgagaatggcaaaaaatatacaggcagtgcaagagttgactatatgctaaaaagtttcttttcggagattgcatctcggccgtcttgctatacttgtaaatttaagcagctaaatcgagttagtgattatacagtatttgactgttggcacatgggagaattgttgggaaaaaaggatgatgatagaggatatacgaatctcctagttcatacggataagggtggcgaactactaaaagagattgctgccgcgtatgagatgttccaagtagatgcagaaaaggcgatagcgctagatggaataatggttcgtaattcagcaattccacataaagatagagcatccttctatacggatttggatgaacacgaaatggatgagcacattcagaagtatataagagtcacctctaaagatagattgttggaatccataaagggaattgcttacaagggtggattgatggcaactttaagaaaaataaaggggtaaaatgtgtatgttacaaataagaaaacttcggcaggtggattatttctttttgctggtgatgattgcatatgcatttgatttcggaaatttaaaatatgcaatggcatggtgcttttcggcggtgtattttttagggagcggtctatatgaaaaacgcagattaaggggaat

SEQ ID NO: 32 - DNA, 9992 bp, Unknown
  gut microbiota DNA sequence
atggctgctgaatatgctgctggcaaagagcgtttgagtagagctgattataccttgcaagaggcaatggaaaagtatatcgaatcgaaagagaatattctttctactactactcttcgcggatataaaactcttgtaaaaaatgcttatacaaaacttttaccaattaggattcgcaaactgacagcttacgatatccaagaatgggcaaacgaatattccatctcccattcgcctaagtctgtagcaaatgctcatggcttcatttcggctgttttgaatgtatatgaaccttctctcaggttaaacacaaagctccctgaaaagaagaatacagagctttacgtgccatctgacaaagacatcgagaaacttttaaaatatattgaaggctctgaattggaaaaagcagttctcctggctgcatttggtacgcttcgccgaggagagatctgtgctcttactgacaaagatatatatggagatagcattaccatcaacaagtctgtcgtccgctcagacaagggcggcatgataaccaaatccccaaagaatctttccagtaaccgagtggtagaatatccacattttgtaattgaaaagtttgatggcatacagggccggcttgtgaatatgtacccggaagatatttcaaaaaaatttggaaaggttttagaagaagccggccttccgcattttcgttttcacgatctccggcactactctgcttctattatgcacgccattggtattccagatcaatacatcatggcaagaggcggctggaaaacagatgtggttttgaaatctgtatatagaaatgtaattaatgatgaacagaagagatttacagacaaaataaattctcatttcacagctatgcaacacgaaatgcaacacaaaaaataaaaagtgccgtaaatacggcactcttaaaatggacctggcgggaattgaacccgcgtccgaaagtctatcccttgcggcatctcccatcacagtcaatgttttaacattccctccacagcacgcccacagacaggcttactgcttcagtagcttcataatacatctgccgggacaaagcttaaccggcaaggtttctcacatagtcgacgccaggctcctgatgtgtgagtgcatcaggtctgacgggcagcacttaggctgccattactaactgatcgtcagcgtttatatttagaatttcccgttttaacgcagttcgggagctgcggatggcttcctcaacttcaaaacccccgtcgaaaccagtacaagcccgaatagataaaatcggatatctttgctggtacgcagacgaattgaaactgtgtggcagaacatatctgtcactacctgacagccgacagtcttactatcaactctcttgttaaagaattataatcatgtttccaccggctgtcaaggcaaattacagcattatttcatatcaaatcacaacattatttcatatcaatcacagcattatttcaaatcatttcaactcaaattctattctccgaattcctgtgctgctttcttcagcatctgacggattggtaaatgataaggacatcttgtctcacacttcccacatccgatacatgcagaagccttcaccggaagcttctcataacgggctcttgcccactcttccagattgtaacgtaacagataaccttccataagaaaaacattcggaataccgatccctacgctgcaaggcgcacagtaattacatcttctgcagaaattggttcccagctgtctgcgcaccccatccatcttctctttttcttctaaggtaagaggtgtctgatctgaacaggcagcaatattctcttctaattcggcaatctcagccatccccgggatggtcacagttacatccggattggaacagacataacgcagtgcaagacgtccatcctcaatagctccgccagctaaaggcttcatatcaatgaatccgatccccttctctgcacatttacgaatcagctcttctccctgattctccacaatattatatggaaacatgatagtctcaacccagtcaagctccagtgccttctcaaaaacagctgtagagtgtgcagtcagacctatatgtccgatctttccggatgcctttgcttcttcaagtgcttccagtgcacctcctttgccgatcacctgctccagctggtccatagaaggattgtgtacctgatacagatcaatatgatctgtacgaagattattcaggctgatctggatatcggctgccattgcatcttttgtcctggacatgctcttggttgcgatcacaaactgatccctgatcccctcaagaccatatcccagatactcctcgctgactgtatagcctctggctgtatcaatataatttacgccctcttctgccagcttatgcatcagcgtccgtgtaccctctgcatcaattttctggataggaatacctccgaatcccatccttgaaatacgaagccctgtttttcctaagtatgtatactccatctctctcctttccaggatattcactgttcttcaaaaacagtgtaaaaatccctcactgataatcatttgctgctcatcacctatagaggtggaaaagctctcacattcggcatatattgaaagggatgctgccatgtgcagcatcccttctgtccgtgtatccacacgcatcgctctcatgtctgtctgaagcttctgctgcagggcagcctgaccgcatcaaactctggagagatactctcctgttcttgtatcaatcttcagcttgtcgccttcgtttacgaaaagcggtaccataacctgtgcaccagtctcaacaacagccggcttggtagcaccctgtgctgtattacctgcaaaccctggctctgtctctgtaacaagcagctctacaaacaacggcggctcaatagcaaatacattaccattgtgagaacagatcttaaccatttcgttctctttcacgaatttaagagaatcgcctacctgatcttctgtaaggccgatctggtcaaatgtctctacgttcatgaaataatacagtccgccatcattgtacagatactgcatatctacacgctcaatacgtgctgtagggaacttctcagtaggacggaaagacttctccagtacagctcctgtaatgatatttttgtatttggttcttacgaaagcagctcctttaccaggttttacatgctgaaattctacgatctgacatacattgccatcaatttccactgtgacgccgtttctgaaatcacctgctgaaatcatacttgtgtttcctccttaattgtgcttatcgctaaaaaatattttataatacccaggaatatttttcaactgtttttttacttatcttgccatttatatttttccgtttcaaattgtcctttgatttatacaatttatccttataaatgatctcgtttctttttatttctctttttatttctcttttaatttttcctcaatctcactgatcaggtcatcaaagggctttacacctgtaacgacctggatattggcaaaacctgcataaataggatccctttgcttcagaagctttttcatcttctcatccctgtcatcaccttccagaagcggattagtattcccactgccttccatacgctttttaagcacatctgcagatcctttcaggtaaacaacagtacccagctgttttatatacttctggttctgttcctgtaccggaagaccggagccaagagaaatgatctttttctccttatcctcgatcaagcctttgatggtcattgtttccagtgctctgtaatacggttccccaaatctctgaaaaatctctttgatagacatatccatctttttgctgatcactctgtccacatcaataaatggcagtccaagatccttggacagacgtttccccactcgagtttttcctgaacccataaatccaatgataacgatatggttcatgaattcccctccttcttttgcttttgataaaaaaataaaactattttttccagataacgcttaagaacaatctggatttcttcttttggatggatcggcttcacaagaatgcaaaaaagccctgccttctttgcaccgtaaatatcagtaaatagctgatcaccgataaaaagtgtattcttccgctctgtacccagaagttccatagccttctgatagccctttggcgacggcttgccagccttatatacacagcatccacctgtctcttcacaaaaaggctccactctatcctttttgttgttggatacaaaacagtatccaaagccaagttctttcaaccttgcaaaaagggctttggccctttcatctgccggtgccccatgaggcaccagcgtgttatcaatatcaaacagaatcccccggaagcctttggcatatagctgttcaaaatcgatctgatatgtggaatccagatattgatccggataaaagcacttaaacattcactatcctctttcatacaatttctgtttttgtgtttccgtccctggcctggcttcctacttttcaagataagcctgcatctcttccatacgctgcttcatcagctggtacccatgatcataaaactctgtcagcttctctacattctgctcagttcttgacacaggctccacctccggacggatcacaaaaatatggccttcttcttcccatttctccaccagctccattacccggttgtaattccggtaacggttcaaaagtgcgtttaaaagattgggatatttcttcaatgcagccgtataaagaagtctgcttttcccgggtgctttcttacgatagcctttatttcgagtaagcactaccacattcttctgatgccccagcttcatggaatgaatcagaggcacagaatctgccacgcctccatccacacaaggaataccatccacatctaccacaggacttattaatggaatactggaagaagccctgcagatcgtgagaagccgttccttgtcctgcttctctgaaagatacatagcctctccagtaagacaattggtcacaaccacttcacattggatatcagaagcaaagtaagtatcaaagtcaaaaggaaaaagccggttaggatattcgtcaaaaagtctgtccatatcaaaaagatatccctttttcaaggcatcctttgtaccaatataacgattcttccgatcctggatgatcgtacagtcctttgtcctgccgatctgttttgaaacataatctatcgcattacaggcacctgctgaaacgccgatcgcataaggaaacttaacttccttttccatcaggtaatccagcacgccggcagtaaacacacctcttgtgccgccgccttccagtaccagtgctgcctcttttttgccattcacttgtgtcaatgcccccttacctgtcgctaagcggcacatactctgacggatccagtacattcttataagccggacggatgatcttgtctacattgatcagctcttccatacggtgcgcactccatcctacaatacgtgccacagcaaacataggtgtatataattccagaggaagatccagcatgctgtacacaaaaccgctgtaaaaatccacattggcgcttacgcccttgtagatccggcgctcctgtgcgatcacctccggtgccaggtgctctacattggcatacaactgataatccttcatcctgcccttttccttggcaagcttctctacaaagcccttcaatacctgtgcacgtggatcagatacggaataaactgcatgtcccataccatagatcagtccccgtttatcaaaggcttctttgtgaagaagcttcctcagatatacgcggatctcatcttcgtcagagaaatctttgatatgcttcttcatatcattaaacatgctcaccactttaatattggcaccgccatgctttggtccttttaaggagccaagagctgctgccacagcagaatatgtatctgtacctgaagaagacacaactcttgtggtaaatgtggagttattaccaccgccgtgttccatatgaagaatcagtgcaagatccaggatctttgcctccagatggctgtattttttatctgggcgcagcatacggagaatattctctgcggtagacaaatccttcttaggattatggatatacaggctcttcccacatgaataatgattgtatgcctgatagccataaactgacaaaagtgggaatacgctgatcaggttcaaacactgacgcagaacattaggcagtgcaatatcatctggatttttgtcataacaataaagagtaagcacactccttgacagtgcattcataatatccttggaaggtgctttcatgatcacgtctctgacaaaattggtaggcagtgatctctgatttgcaagaagtttggtaaaatcctgcagttcctgcgcagttggcagtttaccaaacattaaaaggtaggttgtttcctcaaagccaaatcggtcatcctcaataaagcctctggtaagatccttgatatcatatcccctgtaagacagctttcctgcacatggcacttccttgccatccactacctttgtggcacacacattggatacctgggtaagcccggccagcacacctttaccattcacatctcgcaaaccgcgctttacatcatatttcccataaagagaaaggtccagggtggaatgatctttacagatctccgtcagattttcaatttccggcgttactttcatattaaatcctgtcattaaacaatctcctttctattggtaatattataacatcatatttccatcaggtaaaccaaagaatccatccagctgcattcccgcacaaatccatgttactgttcactctattcaaagtatcccggtatccttaaagaagctgtcataagctggttcttatcatcgctgatgataagtggaaaggaattctctcaacctgtcagttgccttttccaactggcgcacatttggcagatacacaacgcggaaatgatctggctgtccccagttaaagccttttccaggcacaagaagcacctgcttctcatgaaggaaatccagggcaaactgctcgtcatccataatattgaatttctcagtatcgatcttagggaaaatataaaatgcagcctttggttttactgctgtaatccctggaatatcagtaagtgccttgtagatataatctctctgctcataaacccttccacccggctggatatattcattcacgctctgatagccgccaagagcagtctgtacgatagactgagcaggaacattggagcaaagccgcatggaggaaagcatattcaggccttcgatataaccttttgccttgttctttgcaccgctgaggatcatccacccaatacggaagcctgcgatcatatgagatttggacagtcctgaaaatgtaacacagaacagatccggtgccagggacgcaatggaagtatgttcatatccatccataacaagacggtcataaatctcatctgaaaagatgatcagttcatgctctcttgcgatctgtacgatctgctccagcacttccttgggatatactgcaccggtaggattattgggattaatgataacgatggcctttgtcctgtctgtgatcttgctgcggatatcatccatatccggataccagtcagactgctcatcgcagatataatggacaacatttccacctgcaagagtagctgtagctgtccataaggggtaatccggcgaaggaatcaggatctcatccccattattcaggagtgcctgcatgcacaaattaatcaattcacttacaccgttacctgtgtaaatatcactcatggtaacatttggaagtttcttcagctgagaatactgcataatggcttttcttgcagaaaaaatccctttggaatcagaatagccctgggatgtacgtacattactcagcatatcaagaattacctcctggggtgctgaaaagccaaagggatagggattgccgatattcagcttcaggatctccatcccgtcctcttccatccttgccgcctcatctactacaggtccacgcacatcatataatacattatcaagtttactggatttttcaaattttctcataattacctcttttctgccctgagggcacaacgattatatttatcttctcatatttaccgatttttcgcaagtcctcatcccaggaagattgttaaaaaaaaaattaattgtaactctgttaaaaaaaataaatgtaactcttttcttttttaatactttagtgtataatagcactcgaaaaaattttcatatcaaaatcaatatggatgaggaggaactacaatgtcttatactgaagaagtttatgagagagtcgttgcacagaaccctggcgagccggaattccatcaggctgtaaaggaagttcttgattctcttaaagtagtaatcgacaaaaatgaggagaaataccgcagtgtttcccttctggagcgccttgttgagccggaaagaattatctccttccgtgttccgtgggttgatgacaacggtgttgttcaggtaaataaaggatatcgtgtacagttcaacagtgcgatcggaccttacaagggcggtcttcgtttccatccgtcagtaaaccagggtatcctgaaattccttggttttgagcagaccttcaaaaactctctgacaggtcttcctatcggcggtggtaagggtggttccaacttcgatcctaagggtaaatctgacagagaggttatggcattctgccagagcttcatgacagagctttccaaatatatcggtgctgacactgacgtaccggctggcgatatcggcgtaggcggacgcgagatcggttatctgttcggacagtacaaacgtatccgtggcctttatgagggtgttcttacaggtaagggtcttacctatggtggttctctgatccgtacccaggctacaggctatggtgttgtatacatgctggatgagatcatgaaagcacacaaagattcaattgccggcaagactttcgtagttaccggttccggtaatgttgctatctatgcagtagaaaaagcacagcagttaggcggcaaggttgttgccatgtgcgattccaacggatttatccatgatccggaaggcatcaaactggatatcgtaaaggatatcaaagaagtgaaacgtggacgtatcaaagagtatgcagaccgtgttgaaggtgctacctacacagaaggtcttggcatctggaacatcaaatgtgatgtgtatctgccatgtgcaactcagaacgagctttctcttgacggtgcaaaagcactggtagcaaatggctgcaaatatgtagttgagggtgctaacatgcctactacccttgacgcaacaagctacctgatggagaatggtgttctcttcatgcctggtaaagcagctaacgctggtggtgttgctacttctgctcttgagatgagccagaactccatgagactttcctggacagctgaagaagtagatgagaagcttcacaacattatgatcgatatcttccacaaggcagatgatgcagcaaaacgctacggcatggaagacaactatgtagcaggcgctaacatcgccggctttgaaaaggttgttgatgctatgatggctcagggtatctgctaatccctgctccaccttacctaagtaaatgattaaccgcctgtgcttttgcacaggcggtatttttatgccatacaaaaaaggccttgaagggctggatttctccagtcattcaaggtcaattcttacgtttggacaattattcatagctagggaatatgcccttaacaggacatacacccaggctttatacaaaaatcaaattatgcgttcttctcagcgattgctgcctgagctgctgccagacgagctaccggtacacggaacgg

SEQ ID NO: 33 - DNA, 1168 bp, Unknown
  gut microbiota DNA sequence
tagcgaaagcggatctgcaagcagtgacgaaaacggatccggcagtagtgaagatgggactttttaacagagaaacctcgaagcagggggagttgttgtctatgacagcagcccctctttttttgtaacattgagggggaatattgaatataagggggagtggtgatgggagctgcaatttatattcagggtaccagtctgacagtgagactgccagaagaactggatcatcctgcatcggatctgatccggaaagaaacagaccggattatgggacagacatatattaagaccattatctttgattttgaagagaccacatttatggatagttccggaatcggactgatcatgggacgatatcgggcgcttggaatgggaaaagggtgtataaaggcagtgaatgtaagcagttatgtggaaaaactgcttcatctgtctggagtccataaatttatctgttaagggaagggagcatattatggaggataccaatgaaatgacaatgatctttgaaagccgtcctgtaaatgaagggttggcaaggatagctgcagcagcattttgcacacagttgaatcctacgctggaagaggtgtcagatctgaaaactgcagtttcagaagctgttactaactgtatcatacatggttatgaaggagaaatacataagatccatatgacctgtagaaggcagggacaggagatccagattgatattgcagatgaaggagcagggatcgaaaatattgaaaaggccatggagcctttgtacactacacggccggacaaggacagatccggtatgggatttacattcatggaagcctttatggatcaggtgactgtggaatcagaggttggaaaaggcacaatcgtgcacatgaaaaaaatcatagggaggtaacatggaccatactcttgccctgatcgggcgtgcgcaccagggtgataaagcggcaagagatacattagttgaggaaaatgcaggacttgtttatagtgtggcaaagcgttttgtggggcggggcgtggacatggaggatctgatccagattggcagtatcgggcttataaaggcagtggacaaatttgatctttcttttgatgtgcggttttccacttacgcagtaccaatagagtaagataaaggaaacgaccggaatag

SEQ ID NO: 34 - DNA, 536 bp, Unknown
  gut microbiota DNA sequence
ttgatgtcacgcatgtaccagattgaattgacatcatatcggctttcaatctcatggagacgttctgctgtgatattgatgttatcgtagatggtacagtgcatgtaattatagccgcctggaaaatttccttcttcctgctgccgctggtatctgtcaatgtactctgaataaatggcagcccttgggttatccgggttcaggtcccagaacactttcaggcgtttcgctgcaagctgacgattaaaagcctctttaatcgtattatcgtgatgcaggttgatctcagttgcgatccacatcccgtaggagttaccgcggattttcttgtaactgtcttccttggcaccaccggcaaagatgacgatcttctgtttgtaatgcgttgccggccccttgacgaacagtgcttcattgtccttgtactttccccaatggctctggccacggaaaatccattcaagtcccatcccgttacagtcgccgatattcatctttgcatttgccattgtggagcctgttgcaagatggatctt

SEQ ID NO: 35 - DNA, 128716 bp, Unknown
  gut microbiota DNA sequence
gtaaatagccatatacaaaaaaaatccatccaaagatactgctcttcagatggattccctaaattttcaatattcccttgatttcttttattttttcataatataagtgatggcgtcctggatcctttttacaaacaccagttgaatcccttctggcttctccacagaggttttgcacacttccggcaggatcactgtgtcaaaccccaactttttcgcttcttttaccctttggcctgccatactcactgcacgtacctctccagaaagcccgatctctccaaaagccatcagaccgtcaggaattacaatatccttcacgctggaaacaatggcaaggcagatccccaggtcaatggccggttctgtcatcttcattccgcctgcaatattcacataggcatcactggaagccagatgcaggccaaccttcttctcaagaactgccattaaaaggtttaccctgttaaaatccgtccctactgcagtccttctgggaatcccgaaattgctttggcatacaagtgcctggatctctacaaggatcggtcttgtcccttccatggagcaggccactacacacccggaagcattctcaggccggccatccagaagatattcggatggattggccacttcctgaagtcctgattctttcatttcaaaaacaccgatttcattggtagaaccgaatctgttcttcactgcccgaaggatacgataagaagcatgtctgtccccttcaaaataaaggactgtatctaccatatgctccagcacacggggtcctgccacatttccttcttttgttacatgacctacaataaaaatcgtgatcccaagccccttagcgatctgcatcagcacattggtagactctcttacctgggaaacactgcctggagcagagccaacctcctccgaaaacatggtctgtatcgagtcaatgatggccacctcaggcttcagcctttccatcacctgacggacggtatccagattcgtctcacacagaagctgcattttgtcattaaaggtaccgatccgattggccctcagacgaatctgtcctaaggactcttctcctgatatatacaggacagaattaccatcctgagaaagattcctgcacacctgtaaaagaagggtggactttccgatacccggatctccacccacaagaaccagagagcctggcacaataccaccgccaagcactctgtctaattcccctatctcggttgtttttctttcgtcttcgtccagccggatatccttcagaagcattggctctgccctgcctgccagtctgccggctgttactccggtacttttcctgactgtggataccggctcctccacaaaggtattccaggccttgcacccaggacactgccccatccattttgcagactcatatccgcattcctgacaaaaaaatacaatctttttattcttcattcttttaattaaattctttaattcaacttacttattcttctggttaccaatcagcttgcctgatctgaacctgtctctgattatctttttacaatctttacagccacttttgctgcattgccaagctctacactgaaagaaagcttgccgccaagattggtctcaacaacacctgtactggcatcattaataaaaacctcatatctggtctcagcttccatctctactgtgatctgtgcgtcttctgcaccttctacagtaaagctcatgatactgccatcctgcttcaggtcaaacactgctgtgcctggtactgactcataaacaaacatgccatttctctcaagctttgtgatctctttaaatgtctttactttatacatgtcgccctgatgctgataatctgataattttgacttctggctcagttcataatctccaaaactgatagtgccattgtcctctgtgcggatcagttcttttactactgccatgactttatgtcctccctaagactcttttgttgatccagccggtgataaaaatacttctccggcgatgctctgattatataataaatcctcttttttgaccagtctcttaagtgaaatattatccttttttcactgtaaaatgaacctgtttgtttttcatctgtacggaaatcagatccccctgatgaatcctgccttccagcacctcattggccagcggatcctcaatctttgtctggattgcccggcgaaggggtcttgctccatacttactgtcaaatcctgattctgcaagatagtcttttacagaagcagctacccgaagggtaatattcatctgctcctggcaccttttttccagttttttcagaagaatggaaacgatcttctgaatatcttccttcttcagagtatggaataccatgatctcatcgatcctgttaagaaactccggtttaaagatcttacgtacctcttccataactccggctttcatccgttcataatccttttttccatcctcctctgagataaagcctaaccgctttggttcaacaatagcctgtgcacctgcattggaagtcataataataatcgtctgtttaaagtccacacgcctgccatgggcatctgtaatatgtccgtcatccaacacctgaagaagaatgttgaatacatccggatgtgccttctcaatctcgtcaaacaagagcacactgtatggattcctccgaaccttttcggaaagctgtccaccctcttcatatcctacatatcctggcggggagccgatcaatttagatacgctgtgcttctccatatattcagacatatctacccggatcatggcctgctcactgccaaataccgcctcagccagtgctttggacagttctgtcttaccaaccccggtaggcccaaggaacagaaaagaaccaatggggcgattaggatctttcagtcctacacgtcctctttttactgcctgggatactgccgccacagcttcctcctgtccaatcaccctcttatggagttccttttccaggcgtgcaagacgtttgctttccccttctgtcagcttctgcacaggaatcttcgtccactgggatacaatatccgccaccgtcttttcatcaaccaacagttgttttcttctggctgccttttgtgctttttcctttcgtttttcaaaagaagcttccagctccttctgctgtttctggatctctcccgccttcccaagatcgccggcctttactgcatcttccttctcctggatcaattcctgtatctgcctttgcatttcttccagctcaggagcagtctgaaacccctgcagctgaacccttgaagctgcttcatcgatcacatcaatggctttgtccggcagaaaacgatccgatatataccggatggacatttcaactgctgccttaagtgcatcatcctgtatcttcaccttatggtggcgttcataataaggtctcaggccttttaagatctcaaaagtttcttcttctgtaggctcttctacagtcactggctggaatcttctttcaagagccgcatccttctcaatatattttctatattcttccagagttgttgctccgataatctggatctctcctcttgaaagagaaggctttaggatattggatgcgtccagggcaccttctgctccccctgccccgatgatggtatgaagctcgtcaataaacaacaggattccctggtgctcccgtacctcatctacaacaccccggattctttcttcaaactcacctctgtatttgcttcctgcaaccatgccggaaagatccagtacaaccacccgtttgtccttcactgtatccggcaccatccccagaacgatcctttgtgcaagcccctctgcaatggcggtcttacctactcctggttcacctaccagacatggattattcttagtccttctgcttaagatctggatcagacggccgatctccttatcccgtccaatcacaggatccagcctgcctgctgccgcaagctctgtcagatccctgctgtacttgtcaaggacaggtgtggctgatccattaccaatggaaccggccttgcctgatcccaaattgtcattttgaagatcaccttcatatcccatagctgtaagcactgcactgtacagcttctggatgttgatcccaagggtataaagaagtctggtggccacacagtccgtctccctgagcagtgcaagtagaaggtgctcagtacctgccggtccttcctgcatctcctctgccagatccagcgcctcctggatcactctttctgcacgtggactgtaatgcttttccctaatctgcacatttctgctttcagcaggaggtgcaatcaacttctgtatcagatccagcagcttctttggctctacatggaattcctccagaactttccctgcagcaccttccttctctgccagaagtcctaaaaggatatgctctgtccctatatatccgtgattaagatccttaaccacatcctccgccagtgcgagggcattttctgcctgtctggtaaatctgttatccataaatgtcctcctgaacttatatatattcgtcaaaaatctcatcaatcagctgatgcacttcttgtcttgttacatttttgcagcttcccctggccagtgcaacggtaagcttttctttcatttcttccagtgctttcactttatctgcatctacacagatcactgcccctcttctcctgtcaatggatacaaagccttcctggcgcagcaatgcatatgctttgttcactgtatgcatattgatcccgatggtatctgcaagctgccgcacagatggaagtgcatctccatccttcagtcttgatgtagcaatccccataatgatctgattagtcagctgcatatatatagcttcatcactgttaaaattaatctctatgatcactgcttctgcctcctgtgttactgttatatctatactagcacaaatcccagcatttgaaaagactaaaaaagagatgctgcatttggcagcacctcttttcacaggtaagctttctttaccgtttcaggatcttattcagctgttccttatcaaggatcaggttaattcccattggatttactaccattgcctttgcctgtggaatcagcacatccggcagctttgcaaaaggcactctggctgcacgcagctttttgcccttggcaaatttctcaaactccataatatcagagaatgcaggctgaagcacatccccttctttattcttcaggaatgggatatttaccttatgaggatcctccggatccttatccatagcgatcaggaagtcagatttcagaaggtttgcaatcaactcttcttccagttcgcgcatattcttccgttcttcctttttcacaggacggcgaagctcctgcataaaataaattcctgacaactgaagggtagaattaaacaaaggccttttggcaggctccagcttgcttaaatctgcctgttttgcaatatccgtcaggtctacctctgcacggtcctccccatctgcccagatcacagtattaacacctatggcatacaatgttccgtaaaatctggggaaatcctttttttcgtacttcattcccatcagaaggattttatcttccagttttttctttccaaattctttaatgccttcttctgtggaaaatacccatgcctggtcattaaagctttcctcatcacaggtaacatatggaagctttgtagcctgtgaataagctacaaatacaacgtccctattctgcagttgtttcactgcatctgctttgtttcccatttcttatcctttccggcagtgatttgcacactgcttatcttaccataaattctacaatcttatccatctcttccagctggtctgcttttaatgcagacttcacagagagacatggctccataatctccatattcttcatctgggacagcatctcacgaatctgcttcccggctgtggcagcccatgtaccattatcaaacacagccaccttacgattctggaaattgtgagctttcagttcatgaagaagtgtctccatcttagggaatatacctccattgtaggtagggcatgcaaatatgatcctgtcacaacgaaatgcttcagacagcagataagaaggatctgtaacagaaacatcatacattgcaatattcttctcccctgcatcagccagcttaccggcaaggacagcagctgcattctctgtatttccgtagatagagccataaagaaccagcacattatgatcctcaggtgtatatgtgctccacttctggtatttgtcaataaaccagccaagattttctctccagaccgggccatgaagcggacagatcatctggatatccagggtaagagctttctttaatgcagcctgcacctgtgcaccgtattttcctacaatattagtcagatatcgtcttgcatcctccagccactggttttcaaagtctacctcatcagcaaaaatattaccatttaaagctccgaaggtaccaaatgcatctgcactgaacagtactttgtcgtatgcgtcatatgtaaccattgcctccggccagtgaaccataggtatcatagcaaaaaacaaggtatgctttcctgtgcttaaggtatctccctctttgatcataacagcacggctatctacattaagatcaaagaactggcggatcataccaaaggtctttgtatttcctacgatcttcacttccggataacgaagtacaatatcagcgatcagtgcacagtgatctggttccatatgattcacaatcagatagtccaggctgcgccctgccagcacatgctccagattctccagaaactgtccgcttacagatctgtccactgtatccagaagtacagttttctcatccagaagcacataagaattataagaaacccctcttgggatcggatacatattttcaaacaaggccaatcttctgtcgctggcacctacccagtataaatcttctgtaactttcttagtacaatacatccccattcgctcctttatgcctcgtcaatggcctttccaatgtcatgacgcatatacttgttagcaaactgaatccattctgtcgcttcataagcattctttctggcttccttcaggtcttttccttttgctgtgatgcccagcacacggcctccgttggttacgatctgtccatctttaaaggctgtacctgcatggaaacagtagtatccgtctttgtccttaaaattctcaaagccctggattggaattcctttttcgtattttacaggatagccctcacttgccagaaccacacatactgctgcattgtcttcaaactgcagatctacctgatcaagagtaccattaatgcaggcttccatcacctcaatgatatcatttttcattctgggcagtaccacctgggcttccggatctccgaatctggcattatattccagtacctttggcccatcctctgtaagcataaggccaaagaaaataatgcctttaaattcccggccttcttttgccatagcatctacagttgcctgataaatatattttctgcagaatgcatctacttcatctgtgtaaaacggacttggtgaaaaagtgcccatgccgcctgtattcagtccctgatccccgtcacaggccctcttgtgatcctgtgcagaagtcatagtcttaatagtcttgccatctacaaaggacaaaacagatacctcacggcctgtcataaactcttcgatcaccatggtattgcctgcattgccaaatttcttatcttccatgatctcacgcacaccggcctcagcctctgtcagatcctggcagatcagtacaccctttccaagtgccagtccgtctgctttcagtacaatagggaattttgcctgcgttttcaaataatccaatgctttcttcggatcatcaaaattctcatatgcagctgtaggaatatgatatttcttcatcagatccttggaaaaagccttggagccttccaggatcgcagcattcttccttggtccgaacactgccagtcctcttttttcaaaaacatccacgataccgccaaccagcggatcatccattccaacaatagtcagaccgatctgattctcctgtgcgaaatcagccagtttttcaaactccatagctccaacggaaacacactctgccagttctgcgatccctgcatttcctggcgcacagtaaatcttatctacctttggactttttgccacgctactggcaatggcatgctctcttccgccgcttccaacgattaataccttcattgcatcctcctgttgtccctttgggacactgtttcttctgtctgcttattattcactgatggttacaattccgttctccactgtgaccctgccatttgcgatcagctggatggcctttggaagaagcttccattcagcccgctccataactcttcgctgaagtgtcttcggtgtatcgtccggttcaacatccactgctttctgcaggatgatagggccggtatctgtacctgtgtctacaaaatgaacagtagcgccggtaacctttacccctcttttcagagcttcttcatgtacatgaaggccgtaatagccaacaccacagaaagaagggatcaaagatggatggatgttgatgattctgttagggaatgcttccacaatagaagatggaatggccacaaggaatcctgccagaaccacaagatcgatctcagcttcctgaagcgttctaagaagtgcctggtgaaagtcctctcttgtatcataatcttttggagaaatgcataccgcagggatctggtgatcctttgcacgcttcaatgcatatgcccctgcattgttgctgaccaccagtgccacctgggcattggtgatcttccctgcatcctgagcatccaggatcgcctgaaggttggtgccgcctccggataccagaacgcctaccttcagcataatgttactcctttttcgccagcttcaatatggcctactacatatggctgttctcccgcttctttgatagcggctaccgtcttatccacatcttccggtgctacagccacaaccatgccaagtcccatattatatgtattatacatcatctgctcttcaataccgcctgtacgtgcaagaagactgaaaatcggcggtacaggatagctgtcttttttgatcactgcacgtgtaccctctttcagcatacggggaacattctcataaaaaccaccgcctgtgatgtggctgcatgcatgtacacgaacgccagcattcttaatactctttaatgcttttacatagatcttggtaggagcgatcaaagcctttccaagagtggtgccaagctcatcataataggtatccagagattcttttgtcatgtcaaatactttacgcacaagagaaaaaccattgctgtgaacgcctgaggatgccataccgatcagtacatctcctgcatttaatgcttctcctgtgatcaggtcttttttatctacaacacctacagcaaaacctgcaaggtcatattcatctacaggataaaatccaggcatttctgctgtctcaccgccgataagagcagcatttgactgctgacagccatctgcaacacctttcacgatctgtgcgatcttttccggatagttcttgccacaggcaatataatccaggaagaacagaggctccccgcctgcacaggcaatatcatttacacacatagcaacacagtcaatgccaacggtatcatgctgatccatgataaatgccagttttaacttggtacctacgccgtctgtaccggataccagagtaggctcctccatatccttgaaagcgttcatggaaaaggcacctgaaaaaccgccgattcctccaagcacttccgggcgcattgtctttgcaatatgctgtttcatcagctctacagacttgtaccctgcctcaatatctactcctgcgttcttgtaatccatttttctcttcctcccagattaatattctttacatcctacttcctgaagtcttgcgtcctttgcttctacctggctctttaactcctggctgtatgctttcagcttatctaaaagctgtggatctgatgtagcaaggatcttcgcagccagaaggcccgcatttgcgccgccgttaatagcaacggttgctaccggaatgccggaaggcatctgtacgatagagtacagggaatccctgcctccaagagatgtggtatgcatcggaataccaatgaccggcatagggaatatggcagcacacattcccggaagatgggctgccattcctgctcctgcaataatgaccttaaatcctttttcctctgcggattttgcataatcaaaaaacacatccggttccctgtgtgcggaaatgatcctcatctcataatcaattcccagtttttccagaatatcagctgcctttttcatgacaggcatatctgaatcactacccattacaattcctacttttgacatgatcttctcctctcagcctttctaaccgtaaattctactaagaatccctttttctgtcaaccaggaaaagggattctttgtatttgtcaatgaaatggctcattcagcatttctgttccttccagaacaaaacggccgtcttcaatgatagaaaccatatcaccatcatcctggatcacccggatactgcccagttcctcataagggatggtaatatctgtgtgacagccataatatgccagtgatacatcatctttacgcatttctgaaatttcattatcccttgctataatctcttttccatccggattatacaccggtgtatcctctgcccagctataacaggtatcccccactgcaaaatgaggtcccattttctctgcgatcagaataggaagcttgtcctcaatcccgtattttctggcagctacgtaagcagtggtattagtaccaatagcaaactcacccatagcaagcttgggatgatgaaacaggatgttgtcctctatatattttctgttgtcttcttcattctcaaaattactgcaggtataatcgatcacctggccacaatcaaagaccagcttcaggtcacggaactgcagtccattcagataaaccttagtcacatgaaggatcccaccggttcctgcaagcacaggagaagtaaacacttcgcctacaggaatatttacatcagccacacaattttcaaagttggtctgtgtttttggatctgtcagtttatgaagatggatcaggagatctgtctcattgtctcccttccccttaatctccacccactcacaggtatccagagtgtctatgatcttctgctgcaccttctggtaagcctgatagtccagagtattgatctttacaatctctctgaaaatgtcaggataatcagtaccgatctctggtaccggataggcaatgatcgtaaagctgcgttcgtctccgtggatatagcggtttacgatctgcccggactcattggtcaattccagatccagcttatgctgtgcctcactaaggctccatgcttccggcttgctttccggtgaaaaaggtgcttctccaaaggtctcgatcactgctggacctccgtgcactgctgccagatccttatactgttcatatgcattctggagtgcccgcagccttttctgaaggtactccccatcaagaaacagcgcataatcctgtctgtgatcataatcatactgaggattaatgaccccgccggtatatccgatccggctgctgcctcttttacaggcaacatgaggcgtgtgacgatagatcacaggctccaaccccatcttgcggaactgtaaaattgcagaacgtaccattctttcaaatccaagattgtaccggatatttacagttttctttttggtaatatcttttcttccattaataaaaccgatcctgtatccttctgtataggttcttgccattgcatcgatctcttcctgaggaagggtattcaaaaatctggcactgcccagctcgttttcggaaatatattctccgaatctgtaaagataagacaaatctgaaaggtctgcttccatgatgatctttactgcaaaattcatttccggatccagggaactgcgtacatggtgctccatcatatcctggcagtaatcatttacataggaatacaaaatccttcgaaccactttttcttccggtatttcttcctggtcaaaagcggaatatacttccaggaataattccagagccactgtcatctcccaaagatccttctcatgggcataaacaatagctcctcttaattctccataaagaaaagtgaaatccttgccatattctcccagcattttctttgcataggacgggtttccatagcttacattataattatcacctgaaatatcctgatatagcatctggtttctttcttttaatgcttcaaaagaaaggccatctcctttatcatccatgatctgtatggtctttataagaaaatctgctgccttctgaaaaaaatccagatatggctgtgccacagcctgttctcccggtatctgggaaactctcattttggccaactcatatctttctatcatccactcgtccaacttttaactcctatcgtctatgatatttcctttattaatattctcctggatcagttcctgcatatattcccagatctttgctgatccatctcctgtaatacggtttcttttataaatctggcttctttttactttatgttccttccagctgatcccaccggctgcatgatttaaaaataaaggcagactgttatccagcacatgggcaaatttggattccggtgtattgcaggcttcaaattcatcccacagtcctctcatccatgtgccctgttccttaggaagaataccgaagatccggtcagctgctgctttttctcttttttccttagtaagagccccagcctcatcatatgcataagtatctcctgcatcgatctctaccagatcatgggtcagaaccataggcaccactcgtgtcacatccactttttcattggagtattcactgaggacaagcgccatcatagctagatgccaggaatgatcggcgtcattctctcttgctgatccgtctgccagataattctgccgcaggatctccttcattttatcaatctcaagaataaaatctatctgttcttttaatctgtcatccatactgatcattatactcctgtcagataaatcccaagccagagaatcataataatcccgtttgtgatggatccgataatgcttgtcttatggcctttgccagcctctgaaaagctgagcagtcccatgataaatccataaatagacaaaagtgctgcaaataaacatactccgccagttacaaatccatactgaccttccagaagaaaagctgcagtcactgccccacaaaacaggatcagggagatcactgccatagtaacagagaccttcccttttccagcttcctttttctttgtaaatgaatatctatatcttcttgccatagtattttctcctgatatgattgcagatcaggaagcacccatagcctaccgctgatccaagtgtgttcagaataagatcatccacatcaaagcagcccacttttgtcaccagctggatcagttccactgtcagacttatggaaaatcccgaaaaaataataagaaaaccgcttctcatacggtttgtgatcacaggaaggataaatccataagggataaaaccgatcacatttccaaatatattggtaaacaatgcaaaagtacccagctgcctgcgataaacccagaatctgcgaatttccacaaacggtataagattataccggtatatccgttctacgtctgcaactctgccgtaagactcagaaaagaacaggaagtatatcagcaggatcacatatattccaaataaaatgaccccgccttgtctgatcatacgctttgtttcatttttcaatattatcccctgcctaaaagtcctgcctgaaatttgtattacagcaggatttctgattttcttttcagaagccttgcgccattaatgatcatcagaactccggtaacaacccccgctattgcagcaataataccaagaatcagactggaaacccctgtagcagacatagtcttatatattttttcattcatggtcaaaacctccttttattctgcgccatactgctgataatatgcgtcaatggaagctttcaatgtatcatcaatgatcacttttcctttatattctttattgtacagatgctctaccacctctgccatggtaacaatggcagttgtttcaagtccatatttctcctggatctcctttaaagcactttttgttccctgaccacgttccatgcggtctacagatacaaccagaccgatgggatttacatcgccctgtgccttgataataggaagtgtttcctggatagatgtgcctgcagtagtaacatcctcaatgatcaccaccttgtccccatcctggatcggactgccaagaaggattcctttatctccatgatcctttacctctttacggtttgaacaataacggatatccttcccgtattcttcgctaatagccatagtagctgctactgtaaggggaatccccttataagcaggcccgaacagtacatcaaaatctagtccgaacttgttatggatggcttttgcataatactctcccagcttgcgaagctgtgcgcctgttctataaaatccggtatttacaaagaaaggggtctttcttcctgattttgtaacaaaatctccgaatttcagcacattgcaatcaatcataaattcaataaattcctgtttgtatctttccatagcaatctgattcctccatattattccacacatccaatgatctcaccaagatcctggatcttctgtttttccataaatgcctgtatcccttctgcgatctggatcgtagcataagggttaaagaaattagcagtacctaccgatacggcagttgcacctgccatcagaaactcaatggcatcctctgctgtggcgatccctcccataccgatcactgggatctttactgcatgggctgcctgatataccatacgtacagccacaggctttactgcagggccagacataccgccggtcttattagccagggcaaatgtacgccggttaatatcgatcttcatgcctgtcagtgtattgatcagggatattacatctgcgccccctgcttctgctgcttttgccattaccgtaatatctgttacgttaggactcagcttcatgatcacaggctgggcagcatatttcttcacttcttttgtaatagcttccaaagcctttggatcctgcccgaaagcaatgccgccttccttcacattggggcaggaaacattaatttccaacatatccaccggctcactggccagccgttccactacttggcagtaatcttccacagacctgccacatacatttacaataatctttgtatcataattcttaaggaatgggatatcccgctcacagaaaacatcgattcctggattctgaaggcctatggcattcagcatgccgccacaagtctctgttaccctcggcaccggattccctggccagggcacatttgccactcccttagtcaccactgccccaagcttgttcagatccacaaactcactgtattcactgccggatccgaaagttccggaggcagtcattacaggattcttaagttccaccccagccagagtcacttttgtattgatcataattctacctccgtactgagaaatacaggtccatctttacatacccgcttattatgcacatgggaatggtcatccacttctgtagactggcatacacagccgagacatgctcctacaccacaggccatacgttcttccatggagatccagcagggaatctgatgctccagcgcgtacgctttaatagctcgaagcataggctttggtccacaagcaaagatcacatctgctgcaagctgctcttctctgacagtatccaaaacatttcctttgataccggcagagccatcctctgtagccacgtaaacctttccataatcttgaaactctttatcaagaaacagctgatccctgtatcccagtacagctgtcacatctgcctctgtctcttttgcagtctgaagcataggtgggatcccgataccaccgcccataagcagaacttttttcccttttgcttcccccaggggaaaaccattgccaagaggcccaagtacaggaatggtatctcctggctgtaatctggaaaactcttctgtaccagtaccttgtcctgttactctgtaaacaagtcttagcctgcccttttccttgtcgatctgacacagactgatcggtcttggcagaagcttactctgatctttacaatacagggatacaaactgccctggtactgcttccgaagcaatctcttctgtctggatccacaagctgtatatatctgttcctatgcattcctggctgactactgtacagatttcttttgtctttttactcatatgctttcccctatcttccctcaagtgctgtactaatatccaggatcatatccttcacagcctgacgggaagcctgtgcatatccctcttcaccaaaagatgcatatttctcctgcttgtaagcagcaatgattcctctggaagagttcacaatagcgccaagtccgtctttgttaaagaagtgaaccagatccttgcctttaccgccctgtgcaccatatccaggtaccaggataaaggttttcggcatcagcttcctaagaactttgcccatctccggataggttgctcctacgacagctccaacatagctgtacccctctttaccaacagcatccttgccccactgatccaccttttcgccaacccactcgtacaaggggcgcttatcaatgagacgatcctgaaattctccgctggaaggattggatgttttcacaagaacaaaaataccttttttctcttccttgcatacatccacaaaaggctttacaccatctgttccaagatatggatttacagtagcaaaatcttcatcaaaacctgcataggattttcttccaacctgtactttgcccagatgtcctactgcataggcagtagatgtggatccgatatctcctcttttaatatcgccgatcaccacaagccctttagatttgcaataatcaatggttcttttgtatgctacaagtcccggaataccaaactgctcatacatagcaatctgtggcttcactgcagggatcagatcataaacctcatctacgattcctttattatactgccagattgcctctgcagccccttccaaagtctctccgaattcctggtaagcatcttttttgatctgctccggaatataattcagcataggatccagtcctactacaattggtgctcctgttttcttgattttggtaatcagcttgtcaatcatgatcttcctcctggtaaataatctttccatcacacagggtgtaaagaaccctgccctttacttcccatccatcaaaaggtgtattcctgccttttgaagcaaatttattcttgtctatcttataaggatgctctatatccacaaggatcacatccgcaggatgtcctttctggatcgtgccacagtccaaaccaaggatttttgccggattcaggcacatcttttccacaagctggcccaatgtaagcactcctgtttccacaagatgtgtataaaccagtggcagacttgtctccaaacctacaatgccaaatgccgcacttctcatagatccattcttatcctcctggctgtgaggtgcatgatctgtactgatggcctggatatatcctttcttcaatccttcacgtaaagcctccacatcctccttcttgcgaaggggtggattcatcttataattagaatcatcagatggaatatcatcagatgtcaggatcagatgatgagggcacacctctgcggttacattggtgatcccagcctctgacagtgccttcatcataaaagctgtccccttggtggaacagtggcagagatgcagcctggctcctgtctcgcatgccaagataatatcccttgcagcgatcacatcttctactgcattgctaatgcctggaagccgaagtcttcttgcattctcgtcatcattcatacacccgttcccacgcaggtcaatatcttcacagtgatccagcaccggcaggtcacatcttgctgctattgtcatggcttctttgcaaagctttgcatccattacagatttaccatcttcggaaagagccggtactcctgcatctgccattcctttaatatcagaaagctctttgccctgttctcctctggtcatggctccagcctgcagcacatggatctgtgaaagctgtgcagctttattttgtacataccttactcgatccggctcatcgatcaccggtgtggtattgggcattgtcaccacagtagtcactccgcctctggctgcagccctggatcctgtctcaatcgtttctttatactcctggcctggatcccggaaatgtacatgaagatcaactatgcctggcattaccaccagcccatccgcatcaatgacccgatcccctgcatcagctttttgcaagttctcgccaatctcctggatcacaccatcgtccaggtataaatccatcactttatcggtatttgtcgctgcgtcgatcacacgaccgccacggatcaaaacacccattcagatctctcccttctgagttgcctgttttcattccattcacagagttattccaaaatactctaagttacataatacacgaaaaataccatttaataaagccctttttcttattaatccttgacatttagaaaaaccggatatataatcaaaccatgtcagggattattaatgtaaaatcatcactagtttttagagattatatgattacatgatatagtctgtaaaatctggtgatttttttcgccagaactgcttttaactttttatttttatggaggtaacaagatgaacaagggaactgtaaaatggttcaacgctgaaaaaggttacggattcatcacaggtgaagacggtgctgatgtatttgtacatttttccgcaatcaacggtgaaggcttcaaatctcttgaagagggtcaggctgtaacttatgatcttaccgagggagctcgtggaatgcaggctgctaacgttacaaaattataattaattttgtaccctgtatactattgagtactgaccaacagcagaaagagaattttaatattttctgatagcagcaaaagtctccggatttccggggactttttgttgtccggaatcccaaatatatattgcctaacagccaaaaaggatagtagaatcggcagaaatctctgtcatatccactatcctttataatttcgtaattgttcagtactttcacaattaaaactttattcgcattacagcctgtatcaaagctctgttggtattgctgctatccgatcagcaggcaattatcattctgcatcagcagcgtcagtagcgatcccggaaaggtaatcatccagagcggaagtatccatctcagtatttaccactacttcttctttgccttcatttaccttgctgtatacagaaaatccgatccatacaactgcaactatacaaaacgcaagggcaatcagcttctcaagacgaagaacccttttttcttttttcatgattttttcacggttcgctttttcagctttgtaagcatccacttttttctggctcataatctatctcctttatatgctcactgcaaaatattatttctgcatattatagcacactcttaaagaaaagaaaagcctcaaaccttatacaacaacaataatcccgccatcattggcatacatactgctgactcccgcagtatccagaaccaggatcttcttaaggttcattttttcctcaagagcctccttcagcatctgggcacgctgtgcacagttgcaatgagaaatagccaatgttcgatttacactgtctgtggttacttcctgaatgtgttctaccatcttcacaagagccttattcatacctcttgcctggtcaagctgacatatggtaccttcctgagtagcacccatcacaggtttgatcttcagtgctgatgcaaccaatgccttcaccctgctaagacgcccgttcttacgaagagtttcaagattctcaagtacaaaaaaagtattctgctgtgaaatataatgttctaccgtatcgatcgtttgcttatagtccatccccttttcttcacattcctgaatctttaatgcgatcagggtttctccaaccgatgcagaacaagaattaaatatatggatcttcttgcctggatgcttttcttccaccagacttcttcccagcattgcactgttataggatccgctcagctcagctgataaagtaacgcaatacacatgatccgcatcacagtcgaaagccttcctgtatcgttccggtgatgggcaggctgactttggacattccggacaatcagccacctttttcagaaaatccgcctggtcaaaagtactatcatctatgatattctcatttccaacagtcaaagtaagagggacagattcaaatctggtatcctgcttccattcatctaaaagttctccgcaactatctatcacaatcttatagctcaattatatcgtcctcttttccataatatgtagtattgaataccacatctatattagcatatcatattgtatttgaaaagtctttttagaaaactctatcctttttttttattttcgtttataatgatgtgggaataggtatcttacatattatgaaacagaggattttcaatgattgctttaaaaataacagatcttcgagattttacgaacaaactatttataagagaagtatttgattcattctggttgaaccaggctgagattacaacttataatacattttctattgatgggaaactgcatacagattttctggacagtgaccagcttcagatactccagaaaagtgggcgcacctactccctttggaaagaaacaagacctttctgctggtccgtgatccgtggcaaacgcacgcctctttctttcaagatcgttcttcagctgtctaaaactcagacacaggctcttgcggctcaggccagcctttctgctgccccttctgccatcagtggactttatctgaatcttcagttcaaaaacaaaatcctgctatgtacaacagggacagctttcaacacatttattccagacaaacgtctggaacagttatgggacggtatggtactggactttttttcccagcatcaaatcatatttgaagagatgtaatctccggaggcagtttcgccattccgactcctgtttcagctcttcttcatcctttgtcatctttcacatgtgctttgtcagatctgctctttcagataatatgccaacatatcgacaaactcactgtttgtaggtttatactctaaagtgtaacctgcaatttcctgtatcttttcacggttgttctcccaacatatattaataacggtacgtatatcatgctccacatttacaggtgtgggcttaaatttccgtgccagacagggatatacatctttcgtgatccgtacaggcttttctgcgaatcccattgacaatttcactgcttctgcaacaaaataataacctttatactttgaagtagctccaagtgttctaatcaagccgtaaacctttctcataactctcctcctgtaaaacaatgtttcctttacttcttaccttggttcacacagtgatacaatacggcttttcttacacttttctggattctatctgaaagaatcatctgaattacaacaataacccattaatattatacacaacaactccggaaaaatatatatattttttatattttttttcaagtcgagcttgctgttactcaccacctgaaagaagcgggagtcttctcgactgagataaaaaaaatcgctgtctctggtacagatataatatatcttgtaccagacagcgaccttcttacggctttattaagcttctgccagtttcagcagaatatcattgcttctcttaacaaattttgtcatttcttctggtgaaagctgtttatggctcatcattgccagatcatacagctgttcacagatcatggatgtattctccccatctgtatgctctgccacatactgtaccagcggatggtttgcattcagaattagggtttcctgaccgccaaacatggacggatccatgccatacatattatacattttcatcatatcctgcatacggcggctttcctcagacaaagtaaccattgctgcaacacccgcatttttcagcttttcaacctttacttccaatttatctttcttaaggcttgtacggaagatatctgtcagcttctttactgtatcttcgtcaatggcagcatcttctttcatctcttcagaaaggtctgcatcaattctcttaaactgtacatgctcatctttctgctccagatgagtgataaacggagcatcaatattatgtttcatgatcacagcatctttgcctgcttcacggaacatattgatatactggctctgctggatctcatctgtcacatagaatatggttgtcttttccggctctttcttatcatcagcggattcttctttcttctcttctgcttcttttgtatcttcagccttctcttcaacattctgatcttttttattttcttcaatacaatccttcaatgtaagatatttcccgtcaatattcttgaacagaatgtaatcatgcattttatctgcaaatttattatccttaatgcagccaaatttaataaatggactaatatcatcccagtatttctcataggattctctgtcggtcttacacataccggtcaatttgtctgcaacctttttggtaatatattcagaaattttctgtacaaatccatcattctgaagtgctgatctggatacattcagaggcagatccggacaatcgatcacacctttcagtaaaagcaggaactctggaatcacttctttaatattatcagcaataaatacctgattattataaagcttgatggttccttcgatagaatcatactctgtattgatcttcgggaaatacaggataccttttaagttaaagggataatccatattcaggtggatccagaacaatggctccttgtagtccataaatacagtcctgtaaaactctttgtattcttcctctgtgcattcatttggatgcttcatccacagtggatggggattgcttaaggatactggacgtttgttaatctttaccttatcctttgcaggagaaacttcgacaacctctttctctcctttatcattttctttctcttcagtcttagcatcttcatgaatatgctcaacaactacatcatcctcacgaagctctgactcatcaatggtttcgtactcctgctcctgattttccttagcaagataaatatttaccggcatgaaggaacaatatttctgaagtacttcacgcatacgatattcattggcaaattctacgctctcttcattcaggaacagtgtgatctctgtaccaactgttgtcttatccccatcctgcatatcatactctgtaccgccatcacatgtccaatgtacagctgtggcgccctctttataagaaagagtatcaatatgaacctcatctgcaaccataaatgcagaataaaatcccagtccaaaatgaccgataatctgatcatctgtagtcttatccttatactgctccaggaactgggtagcgcctgaaaaggcaatctgtgtaatatactcttctacttcatctgcagtcataccaagaccattatcaataaacttcagggtcttcttttccggatctacaataatatggatctccggcttgtaatcatccggcaatgtatactcgcccattacatccagtttcttcagcttcgtcactgcatcgcaaccattggaaaccagttccctgacaaaaatatcatgatcagaatataaccatttctttataattggaaaaatattgtcactgttaattgataaactaccatgcttttcagccatgtagatcactctcctttgatttttactcttatgcaatatatactaatactcttcttttcaaaagtcaagaaaaatttagcactcatgtaagttgagtgctaacagttggctttatttcataaaacagcaggctttttagggaatcttattattccctaaaaagcctgctgacaacatcactatattatgaaatcattttttcttttttctgtatacaactacaccaatgatgcagatcactgcaaccaccagaatgatcacaaatgtcatgatcggtgtgttatcaccggtacgtactgcatttttctggttagcatctgtacggttcgctgccggggtaagatcctggccatctgcctgtgaaacattgaagttgacctgcttagcatcctgtgcacctgtatttacccagttacttccatcgtatttctgctgattgaatacaactgtcatagtatagctgcctgccttagccattctgaatgtagctgaataaggagcctgctcccactttctttcttcaagaaccttccagcttgccggaatatatctggtatctccggttccaggatcggtattattcatacctgcaccatttgctgtgacggtgatcttggtcgctgtagtataagctacgttaggatcaatccctgcaatagtatttccggatgggtctgcaagcactgcagaacgtccattcacacttacttttgcagaaacaatagtgctgatctgatcaggattggtcacaccactaggtaatttcactgttccctttacggtaaatgtctgtgcatctgtgctgtccggatcataagagctgccatttacatcccatttaacggatgctttcatctttccatttgtagtactgatgacaacagtctcaggaagcttcagagccttagcggatttcttcgtaccattggcaagccctgtaatttgagaaggtttggtaatccctgtcagtttaacctctgcttttgcaactgtaaggattgcctttacacttgtctgggaattatcgcttgctactacaatatcctgatcaaacagtccttctgcaagacctgtcttaggtcttacagtaaaggttgcactctcacctggtgcaagtgtcactgctgaaagagcacccacctcaaaatcaccacctgttggctgcttcagattgatggttgtattaccttcattctttacagtaactgtgccagcctgtggtgcttctgtataaccggctttcacagtaccaaaatcaactatgctgggatttacagataatccaaatacatctgcctgtgccacagtcaaagaaagtgtatatgtgaatacaacatttccatcattcaatacagacacctgacctgtataggtaccagctttcaaccccatcttcggctgaactgccagaatagcagactccccacctgctatagaagcctgtgaaagagctacagtaaatgcattctgtcctgcctcatcaagaacagctgtcagattcgctgctgcatttcctgaattgcttactgtaacagactttgcatctggtgctgctgcatatccttcttttacagaatcaaatgtaagagtacttccgcttgccggatctgctgccagactcgctgctgccggtgcattcactgtaagggatacaggataggtagcaaaatccactccattaacctgtacagtcacattaccggaataagtacctgctgtaagaccagctactggctgaactgtcaatactgaaggttctgccgcgcctgctgctaaggtatctgctgaaaatgctgctgtaaaagctgcctgtgcacctgcgtcaagcactgccgtaagctgtgcatctgctgtgccggcctgattgttgaagcttacagtcttccctgctggaagttctgtatatccagctgtaacaggatcaaatgtaagggctgttcctgcagccacatctggtgtcacagaaggtgccggatcagttttctgctgatcctgtggtgcatttgtatactcaccatttccatctgttacctgagctgcttcattcactgtgaaatctgcttcaaaagaagcctgtgccccttcctcggtagtataggtgatcgtatctttataagtaccagcctgtataccctctcttggctgaacccatacatttacagattctcctgctttcaaaggctctgtaatgtcctgtaccataaagtgctccggtgaaacactggtgaaattcaaatcgcctgtgcctgtattggtaatagtcacatactgctcaccaggaagctgtgtatatcctgcctctgcactgccaaaatcaagtacaccagtgctgttatccatagatacttctgcactgtatgtcagttccggagcatctgcatctgtagtctccggaatattaagagtctcttcattattgatctggatcgcactgttgtctgtatctgccggaatattctgggcagctcccgtagtgccgtcatcagaagcctctgggatgtttgcatcctgggtatcatccccagcctctggaatgtctgtatcctgggtatcatccccagcctccggaatatttgcatcctgggtatcatccccagcctccggaatgtctgtatcctgagtatcacccccagcctccggaatctgtacatcctgctgtgtaaggtcatctccatcatcctcatccggagcaggagtctcaccctctgccacaacctccacactaagtgcctttaattcacctgtaaaaccaagttcttcatttcctgtaatcttaagctggatcctgttgcccatatcttcctgtaccagggtgtacgttttctctttacccacctcagtcagttcatctccagtctttcttgaccactggaatgtaacatcctcgtctgtaatcccttcaggaattacctttttatactctgctctgagcacacttcccacagaagctgttcctttgatcttcagctttccctcaagcttcacagcctgtgcttccgatgcaaatacaagtgacggaagtaacgaaagagccataagcattgccattagaacagataaaatctttttgggtttcatatgccatcctcctttacattttatgtccggcaaatcatatcactaattctgatccggatatatctgctgttttgttttctatatgtattatagcagacttttttttcttcatgtaaaatggatttacctgacagtttcacccttctacgatcaaatatgttccatcaggaagaggaaaaacttcactttcttcttccagttcttcatctgaaagtccatctacatctgcgcccattccggacagatatacttttacatccttgatggaatctaccacaaccgccatgcagtcttccagaaaagcctctgcctcttccggattctctgctactggttcatcaaaaagctgtccctgtttttttagaaatatgttaatgcattcttctgtatacatattattttcctcctgctgttcagttttctatttagttgtgtctcctgcttgcatggaattatcttctcgccggagtaaggggaattttctctatatttccctccgactgaagaatagcctccaacaccggctcttctctttctgcctcaaaatctgccgaagcacgtacccccggcttggaatgtgccatggcaaagctgtattttactgcccgaagcatttcaatatcattgtattcgtccccaaaggccatacactcatctgctgcaataccatacatatcctgtaaagttcgcagaccaatggctttatttgtctgaaaaggtataaaatcaatccataccgttcctgacgtcacaaccttacaacgatcactgaaccggttctgccagtattttatacattcatctgtaactcctgccggctcatatactgccattttcaaacaaggaagcgtgatctcctccacacctttgatcaccttacagtcacatttcaccacattcttgagcagattgtaatattcctctgttttcggctgaatatagtaaaaatcttttgtagagcaagagtattctgcaccttccttttcatttactgcctggatgatatctttcatcaggtctgagtcaaaggtctcctgatacaggatcttatcatcttttaccaccaatgcaccgttttcacatataaacgccatatctgatacaaccggggcaaacagacgtctcatattcgcatactgtcttccgctggcagcagcaaaaagaatccccgcttttttcagtcttggaatcagatcaaacattttctctggcagatcctgcgctccgtttagcagcaaagttccgtccagatcacttgcgatcaatttaatcatcttttttctccctgtaaattttccatatatctttcggtgtttcaagcagaagatctgcaccgtttgcaatcaattcgtcttttgtgcgatatccccaaagcacacccaccgtcagcatgccagccgcttttcctgtctgcatgtctgtgccagtatctccaaaatacatacattcttctggctttacattcatgatctgtgctgcttttaaaggttcatccggtgcaggtttcctacgaatctgggagctttgtccgatcaccacatcaaaaagatccccaaacagttcctctaccacttttacagaagcaacatgtggcttgttagaacaaacagcaattttaaccccagcttcttttaacgcatttaaagcttccatcatatgcggatatacagaaaccttataaagtggatcctggtcaaacctttctctgtacatttttcttgcctcttcataatggtccagctgaggatctcctgcatcttccaaacatctgcgaaccagcatatctgccccgtccccacaataatatttaaatttttcagtaggaagttctctaagtcccaattctgtaagcacctgattagccacagtcgccattgaatccagtgtaaatgccaatgttccatccagatcgaaaatacacgcttttctcataatctcatcctttcagatttatccccatttttttcgtttcgtataaaagccgtccaacaggaaggccgatcacattattgtaatctcccttgatctcttttacataaatcccgaaagccccctggatcccatagcttccagccttatccattggctcgcctgtttttacatatgcctggatttcttccaaagacaccgggtagaacgtaacatctgtacattcccagaacgtattggtaagccactggccagcctgttttttgaaaactgtcacacctgtgtatacctgatgagtattcccttgaaggcaaagcagtgtttgtactgcgtcttttgcatcttttggctttccaagtatcttttcctgataaacaacgatggtatctgctcctataaccagagttccctcttcccaaaaatggctttcagccaccatctgtgctttctggaaggataactgttccaccgcttcccatgggatatctgtactgatctgttcttctcctgttgcaggaagtactgtaaaacttactcctgccagctgcagaagttctttcctgcgcggagatgcagatgccagaataatattatccataattcctcctgcaaattctttttcttcgatttttaacatgctatagtataccctctccctttctgccatgcaacttcttttatatttttcttttctttttcaggcaaaagtattacaatggacacattagaaatgagtaatctaatcacttggttttactcataatatgaaaggagtatatcaccatggcaaaaattaataaatactggggatttgtcgctgttggcgccctgacagccgctgctgctggtgctattgctgcagctgttttgaaaaatcgcacggatcttgaggattttgattttgatgatgaagactttgatcaggacgaatctgaagaaaagcctgcaaaggaatctaaagaagcattccagtcctgggaaccatctccaaacgatgaaactgaaaatgacgttacagccgcttcccaggaagatacagctgacgaaaccacaactgctgacaactcccaaccggaagcaaagaatgaaactgataagactactgatgctccccaggaagatgcagctgatgaaactacaaccgaaattcctgtggaataaataattcaggggatgcaggcctttaatacaggctgcatcccctttctatttatctttatgcttttggaagtttaaagctgctcttcaatgatacaatcctgttaaagacaggctgcccttcttttgaatcatgaatatccgcacagaagaaaccattccgcacaaactgatagctgtcatatccctttgcttccaacagtgcaggttccacataggcctctgctttaaccaaagaattcggattcaggttcagggaaccatcttctttattgtatacacccttttcctcatctacaatgttctcatacagacgaaccaggacttttcctgcatgggttgcttctacccaatggatcgtcccttttactttacgtccatccggtgcattacctcccttggtagccggatcataggtacaatgcactacccgtacagtaccatcatcatccgcttcaaatccggtgcatgtgacaaagtatgcattcatcaggcgtacctctgttcctaggaaaagtcttttgtatttcttaggaggttcgatcatgaaatcttctctttcgatatacaattcttttccaaatggtatcttccgattgcccagagcttcattctccatattgttaggagcatccagatattcaatctgatcttccggataattatcaatcaccagtttgataggatccagaacggccatcatacgcggtctttttaacttaagatcttctctgatgcagtattccagtgctgcataatcgacagaactgtctgccttggaaacaccgcaaagctctacaaatttcttaatagattcaggtgtatatcctctcctgcgaagacctgcaatagatacaagacgcggatcatcccaaccatctacaataccatcttctacaagctttttgatataacgtttaccagttaccacattggtaagatacagctttgcaaactcgatctgttttggcggatggggatactccagttcctctaccacccagttataaagcggtctgtgatcctcaaactccaaggtgcagatagaatgggtgatcccttcaatagcatcctcaatggggtgtgcgaaatcatacattggataaatacaccaggtgtctcctgttctgtgatgggtacgatgagcaactctgtaaataacaggatcacgcatattcatgtttggagatgccatatcaattttggctctcagtactttctctccatcaccatatttgccttccttcatctcttcaaataaattcaggttttcttctacagaacggttgcggtaagggctttcctttcccggctctgtcagggttcccctatactcacggatctgttcagcagtcagatcacaaacataagctttaccttttttgatcagctttacagcagcctcatacatctgtggaaaataatcagacgcaaaaaacagtctgtcttcccaatctgctcccagccaatggatatcttctttaatagaatctacaaactctgatttttctttggtcgggtttgtatcatcaaaacgcatattaaatttaccattgtattctttagcaagaccataattcaaaagaatagactttgcatggccaatatgcagataaccatttggttccggcggaaaacgggtatgaacagtatcataaactccctctgccagatctttatcaataatattctcaataaaattcttggaaatggtttcgttttccatcttttcccctcctattgctaatggtcttactttttcccgcttgtaagcatttttatttagaaaaaaagtccttgaaaatcaaggactttaaagctgctgacgggaatcggacccgtgacctccgccttaccaaggcgacgctctaccgactgagccacagcagcactgactgcaagctttttgccgctcacagtcaattatattagcagagaaccggttaattgtcaacacttatttttgcctggcatgcatatttttttatgcctgacacacatattttttgtctggcacgcatatttttacctggcacattaatttttgtctggcaccacttattttttcacttggccggaatgatcacatttcttacaaaatccgtgtgacttaagtattcatccgttacttttttattcacaaattccgcttctccgtcctgattcccagacagttgaaagtctacacagccatctgcagttatacttccatttttcacatttcgtatttcttccagcatatatctggctgttttttcttcaaaagcctgatactgcccggctggcacctgaaaacttatcatcacagaatactcttttttctcctggatcccaacctcaggaaaacgtacttctttgaacagagtatatgattctccatccagatcctggcctgcgactcccagaaagaaacatggcgttccatgcgcctttacgatttcctcactatgaatggtcttttgcagttttatagttacatactttacattcataatcctgaaggactgaagctgatcacttgcttctatctgacaggttactggttttccttttttataccctgtgggtgcttccaattctgtcaatgtgtaaaggcctttcggtatccggtagatcctgtatggtttttcaccggaaacccatgtttcaactactgttcctttgtcgtctgtcagttgaagttttgcacctgaaatcggctgtccggtacttttatcaacttttaggaattccgctttaatacaggaattttctaccaggatcacatgctccttctccccctggcacagccctttttcatcaatcacaaattctccggatatcaggtctccggcatagccttccggtatgttggtttcctgataacaataggtgccaggaatatatccacttaaaagtataagcccctgtgaatctgtaaaaagtttctgtcctgtttcctttccactatctttattccagaccataaaacctacgccctgtaatggtgtatactcattttccccatccagacgctcagatacttttttcagatatactgtggtcggactattaataaatacagcttctgacggctggttttcatatccggtgcttttcacttctacagtctggggagtcggatctgcacagtaacctgctggtgggtttatctcagacaccgtatattttccggcatataatgggtctgaaatccctttcccggatgtcagagtaagctgctgcactatcgtcccttcctccagaagtaaagctcctgccggagaataaatattttcagcagaccggatctcaaacagggctccaggaagttctttcccggcggcatccgttttacggatacagatttttccttttcccaattcttttaatatagtgtacaccggctgcgaaacagctgtcttcgcctgtgtatctgttttatgacaacttgtgactgatgcactattggaaatccggtaaaccagataattaccttctggtgtaggttgaagctgacttgtatccatcctgacccgtattttaaaaatatatgtggagccataaaagtcgctattggataagtgtaccgactgaaaggtgatgccctgaccttctgtagaaatctggaaccatccggtaacatcttccccggtctctcctttgattacctgtactgatccatcataagcagctcccaccggaagcatatccgcaatagtatattggttataatagtatgcaggtgcctctacgggaacatggtttgtcaaatagtaataaaatgaatcgcctgctgctccaaccagattttccgtttttccagccagttctgccaggcttacctccgtattgcttacatatttgtaaatcttctgaggattctctcttgcgccataagattccccatcccaggcaagcagccccatatctactcctgtatcctcaggaaattttccggtgctgtattgtgcatatttctccctactggattctgccggtctgcgtccctgtttagagttacctgctgttgcgatcaacagattcaattttgagcaatccttcaattcccaatatacagtaccatccatccattttcctgtttttccgtgataatctgtattctgagcagcattcaccatctggtaggtctgattaaaccggggaaaatcattctgatagtaagcagaacagcttttcattgcatatcgtcctgccaaggtaccatccaggagacggatcccgaatctctggcctgcatcaatatccagccagcgaaaactataatccccctttaccggtatgcttgttccatgtttcagaatctctatccggatattctgatcagctccgccaaatgcaaaacataaaccatattttttccagaatccaaaagcaggatatattcccgatactccatttccattatcatccagcacataatccttatatcctgtaactgtaaaacgcatatccaatccgcagttcatttcactgttaaaccctacattctgcacaagaaatccatactttcccgccgcattcatgttcctggggacaaaatagatcacacctcccacttccagatatgcaacatcatttcctgcattgttaaaaggaacaaatacgaatttctttctgttattagagtctcccagaaggttatagtttcccttataaacttcactgccggcagttacaagcctgtattcagatccggatgaaatgatggctttaccttctgttactgcagttatttcatttttcaaatccggattagcaagttcatcctctatatgctcatggatttctccattctcatcagaaaactcttcatctgcttcctgttggttgagtaaatccgtttcttccataacctcttccacgtcttcaatttcttcaggtatttcagatatttcagcagcagcttcaagatcagatgctaaatcatccctgttattttcggacagactttcatcaacatcctggatttcccaattctgataagtttcttccagttcctggctgctttgcccattccggctttcggtattttccgcctgtacatatccaagaccacttcctgccaaaagcaagacagccaccatacctgcaagcagacgtatcctgcctttctttttcttattatacatacgattcccctttctggtctgtctgctcctgtttcaaaaattcctgataaatcaacgacaggctttttccctccacatttgtctggatcacctgcgcttttacctgaacctttagcagctcatctcctttcagatctccttccagataattcaccgcacgaatatttctaaataaaggctccgtcttttctcctggttttaagatttccggatatccataaacatagacctgctgatcttcctgttcttcctgcctcaccagttcccagcctttttctgcttcaaaggtaaataccgctcttgattccttgttcattttcatctttgtatcatcattaacaacagctatctctcttttcggtatacggacttccaaaaacgcatattcctcatttaaccctgtatttttcacaaccggatccttttgggtactctcaccaggatgcaaatacattttcttttccggattccagtggggttcctctaatacagcttttatgtttcctacagtgatcacattttgcacctctccaaccgcatcttttaaataagctgctgatgtgcctcctgcgataagacaggttcccattcccactgctgctaaaatcttacatttttttctgttcaccttcagcatttatgtttctgcttctcctttcttttcataaacagacagatcccatctgccaataccagaagaactatcagtgtcaccatcctgtattttgccttaaaaaacaagattccatatcccactacaggtatacaccctttgacgattccctgaatctgctcttctttcaccggacatgcatcctgaatttcatttctgtccccttttgtaaacagcacctttcttttttcgtcaatccttaccacccggtgggtgaccgtaccttccttctgccctatccggtatgtgatcacatcctttggtctgatcctggaaaaggatatttttctcacataaatcacagcgccttttggaatttcaggttccatactttcggaaatcaccgtataacattgcattcctaaaaccacaggaacagccatcataaacatgcccagacagaataccccttctgtcattctcaccagccaggatctaacgcctttcatttttccggatttcctttcttaaattcagctgccttctttttgtatattgctatcatactgattccaattaccagaagacataaattggctgatatttttgaactgtcatctgttttagggctgatcctggctgacatacccattttggtaccagcattgccatatgatgaaggatacgctgcctgatcattctttcctgcatcgtctgctgttttattgttcggatcagtttcttcaccataaaaaatccagtctacttttccggtaagattctggtattcattgcccatttccgtattcacccaaagcttcacaaccagttccttttttgtttttcccaaaaacctcccaagcaaaatcccttttgtcaaaggttgtcctgatcctttcgtttttccattcacagcaccctggtaaagcactttatttccttcctttacctgtataaatgcatattttccaagaaaggtctctatctttttcttcatcacgcctgtctgcgattttccggaattatcctctgctttcagatacagatccatactgtttccactttgattatttatttttatgatctgtgtccttgcgcatcctggaagaaggtttttaaaatttgcaaacagatctgcatcaccttcattgatcacaatcttagaatctttcttcacagtaacctttgttaccgtatcgcaggctctgcatttgctttctgatacccccagaacttctttctttaccttccacagatcttccagtgctgtgcttgaagcctgtatgctttctaattcaacaaggattttcccatccttccccttatactggttgtctgcttccttacgaagccaaaagccttttaaaagcggctcctttgtcgtctttcccggttccagaatatctgtataataccagtaaccatcccccagattcttccatttttccgtattaaactccatttgtatcatagccggatctaaggatggatccggtaccagctgatcttctgtattccttttccccagaactccggtaatgcgaagtcttataaagctatcccgtgttccggtatttttcacattcacgattttagaaatcttctggcctggattcacatgatccggtatctgatattcctcaataatccgattggaaaaagaagctgtgataagaacatttctggatcttccggagattttccacgctcctgctgccgtacaggtaagcaaaagaactccagacgctgtaatcattatttttttaaatatctttttcatctgcacctcctgttaactgatccataacagcccaggcctcctttggtgcagtgattccctgtgcctgaactgcctgtacagaaatatccagtctgtagccatccaccaattgaatctgacggttatcccaatcggttggtatcacaatcgtggtaaaaagcatagactcttctccattattcaaaattccggttccgtcttttcccttataattaaaaacaagacttgctttcccggatctgtatgtatccttttcccacaatgggtttatcatagaataagaagtcatctccttcagggaatatcctggtttccggttctgcacaagcttaattgattctcctgtattggtatagcttcctttaaattccggatcataatatattgttttataaatcagatttagtttttccatgtcagaaatcggttctccctgtttgtccaggatttccaccttcatccgtacataacagggttcttccccatgactgctatctgtaatattcttaactgtaggatttttatataaggtacaccccggatatagatttttaccatcattatcctttttggggtcccactccggttctttcaatcctaccgtcaggttgcctgtggtaaaacggttgatcttttcatctttatctgtaaaaaaagacattgtgtcacctttccataacgtagctgtacacaggcatatacaaatcactattttccctgcccttagtaaaaaattatttttcttcatcctgcaacaatccttccacatatttcattctacaattccagttcctggaacaatcctgcctgataagcctcttctggactgtttagtccaaaatacctttccccttccatctgctgaagcacccttcctgaaactctgatttccacaccgcctatctgcctgatcttttcagccatcagattgtttacttctttccttacttgtacctgtgtaaataatggcaccgttgtttctcccttctccggaagctgacgttcaagaacttttttataataaaagcactgcctgacatcttccctgctttctcctttaaaccggacccaatctgccttctttggatcatctgaattgtaatcaatctcgaatacctggctaactagcttcatgtcttcctttgtcagctgttctcctttttttctttcatcagaatccctggtataaacaaattccactttcaaagctaccagttcatccatatcaatagacgatgtattcgtaacctgtggattcttcaaaagctttattcccggaatcaccaacaagcctttttccggttcccatgccggctctgtaagaactgcctgcatccctttcgctcctgcaaaatccagatgattcacaacctttctttcatctgtcagataagcacctgttccctgataaagtgcccctgaaatgcaggcaatcgccagaagcagccctatagcttttatatttttcctcattttttccctccatcaagcgcagcaaatgcagtctctgcatttgtaaatccgtaagcctggacagattcagtataaacaatcagatcaaatggacagatttcttcttttatcaaatccggctttaactgaattctttcaaataagggctctgtcttttcacctgctgccaatgcattatcataataatagtagccatcctcttgccggctccattttctgtggatctgcaaaggttcacactgtgactccccacgcgaatccgaaaaatgcactctgatccgtacatagacaggaattttactgtcattgactacccagggctttttgacgatcacatcgcctggttgcggatcctccggtggcttaaattcttcttctatgtgtactttattttctgctgcccttatttcattttgtttcacatcatcatcagtcagataggcataggtaactgccccggctcccagaactgtcatacaccccagtgcaaataagatcatgatttttcttttcattttctgatagattttatttagctcctttcaagttcatttttttcagaagtaaaagtcattctcccacccttatgcaaacacaggtggaatcaaaccttttgacactgtaatcatagaattactgaatcagcacaagggaatcacctccagaaatgaaaaaagacatgtacatgctccggcatgtgcaaaaataaatagtacaaattttcaatttaaaaagatacaaaaatgaaaaaatgatcagattaagatcaaaagaaattagatttatgaaatgtaacgctgaaatatttataagatggctatatcttaccaaatagagaaaaaaagtcaatgaaagaactataaagatctataaaaaaagcctaaaacttttcacacctgaaaaaacaatgttacagaacatatttcttttccagataattacggatctttgtgcggattcttcgtaaagcattgtctacagacttcggattcttgtccatcagcatcccgatatctgcatagctttttccttctaaataataatttaacactgtattttccattgggcttaaagccgatttgatttcatcttccaaggcacgagtattctccctgtcaatgatgatctcttctggtgtttcaacccatgcttgcgccagggggctttcttcatcctcctggcttagcgaaatataggtatttaatggcatatgtttctgtctgttggaactttgaacagcactgtaaatctgacgatcaatacacatctgtgcaaaggtaacaaaagaagcttcctttcccggatgataatccctgacagctttaaaaagcccaatcatcccctcctgaatcaggtcatctgtatcaccgcctataaggaacattgctctggctttccgccgtacaagatatttatatttttcgatcagataatccgcaattcccgtttcaccggcacgcagtctttgaatcagctcttcatcactatatttactgtactgttccataattcctcctgccctttacaggcgtttcaggaaagtcgctgacgaacgatctcgtatgcaagtatacctgccgcaactgaagcattcagagaatcaatatcccctttcatgggaattgctgctgtaaagtcacatttttctctgatcagacggctgactccttctccttcattaccgatcaccataccgataggacctttcaggttcaggtcatacatcctatcaccatccatatctgcacatacaaaccagataccggcctctttcagttcatcaattgtctttccaagatttgttacttttgccaccggtgtataattcaatgcacctgcagatgttttggcaacggtagctgtaaggcccactgcccttcttttgggaatgatcactccatgcgcccctgccagatttgcagtccggatgattgctcccagattatgcggatcctcaatattatcaagcaggaaaataaatggcggctcgcccttttctcttgctttttccagaatatcctctacggtagaatactcataggcagcaatctgggcgatcactccctgatgggagcctgtctggcttaattgatccagccgctcctttggcacgtaattgataatcgtgtctttttttctggcttcacgagcaatacttcttaccggaccatcctgacacccatccaaaataaaaagcttgtcgatcacctgtcctgaacgaaatgcttccattactgcattgcgtccctctatctgctcactcatattattcctctttcaccttaatattcctggggtaatcccagctttaccagttcaaggatccttgaaaaatcctcttttaaataaagataccctacaagcgcttcaaacccagtggcccttctgtaatcagacattgtggcatgcttggccattgtacctgaatgggcattcctgcctcttttataaactccatgctcttcctctgtaagtacaggctctatcttctcgatcattgcagattgggcagacgcctttacaaggctgctggcttttttgtgaagctggttcaccggacagtttccacgcttaaccaaaatggtccgtatgatcagttcataaacaccatctccaatatacgccagtgttaagggagaataggtcctaaggtccctatcctccaattgaaattgctgtttaagattatctaaattcttttccattttacaccttcgcgtgtatctttaagctgaatcccctttgcaagaagttcatctctgatctcatcagcccttgcaaagttcttggactttcttgcttcctggcgctcctggatcagatcttcaatctctttatcaagaatttcgtcttttttctccacgttcagtcccagaacttcacacagatccttcattgtagtgaacaactgccctgcaaactctgctgagctttctcctgttacatttgtattggaaaatttaaccaattcaaaaactgctgccagagcatctgctgtattaaaatcatcatccatggcatcttcaaattttgtaacaaagctttcagattctttgataaattctttttcttcctgagaagcttctctgactgctgcatggtctttctggtccgcaagctttccagctgcctccacaatacgctccagagcattttttgatgcctccatcagatctgcgctgaaattcagcggacttctgtagtgtgcattcagcatgaagaaacgcagtacctgaagatcatactgctggctgatctcacggactgtacggaaattacccaatgatttggacattttacggttatcaatgttaaggaatgcattatgcatccagtatcgtgcaaaaatcttgtcattgcagcactcgctctgggcaatctcattctcatgatgtgggaaaataagatcttccccacctgcatgaatgtcgatctcttcaccaagatatttcttagacattacagagcactctatatgccagcccggacgtcctttgcaccatggagattcccagtaaggttcgccttctttttttggtttccaaagcacaaaatccaggggatcttctttctgatcttcaccagatacctgaagtgcacggaaaccagattggaggtcatccagattcttatgggacagctttccgtactctttaaatttctttaccctgaaatatacagtaccatcgtctgctgcatatgcatagcctttatccattaaggtctggatcatactgatcatcccgtcgatttcctgagtagcctgtggatgaacagtagcaggctttacattcattcctgccatatcctttttacattctgcaatatagcgttcggaaatctcctgtgcacttacaccttcttccagcgcctttttgatgatcttatcatccacatctgtaaagtttgacacatattctacctgataccctctatattcaaagtatctgcgcacagtatcaaaaataatcataggtctggcatttccaatgtggatcagattatatacggtaggaccgcagacatacatttttactttaccctcttccagaggaacaaattcctctttcctgcgggtcagtgtattataaagcttcatgattctctttcctccatcttattattcagaaggcacactgcctgggcagcgatcccttctccccttcctgtaaatccaaggccttcttctgtcgtagccttaatattcacacaggacacaggtatttccaatgtttctgccacattcctgatcatctccggaatatggggtgccattttgggcttctgggcaataatcgtcgcatcaatattcccaacctcatatccgctggaatctattagtttcttcacatgggaaagcagcacaagactggaaataccggaataggccggatctgaatcaggaaagtgcttacctatatccccaagtgcagccgcaccaagcagtgcatccataatagcatgaagcagcacatccgcatctgaatgcccaagcaatcccagttcccatgggatcttcactcctccaagaatcaggtcacggttagccgtcagcctgtgaacatcatatcccattccgattctcattgtcagtattcctctttcgtaacgattcagtacaaaatgcattcccctgctgaatagttacactctttctttttaagctgaaaagccgggaatatcctatcagctaatcggatgtatcccggcttttatcatttatttatgtgcctgattatttctcgatggctgcgatcacttctacttcgcagagaacattctttggaagtgtttttactgcaacacaggaacgggctggcttattcacgaaatattttgcatatatttcattgaactgtgcaaaatcacccatgtcagcaagaaaacaagtagtcttaactgcattctcaaaagatgtccctgcctctttaagaacagcgtccagattcttcattacctgctcagcctgaatctgaatcgtatctcctgcaagctctcctgtagcaggatcaaccggaatctgtccggatgtaaacagtatatcattcagaataattgcctgggaatatggtccgatcgctgccggtgccttatctgtataaactactttcatttgtcattctcctttcaaatgatttctcttttttataactattcagtacctcacaggatactgcctgctgaatagttacctttattcatcataatatatcatatagcaaatctggtcaagctattttcctgaggagaaagagtcagcttccctccggcacattttccaaatattcataaaccatagcagaaatcttccgtatatcatctatggcatcctcttccttaggacacttctctgacatcacacacaaaatataatctgtatgatttccataaacaatggctatatcatgctgggtagtgtctgtttccccagtcttatttgcaatcgttacagatgcatccagcacctgcggaatcttggtacgattcttctgcccaagcagcagttccagcattgcctgtgaatccttacggcttccgcactcttccctgtagatcctctccagcaaaagtccgcaatccttcacagaagtggtattattctctccgattccaaccggtgttgtagatgagggagcaagcgtatgaagcacctgcgtatcctgataaccctctgctttaagatattgattgatttttctggcaccagctgcaaaatcatatttcttggtctgaagacgaaccagttcattaaatgattcattatcactaactgtgatcatattactaagaagggttcctatcttctttgatatctccttactgccagcgtctttcttgaggatgctttcttcgctctgtgtaaccacatccatattatcataggtctcggccattacaaaggccttgatcaggctggcggatgccatcctctggttgttgatcaccagtttgtcatctgttccaagatcttttacatagatgctccattccccttcaaagtctgttaccatttcctgcaaagatagcttcagcctttgtatgccgccctcatccatattctgaatcctgccatctgcatcatatacataaccctgggaagtgatccctgcctctgaagccagtaccccgttctctccaaaataataatatccatcaaagcttctgccatttgaatccattgaaatataaaaaatcccaggatctgtattcatcttgccgttttcatcgaaataataataggaatcataggtttttccatttagagtcagctgctggatatacctgatctgaggtgcagcagaaatcctgcccagattattgatcatataacatccatctgctgtatatccgtcttcctcagatgaaacagaaaggtttttcagataagccaaatatggcacatgagcctgaaatttcccactttcatcatgataatagtatccttcaaaaacagtcccatcgatagtaaaattcttgaaataatgaactgctggacgattatctctggatccatcttctttcagacaataaaatccatcgcttttcagaagatacatcccgcttccgtcctggataggacgcacctgtgcttcctctgtaacagacaaaagactgccaccagcagcagcctgaggcttaactgtaaaaataacgatccccagtactgccacagccacggctatcacttttgcgtatcttttcatatactgctccttatattccttatgcatctaatacagtgaatattaagtaaccaccatattgacttgccttaattttcactgcactagtctcatccttgcggagcgttttatgtaataggaacattacagagtaattgccgattacataagaaagtatccctactccacagttacggattttgccagatttctgggcttatccacatccagtcctctgcctacggaaacgtagtatccgaacagctgaagtggaatgatggccagtgagttggtaaaatactgactggtctttggaatataaatcacataatctgcatttttctcaatatctgtatgtcccaaattggtaagagccattacaaaagcgcctctggtctttacttccacaatgttactgatcgttttcggatacaacttctcctgtgtggctactgcaacaacaagggtaccgtcctcgatcagggaaatcgttccatgctttaattctcctgccgcatatgcctctgaatgaatgtaagagatctctttcagcttcagggatccttccattgcaatggcataatcgatcccacggccaataaagaacatatgaccagcagccagataacggttggcaaatttttgaatcttctctttcatgccaaacagggattcaatctgatctggaagctgaatcaggtcacttctcagctgtgcaaattcttcatctgtgagcatgcctcttactttggcaaatttcatggaaagcagatacatagctgcaagctgtgcactgtacgctttggtagtggcaacggaaatttccgggcctgcccatgtatacattacattatctgcttctctagcaatagagcttcctactacattgacgatacccagtgttcttactccatgattctttgcgtcacgcagtgctgccagcgaatcagctgtttcccctgactggctgataatgatcactagcatattatcttcatagataggctcacgataacggaactcacttgccacatctacttctaccggaatcctggccatgctttcaatcacatatttagcagtcatacctacatggctggcagaaccgcaggcaacaatatcaatcttacggatgctgcgtatctcctcatctgtcatcccaagctcctcgatcactacatcatcgtcttttaatctggggctgatggtatctctcactgccttaggctcttcgtatatctctttcagcataaagtgctcataaccgcccttttcagctgcattaatatcccagttaatggttgtaggtgttttctcgatctcttcgccatcaatattataaaaatgtatattctctccggaaagacatgcaatctcttcattctccatataatatacacttctggtgtatttcaggatagccggcacatctgatgcgatcagattgcccatgctgcttgcacctacgatcaatggactgtctttacgtgctgcataaatatgatggggatgatccttaaacatgatccccagtccataggagccttctactctatgcatcactctctcgattgcctctatcggatctcccttgtaataatctgtaagcagatgtaccagtacctctgtatctgtttcagactggaattcatagcctttattttccagctttttctttaatttggcatagttctcaataatgccattatgtactactgcgatggaatggtccttattaaaatgaggatgtgcattcacatctgaaggacagccgtgggttgcccatctggtatgaccaatcccacaacaacccttcatagtttcgccgccatgcgtaagttcctccagaactttcagtctgcccatggttttcttgatctggatctcctgtccgtcaaagacagcaatccctgcagaatcatatcctctgtattccagctttgaaagaccatccagcaaaataggtgctgcctgcttgtcaccaatatatccaactattccgcacatgagattacctcctgttttgtatgtgtataatcacttttttcaccgaaaaacctataaactcataaactttcccatgctaaaaatataacaaaagtataccctaatttttcggtctgtcaagtgctttccaaaatccctccagcttgccctccagtgtagccaggctgcagctttgtctgtcatcccattcccttgggaacaattcaccatattttctgtctgcgaaacgttcatctaaaagcagtatcacacctgtatcctccctggtcctgatcactctgcctgctgcctgaagtaccttattcataccaggaaagcgatatgcataatcaaacccgttctcccctttatctgtataatattctctcaggatctcccttctgatactaacctggggcagtcctgtaccaatgatcactgcaccgatcaacttatctccaatcagatcgattccctcagaaaaaatgcctcccataatgcaaaaagcagcgaacgtatagtcatgtatatcaaaattctgaagaaaggcttctctctccctttcacccatgccaggattctggcatactgttctaacccaatccacagaaaattcttcttcataaacattatatacgtcctgtaaaagccggtatgatggaaaaaagatcatataattaccttttttcttccatactgttctggctatgtactctgcaatccgtctgtattcactgtaatttctcctagtataccggctgctcacatccacacctgtaaggatacacctttgttctttactaaaaggcgacctgacatagattccataatcatccgaacgtacacttaacagctttctgtaataaatcataggaagaagcgttgcggaaaagaaaaccgtgcttattcctttttcaagggaagcattcagattccctgcaggatttacacagtacaaatgaaggcggaacttcccatcctcactgttctctgtataaaccacatagttatcatctactaattcggaaatattaagaaaatcccttactgaaaaatagaaatccagaatctgatctgacagttcctgattttccgattcttccataaacttctccagttctccgaaaactctcaacatagcaagtggtatcattcctgcattctccagtatttgatagccttcacattctttttgcatggataacaactgacgatttaccttgtccaggcttcttgccaaagtcggagccttttcccttactttctttcgtacttccagcacttcttccttgcagacagaagcactgtacatttctctccctctctccaccagattatgtgcttcatctataagaaatatatactcacctgaaacaccttccccgaaaaaccgtttcaatctggcattgggatcaaatacataattgtaatcacagatcacgccatctgcccataaagccagatccaggctcatctcaaaagggcacacctgccattttcttgcctgatcctggagcgaatctctgtcatagctgtgtccggaggtccataactcataaacacattcattgatccggtcaaagtgacctttagcatatgggcaggcctttggattacactctgtttcttcctgaaaacagattttttccttggcagtcaaagtgatcaccttaaacttcagacctttttccttcaaaaatgaaaaagtctcttctgctacggttctggcaatcgtcttggcagtaagataaaatatctgctcaccatgtccttcccccactgcccgcactgccggaaaaatggtggatatggtcttccccacacctgtaggtgcctggataaagatctgcttttccgcagatatggcatggtagacactactgaccatctgcctctgcccatctctgtacggaaatggaaattcaagatcctgcatggagtgattccgcagctctttccattgaagctgataagaaacccatttgtggtaacggtcaagaagcttctgataccagtcttttagttcctccagcataaatgactcaccgaatctatgtatctgttctgtgtcaaggttcacataagtcatctggatatcaatctgatccagagattccatctccccatacatcctggcataacacattgcctgggccttatgaaccaaaaccggtgcttccagctgctccggatctgatgcgatcccttttatctcatcaataactgtaatatcatccttcgtaaaaatcccgtcagcccgcccttctacaaggatgatcagatcttcatattctgttttccatttcaggctgacctcagcctgataaccggcccccattcttttctgtatcttgcgatggatgcggcttcctttctgcatggcttccttatccgatacactgtgccggttatcaatgtcaccgcttcttaaaataaattctaccaggttccttactgaaatacgaaatacaggtttagccattttcattctgatacagtatctcttgccctctcacatagtcaagccggatagttatatccgctttgctgatggatattgtaacacatacattatgtaaattccaccatgttccttctgtatttcaaaggcagaagctgctgctgaagtgctgtattcttcctttccggaatagtaatggcactgcagaataccctccacaaatcttcataaatctccggatttcccggcgtctggtctgtcaccctaggctgtacgttctgaatcaaagtgcaggcagactgcacaggatgtatcattgccttttttcttttcttatcataaatcatccagttctcgccttgaaaacggtcttgaaaatgtgtgcccagcatttccaggatatcattagcaggctctatttcagaaaaaagtacctgaccgccgatttccctgaaccttaaaaatccatagtaatgatgcagttctctccagactctggttcttaatcgtgatacctgtcccacataagcatctgctacatcttccatgatgcggggatcccactttccatggaaaaaagacttataaagagtataaaaaaccgcagttccacgatccggatccgaagaggctgctgcataccacaaatcctggcagacggcagatcccagattcttcagaatagttctcgttacccgcccgactttctcgctgtctgactgtacatgatgtaatctggtaaaaagctccatattctcaggctcacaggtacggatctgaatctgcacctttttagcttccatccatccgtcatatacagccgtaaaaatcccctctgtactatcctcgcagataaacactgtcttctcctgattcacaaagcatacctcctctcaatcccatcctcttctcggtcaaaaaaagaaagctgccggcaggtactgtaaagaagctgctctggtctcctggcatctgttatattccggataatataatcttcttccagcttagtcctgtacatcatcctgccattgcaggtaataaaatataatgcacgcttcagaactactccgatcttctgtaaatcggtaaaatccagagaatgcgtctttcttgcgcctacaatcctcctggcagatctgtcaccgatcccagggacccgaaggagctgataataccctgctttattgatctccaccggaaaatattccagatggcgtattgcccagttgcactttggatccagctgaagatcaaaatcaggtctggattcagataaaagctcagaagccttaaatccgtaaaaccgcagcagccagtctgcctgatatagcctgtgttctcttaaaagagggggcttggtatacactgccggaagggctttgtctttattcactgcaacaaaagctgaataaaatactctttttaatgagtatttctgataaagcgactctgccacagccagaatctggtaatcattctccccagatgcccctatgatcatctgagtactctggccggcaggcacaaactgtggtgcatgcttaaataaggtcagttcttccttactagcatcccgttggagctgtatctgccgcataggccttaaaatagtctgtctgcttttgtggggagctaaccgtctcagcccatctgctgtaggcagttccagattcacactcatcctgtctaccagatatcctgcctgccggatcagatccggcgatgcccccggtatagccttcaggtgaatatagccatgaaaatggtactttgttcttaaaagctgtacagtcctgcaaagctcttccatggtatgatcaggacttcccttgactccggagcttaaaaataatccctcaatataattacgtctgtaaaactccatagttaagctgcatacttcttccggagtaaagctagtcctgaccacatcattagaagctctgttcacacagtatttacaatcatatacacattcattggtatataagatctttaaaaggctgatacatctcccatcagctgaaaagctgtggcagatcccagcagcaatgctgttgcccatcccttcaaagctgccactcctgtcaacaccgctggaagtgcaggcaacatcatacttggctccgtctgccagtatcctcagcttctccatcagtcccattgattcctgaattaccataacctgtcccgtacctttcctccattgattgccgcaaacatttgttcatatcgctataatagaacaaatgttctttgcagtcaaggctataaaacgggacgaacataaaaagacaaaaaaagaactgcctgttacggcagccctctttttttacatctgagtaagaacaaaaatatcataaattgcttttattgcagtctcaaaatctctgttttccacaccaatgataatattcagctcactggaaccctgatcgatcatcttaacatttacattagcatgtgctaatgctgaaaaaatccttccggcagttcctctggtggacttcattccccgtcctactacggcgatcaatgccagatctgactccatttccacaaaatccggagatacagcccggtgaatccctgcgatcacctgctgttccttttcctcaaattcatcctgatgcacataaacggtgagcgtatcaatgcctgacggaatatgctcaaagctgatgccctggtcttcaaatacctgaagcactttacgtccgaatccgatctcactgttcatcatggatttttcaatgttgatagaacagaagcctttctttcctgcaataccggtaatggtatacttaggctttctgcaggtactttctacaatgaatgtgcccttgtcctccgggtggttggtattacggatattaatgggaatcccttcttttcttacgggaaagatggcatcctcatgaagaaccgttgctcccatataagataactcacgaagttcacgataggtaatcgtctcgatcactgccggattatccacgatccttgggtctgttaccagaaatccggatacatctgtccagttctcgtacatatccgccatgatcgcctttgcaacaagagatcctgtcacatctgaaccacctcttgaaaaggtccgtaccttcccgccatcctcagccccgtagaaccctggaataactgctttttcacattttgccagtcttttgccaagaagcttattcgtcttttcagcctcaagaaccccgttcttatcaaaacggatcacttctgcagcatccacaaactcataaccaagataggctgccattactttaccattgaggaattctcctcttgatgcagcatactctttccctgcatgtgctgaaaaatcagccgcaatctgctcaaattcactatccaaggaaagttcaagagaaagtccccggatgatctcctggaaacgctccttgatcgcctgaagctttccgtcaaattcttggcctgcttcagcagcttcatagcaggaatacagcatgtctgttacctttgtatctccgtcaaaacgctttcccggtgcagaaggtacaacgtatctgcggctttcctcgcttctgatgatctcccctaccttttggaactgttccgcattggcaagagagcttcctccaaattttacaacttttttcataatagtaattactcctcgctgctttttataatgcactgacgctattgtaaaaaaaagcaacaaaatttgcaagtacttcttttaagattaaaatcacagtttccaagatttaaagtcacacaaaccagctgtttttacttttccttgggcttcttgtttatgctctctgtcacatccagcactgtcagaatatttcccacaactttaaaatggatatcttgtctgccgaatgccatgccatattccctgtcagggtctttctggtagcctggtcgtggatcatctgccagcacagccaccagcgcttttcgcaattcttctggaactcttcttagcagcccctccgggaaatccacttccagcttatgatcctgtattctttctgtaaagccggccctgccctccggatggctgtctgcctccggaagatagggctttatgtcataaatgggagtatcattcatcagatctgctcctgaaacatacagtacaggcccaagttcctttgtatattccaccttttccagttttacagccgaaaggcctaccggattgggccgataaggggatcttgtggcaaaaactccttttcgtatatttccaccaagccttggaggccggaccgtaggagaccagtcatcccgcacagcctgtgagaattcccagatcagccagatatatgtgtattcttccaatccgcgaaatgcctctggctttctgtattccggttcaaatacaatcttcgccttcagttccctgatccttccactttgatgaggaatcccgaactttgatgggaaatcattctggatgtgtgcaattaccttcatgctctgtatttccggataatctcatttgcctttgcataaatttcttccggatcctctcctatgctgaataacccatcttcataaagaatacttccattaaccatagtaagctttacattttccttacttccactgtatacaagattctttaccaggttattctcaggctgcatattcggcctgtgaagatcgatcataacaagatctgccagttttccttctgcaaggcagtcacaatcgtccagaccgcagcatctggctccctctgatacagccattttaagaacctgatctgcccctacagcggaagcatctttttcacgcagcttcgcaagtccggtgacaaggaacatttccctgaacatatccaggcagttgttgctggccggtccgtctgtaccaacagccacaggaatgcccagatccagcattttctgtacaggagcgattccactggcaagcttggtatttgagccaggatttgtcaccacatacagctttcttgtcttaaatatgtccagatcttcctgggtcatatatacgcagtgataaccacctccgccatactcccacacacccagtttgtcaagatactgggttggtgtaataccatttctttcgatacactgacgtacttctgcttctgtctcagaattatgggtgaacacaggtgcctgatatttctgtgcaagtctagccacttctttcagccggtcctggcttgtggtatattctgcatgaaagcccagacaatagcggatcagcggatcatacgcattatactttatgtagtcctcttccatctcccttggactggatgaaaagtcattcataggagataccagaactgtacggaatccacagtctacacttgcctttgcgatctgctccggataaaagtacatatcaaagttagacgtgatcccactggtaaggtactccaggatcgccagctttgacagatgatacacatcctcaggcactaacttggcttccatgggaaaaatctgcttattcagccaatccagcaaaggcaggtcatctgcaaaagacctaagaaaggtcatggctgaatgggtatgtgcatccttaaacccagggatcagcaggttctcttttacatcaatctctctgtcccaggcattttccccataagcatcctgtgttttttcaggacctatataagcaatcctgttgcctaccacatgaagttctccctggatgatctgaaaatccttatccaggatcctggcattataaaaacgggtattcatcagtcatcctccttttcctctccaaaaagtgcagccaggctttcttcgtaaggtgctctgcagattcctttttctgtaacgattccggcgatcagcgtatgatctgttacatcaaaagcagggttgaaacattttacagattccggagccataggctgcttataaaacatcttcttgatctcgtccggatttctttcctcgattttgatctgttctcctgtaggacagttcatgtcaatcgttgaagtaggtccaagcacataaaatggaatgttataatactttgccaggattgccacaccgctggtaccgatcttattggccgtatctccattggcagctacacggtcgcagcctacaaagcaggcctgtacccagccatttttcatcaccatactcgccatgttatcacagatcagtgtaacatcgatcccagctttatccagttcatagctggtcagtctggctccctgaagcagcggacgggtctcatctgcaaatacatggaagttcatgccctgttctttcccaaggatcaatggaccaagggcagtaccgtacctggatgttgcaagcggccctgcattacagtgggtaaggatcccatcaccatctttaataagacttagcccatactgggagattttcttacacatggcaatatcttcctgatgaatctttctacattcttctccaagaagctttacaatctccttaacaggaagttctttatgcttgtatgcagtctgttccatcctgttgatcgcccagctaagattcacagccgtaggacgggagctgttcagatactctccatactctctcagtttttgataaaaagtgtcaaagctgtctgtatcaatcgtctgggccagacagtacatcccatatcctgcacagattccaatagccggagcacctctcacccgcagatgaaagattgcttcataaatatcttccgctttctctaatgtaagatactcagcaagattgggaagctttgactgatccaggatcactacatgcctgccgtcttctgacagtcgtacatgatccatatccactttctggcttgtctgttccattaatactattcctcctttaattaaccgctttacactgcctcacggcatttatcatataatcataacttacaggatttctcccatagccttaatgctttctgtaacgaggctgcgaaacagcggtgcaaccctgtctgctgtttcttgtacctcttcatgggtaagcggattctctgtcatgccacagcccagattggaaatacaggaaatcccacagatcttcatgcccatatggttcgctgcgatggcctcacaggcagtactcataccaaccgcatctgctcccagggtacggcacatacgtacttctgccggtgtttcaaatgcaggacctgtcagctggatataaacgccctctttaagatcaattcccagcttacaggcagcatttcggatcacctgctgcagatcaagatcatacacatgactcatatcacagaagcgaagccccagttcatcaatattcggcccgatcaaaggagatggcacaaaagatcctatctgatctgtgatcatcatcaaatcccctgctttaaaatcaaagtttacgccacctgccgcattcgtaaggaacagtacttccgcacccatcagcttcatcagccttgtaggcagaaccacatcggaaatagaatagccttcataatagtgaacccttccctgcattgccactacaggcacatcccccacatatccgaaaacaaagcgtcccttatgaccaggcactgttgatacgggaaatccctggatctggctgtaatccaatgtctgtaccactttcatttcctgaatatactcaccaagtccagagcccagtataagggctgcttttggtttaaaatctactttttcctttacactttcatagcatcttaataatttttcatatactggattcatttgtttcctcctttttctgctgataatttctcgaaatcttcagtccaaattaagaattgcggcagccatgccgactaccaaaatattccaagtttggacctgcttcgaggactccatcctgcatgcagcattcttagtttctgtctattgattttaaatcaagagattttttatattgttatatatttcttaaccttttacaattcttttgctgttaaggcctttctctttcaaaagttttttgtatgtcttcattttatttccaggtacttttgccgtagttatcttaggtgtacctttaaatgctttttcggaaactgtttttgcagtcagctttctggttttgattataattgttttcagtttcttgcagccactgaatgcataagaaccaatctttgatacattcttgccgataacaactgttttcagtctggctgtgcctctaaaagcattatttccaattgacctgatgttgtttccgattgttacttttgttattttcttattgtttctgaacgcattatccgcaatctgcgtaattttatatgtcataccgtttatttttacagtattcgggattataaatattttcctttttttactcaccggagtaatgaaagccacttcttttttcactgcatttgtaattatatattttccggtcttcttatcgtcaactcttccaacatttgactgtgactgctgtggtttctgtgttggctgtggtgttggctgtggtttctgcaccggctgtgttggctgcaccggctgtgttggctgcggcctctgcgttgactcttttttaggaatagactccgttcttgtcttattacatttctcacaggtgtatatttttataccttctgaatcctcatcaggttcttttgttattttacccacatcccagatatgaccaaatgccttgaggattattccaccctctgtataattacaccttgaacaaccgatcaccgcttcttttccatccacctcacaggtcggctcaactttctctgaaactattcttgtcatatcatgaccgagggcttctgtctctgttccggcttcaagcagtttcttacatcctttacaataaatatcccctgtgtaccctgcttccaaacacgttgcaatctttttattttttatttcagtttctcctgtatggtttgatgcatctttctcaccatatgtctgatgacagacttcacagactgccggtgatgtacaggttgccctgccgccagtgtgatcctttttacttatgtctgttaaaaagtcacaattgttaaaaccgtatggtcttacacgacagcttgttacggttattttggtcagagttgtgggaatcagataatattttccatcatacctcgtccatgtgtaaccaggcacttttgttgttgtagactgaaaccaccagccaagatgtccaaggttgtctgatgcggttcctataaaaggcactgtaagttcctgtagagaattcatatcttcaaaaacctttgaacccaataatgtaactgtatcaggaatcgtaagtttcgtaattcccctgcatccactgaatgcagaagaaaatatcttcgtaacattagatggaatatctatatttgacagagatgtgcagcccgtaaatgcggcttctccaattgactttactgaactgccaattattacttcttccatatttccggcatagaaaaatgcacgatccccaatagtttcaggtccattgatcacagctttcttaatctctgttatatgactgtaccatggaatatcatgatacatgtcttttgaataatctgtcattctgccgcttccactgattgtcagtgttccctcatcatccaatatccacgtacaggttttcccgcaatttccacttgatgcagcactgacaacaaaattactcataaacatcatacatacaacaacaaaagcccctatgagaaatcgtttgattttcattttatccccccaatataaaaaataatctctcggaatcttcagcccagtaaaatcaggctttcagatccatctttaggatttacacccatgagtttttaaagttcaatgccagcgtttcgcaggcatgatcaatcagcattccgagagatcatgctggatcttcttgtaaataaaatcgcatattcctgacgcagtgtcaggatctacgttttctttctgtttttccatcatatttgatgccatattctggtcatttaaaaggcagagtccctgcttaacctgccctttcactgttttcgcagaaacactcatgccgagctttacgaaaaacttcctgtttgcactttcacagcctgggatagggtccgtatgcaccataggcacccggacagctgcagcctctgtagacgtaaggcctcctggctttgtaaacaatacatcacaggccttcatgtaaagcaccatctgactggtatacccgataacatggactctttcttcctttagaaattcttttttcataccagtctcaatcttacgattgcttccacagaccacaaaaatctgtgcttcttttgtttcttccaaaagaagttttacgatccttgccagatctccggctcccatacttcctcctgccacaagaatatatctgccatcacttaataagcccagtttatttctggcatctttttttgagatatcctttctacaggcagctgccaccggaatccccgcagggatcagcttttcctttggaagtcctctgcggatacaggatggaatcagccttttatgtggaaccgtataataatcacaatctgtttcttcccagaatggaatgcaggtataatctgtcataatcgcaacggtaaggggcagctccattcctttacgcttcatgtatgtgatggtttctgctggatacagatgtggcattatgatcacatctacaggattttcctgaagatattcatccagatatctggccatcctgccgttcaggtaataaaccggcgactttttcatcagcctgctgaccagcattcccaaatggtacgccactccgaaaagctttggagttttctttacgatctgaacatatccgtttcctacgatcctggatactccttgtcctgcaagggtaagataatccagcacatacgcctcgtcccccctggaaacaaattcctctgcaacagcccgtcctgccgaattatggcctccacctgtattacatgataaaatcagtgctttcatcctgcgatccctttctttttattcatactgcagctttctcttccctggattcctcttctgtacagatgcagtgcttatacgccacaataccggacaggagcagcacacctatcagcacagcaggcggttctgcggtaaaaaagcaggacaagcctacacatgcaaaggtgatcaggcttcttttcctatgagatctgacaggcagtaccagagaaaaaagaaggtaaaagatcacaagactgataaatggacaatacactggaaacagcccagccaacacaccaaagcttactgctatagcctttccacccttaccacggtggaaaatcgaaaacgcatgtcctgccactggtgccgccatcacccctgcaaaccaaagggaatccatgccaagctgtctgccgcacaaaaatacaggcagaaagccttttgctaattcacttaacaaggtaaggatcccacagccgatccctccatatacaaatgcattataggttcccggattgccatcttctgaaaggcgccttacatctactcctttaaaaattttgggatactccagtgcaaaaagcatgcttcctgccagataccccacagccatataaaaaatatatctatgatccactgtcaaaactcctgattttcagcggttcagtatttctttaaaatactgccagctgaattgtgattgatcgtctttacaaaataccttgatctgctgggaaacagatccccatcagcttacgtgcctcatccattagcttcatttccattctggaatactgatcataagcctttgtttctttatgattaagaatacaatctgcccatatgcctgcctcatagaccatatcatccggatccagatcaatggaaatctgttctgtttctccattcctgtagcagattgtaagctcctgcacacgaccaacctcactgatcagcatattggctttttctccctggatctgactgggagaactgctgtccgtaatcttggaataaatcagttctgcctgtttatccggatatataccaataatagtacctgctccgtccacaccattttcaaggaagacaccctgtgcctggatcttatcaggcattccgaacagcatgacaagagcatacacgcagtatactcctatgtccattaatgccccatttgacaattccggtttaaacgcattttcaatgatcccttttttgaaattatcatacctggaagaatattgacaatactgaagtgttactctgcggatctgtcccagtttgggcagattttcctgtattacctgatagccaggtgcaaaaatcgaacgcatggcttccagaaataccacatggtttctttgggcagcctgctgcatcctttccaattctctttcattacttgccacaggtttttctacaagtacatgcttaccatgctccatcagaaacacagcctgctcacaatgaagaaagttgggacttgcaatatatactccatcaatatcaggatcctgagccagcccctccagagttgtataatacttctccaccccgtattctgcagcaaaatcctttgctttttcttcgcttcttgaataaacagcctgatattcaatcagcggacacttggcaatccctgccagaaattttcttacgatcttacctgtcccgatggttccaatccttatcttaccattcacacccatttcttccccttttctttatgtttttttcttcaatttaatcatctgccagctttaaaagttccctgcccttttccagacgctgataaaattgactgtagaaatccatctgcggatcatatggtttctgataaaaactattcaccacatacagattcagattacgaatcagatccggatcctgtgcatcatacaaaaccttctgtacgtccaaaagaaagtaatgccagtctgctacaaatttttcgtattgtttcaaatcaggagtatcgatccatttttttacttttattttgcttctattagtctttttacattcatgaatctgaagaaaatactgaaaaccaccatcctggtaatatcgtcccagaggaaacagcctgcaaaaccctggccgtataggatgaatactgcatctgccttctttgttcaggaaaacacattgctcatcccttcctgtcattcgaaggtgaggcagaatattcccatctgccacatcaaaatccatacatatggcagccagttcctcacagcttttcccaagaccacagccaagccggtacacatccagaggatccagtaccagtgtatcccccattccccggcagcagtcactgcagcctgtgcaatcctgacagtctgcctttaccatgtcatttgctccatataattttccgtcagaaatctcttccagtgatacatctcggcgcatcttaatccctatcctttatccttaatccagtttcagtccggccaaagcctgtgcaaaactgttatttacaggctcttggctttctttttgctgctggcgcatgtatttctgtacatcttttttgtttacgcctgcaccttcctttgccctccttgcctgaaaagcagacagcttctctttatagccgcacacacatacaaatgtttcttcttttccttttaccagcatttccatgcgcttatggcatttaggacaacgggcatttgtatttcttgaaactgtttctttgtaaccgcattccctgtcctggcagaccaacagctttccattctttccggtaactgccagaagcttcttcccacaacgtggacagtttttatttgtcagattatcatgtctgaaggttccctgtccttctttgatctcgtccacgatttcacaggtatactccctgatttctttcataaatgtgtgctgcttcatctgcccctttgcaatccttgacagcttcatctcccagctggctgtcagttccggttttttcagatcttccggaacaagcttaagcagctgctttgctttggatgtaagataaatctcatttcctttcttttccataaggaacgcatgaaaaagcttctcaatgatatctgccctggtggctactgtgcccagccctccggtctcaccaatggttttcacagcagctttgtcttttgtctgcataaaccttaccggattctccatggcggccagtagagtggcttctgtaaatctcgccggaggctttgtctttcctgatgtgatcgtcacctgtcctgcctcaaatacagtcccctgctttacctccggaagcttttgatccctgggagcagtatcatccgtatcttcctcttcagaaaaaccctcctgatagatttccttccagcccaagcttcttataatcctgccgcctgctgtaaaaatctcaccggctgccttcccttccatagtcacctgctcatacaggcttgcaggatataaaactgccagaaaacgccggaccaccagatcataaatcttacgttcttcattggtcatatgatccagctgtacaaactgctctgtaggtatgatggcatgatggtcacttacttttttgtcatccacaaaactggtacttgcctgaataggccgtgtaagcaaaacacctgccaattttcggtaaggacctgtaccacaggccttcagtctttcctttaaagtaggcacgatatcctttcctatatacctagaatctgttcttggatatgtaagtaccttatgattctcataaaggcgctgtatgatatttaacgtttctttcgcagaaaaaccaaacttctgattggcttccctttgaagggttgttaagtcatacagacctggcgccattgtttttttcgcctttttctctacagacaccacctgaagggatgtatttgcaacttcctttgccagctttacaagtctttcctgttgaaaagaacgaaagctgccacttttggaatctttccaggtccatcggatattacctgccgtcagggtcagtccataatattcttttggtacaaattctttaatttcttcttccctttgtgcaatcatggcaagcgtaggagtctgaacccgtccacaggacagctgggcattatacttgcaggtcagtgccctagtaccattgatgcccaccagccagtctgcctctgctctggctgctgcagcctgatacagataatcgtaatcatgtccatccttcaggctggaaaatccctctttgatcgctttgtctgttacggatgagatccacagcctgcggataggcttggtacaccctgtcttatcaagaatccacctggctacaagttccccctcacggcctgcatctgtggcaatgatcacctggtctacatcttttcggtaaagctgggtcttcacagccccgaactgcttggcagtctgccggatcaccaccagacgcatatactccggaagcataggcagggtgcccatctcccacttttcatacttgcggtcatattcctccggatctgccagcgtcacaagatgtccaagtgcccatgtaacaatatatcggtctccctccagcatcccattgcccttcttgccgcagtgcaaaactctggcaatatctctggctacagagggtttctctgcaattactaaagacttcattctctcactccctgatcaagctctcttttttgcagtataccatatccgcagctataattccagcaaggcttaaaagaacgtttcctgtgatttttgccgtctaacttatcagcctctgcagtcaccaggtatactctgtactttacacttttttcataaatctaaagaaaaaaccatttgtaaatcagatgttacaatgttattatgatgccaggatcaaaagatctgcatccatatgattttacctatcagtggataataaaaaagcagtaaacacagggagagaaaaatgtattactttatagtgaaccccaaatccagatctggcatgggcaagtgtatctggaacaacctgcgggcgcggctgcttcagcagaatattgaatttcgcagttatcttacagagcacgtaggacatgccaccactctttccagacaaatcagcagtcttggtactccagatgctcctgtaacactggtgacagtaggcggagacggtaccatttatgaggtacttaccgggatcagtgatcttcgcagtgtgatcttcggctatattcccactggttcaggaaatgatttctgtagaggcatggcccttcccaaggatccggatgcggcccttacttccattatccgccaggatcggatcatggagatggatgttccctgtatttcttcagagggcagtaaataccgatttggtatcagtgccgggatgggatatgacgcagcagtatgtcaggaggtgctttctactcccttcaaaaagattttcaaccgtctgcaccttggcaagctgatctatctttttatagctttaaaaaagctgatgttccttcatcttttctccatgacgttacatatggatggagacaggatataccactatgacaatgtatattttactgcagttatgaaccagaaatatgaaggaggcggttttaaattctgtccggatgccagtccccaggatggtatgctggatgtgatcacagctgaaggcatgagcaagctgaagcttcttctgatgctccctactgcctttttcggtaaacatgttcacgtcaagggcatacatattttccgttgtaaaagcatagatattaataccagtgccccggtttctgtgcacaaagacggagaatccggtggcatttccgataaaatctccattttccttgaaaacaattctttaaaagtgattatgcctatggtataatctcttcgtttaaaaggagtgaataaatttacatgataaaattcattaaaaaatacaggcatggtcttgtgatcgccatttatgcgcttctatatctgatcacgttcaattatctggagaaccgcactgtattcagttatcaatatcatgtgatcgatactgtatttgatagttacataccattttgtgagtactttatcgttccatacttgttatggtttccatatatgattatgaccatatggtacttcatctttaagaacaacaacaaaaaagaatattatcagctgatttttaatctaatgatgggaatgactatttttctgatcgtatcttatgtgtatcccaatgtacttcacttaagacctcatgaatttcccagagataatatttttacagaccttgtaaagtttatttacagaacagatacacctactaatgtgcttcccagtatccatgtgtttaattctctagcgattcacatgtccctttccaattgtcagtcactaaaagatcgtaaaggtgtccggatcggttctctgacccttactatactgatcattatgtctaccatgtttttgaagcagcattctgtaatcgatgtgtgccttggttccactcttgcgcttttcggatatctgtttttctatccgcaaaagactactgtacgtgcacacaagaaagttgtttttgaaagcatcagcaaagaaaaacacaggaaattctgattccacagtatgttataagggccgcaacaccggatcaagaatgcctttgcactccgggttgcagccctttcattatctctcttattgccttatcttatgcaggtacagactctgtcatgtctgtaatgcatctcttagttaaatccgtagaatttctgacacagtttgtaagctgccacagagatctttcttccgcctcttcccggcaggttcatgaaattccccatcaggccaaaacgcagccttgaatacagtgatctgttggtatccttgatatatgttaaaagctctttcttcttttccagtgcctcagctgtgcctgaacggatcagcataatagaagaaacagtggtaataatatccagataactgatcatatactttctggttcttttgttcatggacgtatgctttgtataagaatccaccatcagcttatttactctgatctgctggtcgatcctgcggatcattactgtttcattaacagactggtcatcccggcctataaagtatctgtagaaattagtatccacataatacatggtcttcacatagggaagaggatcaaatgcaaaaatgttatccacatagaaggtatgtctgggaagctctaatccacagtcaaccagaagctttgtcctgtagatcagtgaatgcatcagcaggtacttgccttttggcatatgctttacctgatcccaggtaaaaacttcttctgtaggaaagcaatgtctataatgcatcactcttttcttgacagctccctgcttctcataaacgaagttactgatcagaagatctactgtgtgggaccccttgaccaattcttccagagtatggagaatcttctcataggattcacgattcacccagtcatcactgtcaaccaccttaaaataaagccctgtagcattcttaagtccggtatttactgctgcgccatggccgccgttctcctgatgaagggcacgtacaatagtaggatacttttctgcatactcatctgcgatctgtgcagtcctgtcactagaaccatcatccacgaccaggatctccacttcctctccccccagaaggagagaattgatacatttctccatataagcctctgaattgtagcacggaatagcaatacttaataacttcataaaattctcctcacctgtaacttatgatattttaagataactgttcagcgtcctggcaattatgtgcaaaatactgtctgccagatcattacgcttctctcaaatattttaaatatgccccgaatgcagacggtatggcataatgttgctgtgtttcctctcgtcctgcaaagaaaaaatcctgtgtcagttctccgtccaatgaagccaccttgatctgataagctttcattctccactcaatatgagaaaagatatgcttggaatcaggaagttcacggatgtataagggatccaaccccaagtctctcacataggacaggacctgtgttctgctatagtatcccagcctattgggaaattcataaagcccggccagtaaccctttccctggtcgcttccgcagtgctgtgcagcagccatcctggataaccagaactgtcctctcttcaatggatcttgattttttctttgctttaacagggtatgcttcctgatggccgcttatatatgcccggcagaactcttttaccggacaaagattacatttaggtgagcctgatggtacacagaccatagctccaagctccatcaatgcctgattaaaatcccctggcgccagcgccggaataatgtcagataactgcttctcgatctctgtacggactgctgtcttcataatatcctgtgggttctctgtaagccttgtcactacccggagcacatttccatccacagcaggaacaggaatcctgtaagcaatggaagcaattgccccggctgtataccggccaattccttttaaggataaaagcttctcaaaatcctttggcaaatgcccgtcatactgctccactatctgaattgccgccttttgcatattccttaccctgctataatatccaagcccttcccacagcttcataagctcttcttccggacagatggcaaggctctggatatctggcaatctgctgataaatctattaaaataaggctttactgcctcaacccttgtctgctgaagcataatctcagatacccaggtataatatgcattatctttatcacgccatggtaaattgcgcttaactgcattataccatgtaagaagcggctccacaatttcttttttcactgtctgctcactcactgctctcctccaagaaaaccggcaccttactgttgatcttcatctcatctggtgttacaatacactctcttgccaggatcttcacacctgcctgctgtgccttcacaagcgcccttccgaatgcctggtgtgttttccagtttggttcaaatcgaagcacctgctccatctgaatcaccagaagaagataggcctcatatccttcttcaagacatcggatcagttcctccacatgctttacccctcttatggtaggtgcgtcaggaaaacgtaccacaccattttcttcaagagtaacacctttcacttctataaatgcttttcttttttctgattctgcataaatatcaaaacgggaattaccgaaagttttttcagttgtcacacttactttttctggaaaaagtcctccctcccgtatccactctgcagctgcctgattcggtgctgctgaatccatattgatcagtctgtttcctttataaacacagaccaggtcatatgctgtcttccgtgccggattgtcacttttctccagaatcacttctgtgcccggaatcagcagttccttacacctgcctgtattctttacatgaacagtttctctttgtccctggatatccacaattgcaataaaacgattgggtctttccagaaatattgctcttactatatgtgcgtatttcatttttctcctatcttcttgttgttatatttttcctaatgtgaaagttataaaagtcatattcaagaatgcctcggcattcttgctgcgaggtgcgcaggagaagtatgtcatgcaattgcatgacatacttctcctgcgcacctctgcaatcctgccggaggctatatcagctgggggattgactcccagctgatatgccttttcctaaaaggtagttgcttttttcttctgtctctaataaaatgattacaatgtcaaaaggtctgatcccacctgtgcttgcacaatggtgggagaataaccttgggacgcgctatctaaaaacaagtgaggttacatattcatggatggaatcatttttgatgtagacggaactatctgggatgctactgaagtggtagcaaggacatggacccattatgtgaaagaacatacgcagctgaatactgtgatcacagcccctatgttgaagtccttattcggtcagcttcttcccgatatttcaagacagctttttccttcgctttcccaggaagaccagcttaagctgatcgatattctgtgtaaaaaggagcacgaagccctgaaaaaggaaggtgcacctgtttacgaaaacatggaggaagtactgaaagaactgtccggccgttttcctctttttattgtaagcaactgtcaggcaggctatattgagcttgttatggaaaagacaggctttgccccaatgatcacagactatctctgcccaggtatctccggacaggccaaggcagaaaatattatgacacttgtaaaaaagcatcatctccacgcccctgtatacgtaggcgataccaaaggggattttgaagcatgccaaaaggccggcgtagattttatctttgcctcttacggctatggaacagtagaaaatccagactatatcataaaaaaaccagcggacctgcttacgatctgcaggtagatccgctggcggcagttattatttcctgcatctggtacgaatgtaccagatcagaactgctgaaataacaagaatgactacaaaataaataatggatgctgtaaatccctgaaaaagcatatttatccctgtaacagcaccatagcaaagcagtccgatcccagaagctctctgtaatttttcttcatcataaagcttcttccgtaaatctgcatttccgcccttcataaaaaaatccccatgtcctgtaagcagcataactcccactaccagcgacacaacagtaataaaaatgtccagtgtttcccccatcgttcttctccaatctttttaaatatgcatccattcctgcttaataaaagcaaatgatcggtacatcatattgaataatattatacaggatcgctgcattggcaggaggcatgttgatacatccgtgtgatcctccataaagatatctgtcaccgccaaagtaaggctgccaggatgcatcatgaaatcctatgccaccgttaaaaggcatccagtaagtaacctgtgtctcatattcataggtgccgtctggtttctgcttgcctcttaacacatctgggctcttcttccagtacaaagtataaataccttccggagtcttccgatcctcatactgcatatcccctgaaacaatatctgaatcaaaaataatgcttccgtcctgataataatacatatgctgtccagacaggtcaacctcaatataggtattgcccaggtcattatagccgtgagattctgctctttttgaatatgcaggctcacggactgtctgagtaccactgctgatctcctgggtcagctgctctacttcctgtgcctggtcgatctcccatccataaacagagctatatacatacactgtccggccgctggtagtatgaaattctctggtagttccaactgtatcatgatcctttgccagctgcgccacaaaatctgtaatatgctgcttaaaggatgaatcatctccgccgatcagctgacctttctcatctacttccagccagtccttcagggtgcctccgtccagcgtaacctgctggtcgccaaaagtataggtaatgcttgcctttgtataattattatatgcatctctggcagcctgcagatccggactgtcactggtaactgctgcctgaacatacacctccggatcacttcccagatccacagtagtctggctgcctgccactgccgcatcaagtaccttgtaagcttcctttactttcagttcactaccctgtgtctcaggaacgatctgaaattcactgccacttaaagcaacatatgcattttccggctttacttgattctcttcttttgcacagcttaatgccttcacctgattctgcagcaaagtcttatcataggtggcattttctttggtggtgtagcttctggtttcaaaaaaaccacggatccactcatacggcttctggctttttaaaagcaccagtatctcaccatctgatgcatactgataattaatactgcttcctgaaatactctcaggctcctggtctctcgccaggacctgaatagaatagttctctacctgccctgcaatggcctgctccacctcataggctgtcttgcctgagcaatccaaaccattgatctgtgttccacgaaaaaaatggttggaatagtagtatgatacagctgcataagcacagcctgcagacacgatcatcattgcagctactatccctgtaaccttcagacctttatgctttttcttatgcttacggggaactattgctgaatccaaatcctcatctgtaatgggcacatatgcgattttctttggacgggcagaccttctggatgaagattcctgcacacgcttccgggaaggctgcttcttttcttccttatgcccaggaacatcctcttcatactcatcctcgtactccgggtcttcctcttcatactcatcttcgtactccgggtttccctcttcatactcgtcctcgtactccggatcttcctcttcatactcgtcctcgtactccggattttcctcctcatactcatcttcgtactcttcgtctgttgtgatcggatccattgcttcattaatcctgtcttcaatggatggctggctttccccgcttcttctctttttattgctcatctatactctcctcaatggcaatcactctctcataaaatgtcacgtgctgttattataacacactttctctttttatgtgacttaaactataactttattttatccttacctatccattttatcctttagtcagttcgtttttgtaatctctctttaccgctttacagaatatctttcataacacgcaatgcatttccctgccacattttatcaatcacccgctctggcattttgtgctggagaagagcttctcgaagcttgtacaattcatcacagcttttgatctgtagctttccctctatgccatcaaaatccgtccccaaagccagcacatcttcgccacctacctgataaatatgtcggatatgctgaaacatatgggctatactgcttttcccatctgttcccagaaaatccgggcaaaaattcaggccgatcacgccacctttttcagcaatcgctgtgatcatactatctgtaagattacgtggatgaacagtaatggatcttgcattactgtgagatgcaataaaaggcttctgagtatgctttgccacatcccagaatccaccgtcagacaaatgcgaaacatccacaatgatgcctaagcggttcatttcttccagtgcctgaaatccaaagcttttcagaccgctggccatcactcccggatcattggaattaggatatccgatctcattctcataattccaggtcagtgtgatcaggcgaatccctctgttgtaaaaatgctgcagtttttccagactgtttcctacaggagtcccatcctccattgttaaaagtgcccctgttttgccggtgtccatacactgccggatatcctcacatttttttacaaaaataactttatcatggcactgtctgagatttttctcaaacacatcaatcatatgattagcagttacatatgccttttcatcccgcctggtggttccatatttacctacatcaaaaaaagtagaaaaacactgtatcagtgctcctgccttctcaagccgttccacatccacactgtatggattatgcatcagatctcccctgtgaaaaaccgatgccagttttgatactgtatcacaatgtaaatcaatcatttgttgttctcccaagttttctttctgtatctttgatcacataaaaatacatggtgatcagaagtatagttgccactatccaggctgccgggcttgcaagacaggctcctgcgtagctcttcttatgcgcagccaccacagctgtcacacctctgcccacaagctctgccacaccggacatcataggcagaaggccatatcccataccctggatcccgtttcgaagcacatttacaaaatgcagaggaatcatgaaaaatcccacacattttacatatgtatccaccataggcagtacagaatcgatattatctgaaatgaaaaggtatgcaaaatatttcccccagaagatcaatattgcaccggtaataatggcataggacactcctatgatattggcactgcgaaaaccttcccgcactctttgcacatttcctgctcctacattctgtgcattataagtagccattgctgtgcccagggccacatatgcctgtgaaaatatattttccactttctgcccggctgtaaatgcagcaactgcataggctcccaagatattcaatgcactttgcaccatcattgccccaatagctgtaatggaatactgaagccccatgggaatccctacgctgatctgattctttgccagatagggacggtattcccaatcatccctggaaagatgcagttccggcactgcctttataatataaagcagacacagaaaaccagaaacgccctgtgacaccaccgtagcccaggctgctcctgctgcccccatatgaaatatcacaataaaaacaagatccagaacaatatttaaaagtgctgccaggatcaggaaatataaaggtgttttactattgcctagtgctctcaggatacttgccagaagattgtacaacacctgtgcaaaaatcccaccgcaaatgatcatgatatacgcataggcatctttgaaaatatctgccggcgtattcataaactttaaaagactgtgcattccagccatacttacagccgtcatgactacagatacaacaatagacaaaagcgcagcatttcctactgtctgacgcatttcatccattttccctgcaccgaatttctgtgctgtaagaaccgtaaagccagcggtaaggccagtcagaaatccaaggatcaaaaacatgatagtccctgtggaaccaaccgctgccagtgccttcgtgcccacaaactttcctacaatgatagcatctaccatgttgtaaaactgctgaaatacatttccgataaacactggaatggtaaaatccagtaagattttcatcggctttcctgcagtcatatctgtccgcatgtttattcctccttatacagacatttgtccaaaaccgtatatttttgctgtgtatccataatagcagagagattatagcaaaaagcccctgcttccgcaagggctttttcgcgtattttcagtatgatcttttcgtaatttttgtgaattatgtgtataataaaatcctggattatttctggaccagaagagattttcctgtcatttcttccggctgttccatacccatcagctgaatcaaagtcggtacaatatctgccaagcatccattctctcttaatgtatatttaggatcagcattaaccaggataaacggaaccggattggttgtatgagcggtaaatggttcacctgtctcatagtcgatcaactgctctgcattaccatggtcagcacagataaacatctgaccgccaacttccttcactgcttccactgcttttccaacgcaggcatctactgtctccacagccttgattgcagctgcctcaacacctgtatggcctaccatatccggattagcaaagttgataatgatcacatcatacttctgtgaacggatggcatctaccagtttatcacatacctcaggtgcgctcatctcaggctgcatatcataagtaggaaccttaggtgattttacaaggatcctgtcctcacctttattcggctcttccacaccgccgttaaagaaaaaggttacgtgtgcatacttctcagtctcagcaatacgggcctgggtcatattatgagctgcaagatattcaccaaaggtattatgaagtgccaccttatggaaagctaccagcttgtttggaatggtatcatcataatctgtaaagcatacataagtaagattcaatctcttctcacgttcaaagcctgtaaaatcatctgaacagaaagctcttgtgatctcacgtgcacggtctggacggaagttaaagaatactacggaatctttatcagaaacaacggctaccggctgtccatttttcttgatcactgtaggaagaacaaactcatctgtttttccattgtcataggaagcctgtactgcctgtgcagcatctgtgccttctacgccttcaccctttgtaagagccttgtaagccagctccacacgatcccagcgattatcacggtccattgcataataacgtccggatacaacaccgatctgtcctacaccgatctcatccatcttcttctgaagttcttcaatatatccttttcctgatgcaggcggtgtatcacggccatcaaggaagcaatgtacataaacctttttcaggccttctcttttggccatttccagaagtccgaacagatgtgtgatatggctgtgcacaccgccatcagaaagaagtcccatgaaatgaatggcagaatcgttgtcttttgcatttttcatagctgtaagaagtgcttcattcttaaagaagtcaccatcctggatctcttttgtgatccttgtaagttcctgatatacaatacggcctgcgcccatattcatatgtccaacctcggagttacccatctggccttccggaagacctactgccagtccgctggcgtttcctttgacaaatggatactgagccatcaacttatccatcacaggagtagcagcctcatatactgcatttccgtcatgtctttcatttaatccataaccatcaagaatcattaatacggttggttttttactcataatttctcctttcgcatgtcaatttccatatacacggattgtctttgaaatccgtttcacagaagcacggttagataattcctggatagctgtcttgaaatcgccctcccgtacttttgcagtgatcacaactacttctgcacagtcatcatccttgcgctctttctgaatgatctgtgcaacacttacatgatattttgcaaaaacctctgtcatctcagccagcacaccacacttgtcttccacatggagtctgaggaaataccgattataggtgctttccatttttttcactggaagctgcttataacaggtacatccgatccgtccgcagcatcctgccaggatattgcgtacgatctcaaaaatatcccccacaacagcacttgctgtaggcatttctcctgcacctcgtccaaagaacatagcatcctccacagcatctccatgaacaaatactgcattataggaatcatttactgtagccagcggatgagtacttgggatcaacataggacacacatatgcctctaccccttcttctgtattccttgccacaccaagaagctttatatcgcatcccatctcttttgcataacggatatcctttgcagaaatcttggtaattccttcaatatacacatcatcaaacacaactctggaattaaatgcaacagaagcgagaattgccaccttccgccctgcgtccagtccgtcaatatctgcggtaggatctgcctctgcatacccgagctctgtagcaagggcaagagcatccttaaattccataccatcctgggtcatcctggtgaggataaagttggtagtaccatttacaatacccataacctctgtcatatgattgccggcaagactctgcttcagcggcccaatgatgggaatgcctcctgctaccgctgcttcaaacataaagtctgctttcgtctccccagcagcttccagaagctcccgtccatgtactgcgatcaggtctttattagcagtcaccacatgcttaccagccttaagcgcatccagaatgtactcttttgcaggatggatgccgcccattacctcgatgacgatctctatggaaggatcggcaacgatctccttccagtcattggtaagaagagaatcatctcccagcttcctggcagctttttcaagatttcgcacaaggatccgggaaatcttcaccttgcatccaagctttgctgtcatctcttcttcctggtttttcaatactttatatacacctgttccaacagtgcccagccccaaaagggctgcttttatgactctttcttccatcggagtccccctttttgtattcttactgtacacagcgttctacttaagatccgctgcgctgtctgtaaaaacacagatggatctgctgcgcctttaatagtatggcagaaacagggatttgtcaagcatgagagccttgaaaacaggcactgttcagttcaaacatgttcatttttctttacttcttcctccaactgacgctgtagaaaaccaatatagcaaaaacatccatacaccagaaaacatattccaaaagacagaaatccggctttgatcctgtatcccgattctatgcactcttccggaatacccactgtcaaaagagaaaacaacaaaaaggaaaaaaacatagtaacagccacagccacaattcttttacatatcttcataaacatcttctccttttcctgctaatagggtagttatatacacactatgattaatacaattttacattgataattaccttatatcaagaacaaattggacggtatgtctatatgataaaatatgaccgcttatgggaaacaatgaaaaagcgtggcatttcccagtacgcactttatacttactatggaatcgaccgctcactgctggatcgtttccgtaagaataaaaacatagaaatctatactctggatcgtatatgcactatcctggactgcaacattgaagacattgtagagcatgtgccggatccacctttgcaaaagcattaatactacagttctctatctgtatttttgtttgcatttccgtatcctattccttttttgttttgtacctgtcattagagcaatatggtctatttcgttcactgtaattcccactgcattttataagctccctatgtcacgtggctttatcatctaaaatagtctgatttcatctacgaaaaatcttgaaattctttcttttttctgaaaataatccttttttatttctcaatttgtggatataatgaaagcaggactgaactgaataaaaaactgcagctgttccgttcatttagggaatatatactctgaaaccgctgcaatatgaattgagaggttatcttatgaatgtatttgacattttaggacctgttatgatcggcccttccagttctcacacagccggagccgccaggatcggtcttgtcacccgtgctcttcttggccaggaaccggtatctgccaacatacttctccatggatcttttgcaaaaacatacaaaggccatggtacagacaaggcactggtagcaggcatcctgggtatgcagacagatgatgaacgaatccgtttttctctggatgaagccaggaaacagggacttgccgttaccatcacaacaggagaaatcgatggtgctcatcctaacactgcacagatcactctgatcgggaaagacggaaagcaggtatccctgcttggaagcagtacaggtggtggaaatattcttgttacacggattaatggaatggaagtttcccttaccggtgaaaagactacactgatcattctacacaaagacgctcccggtacgattgccgctgttactgaactggtggcaggctatggagtcaatatctgtaatttccggctttccagggaatccagaggcggacaggccgtcatgaccattgaagtggacggcaatcttgggactgccatcaacgaaaagatccaggggcttcccaatatttattccagcattatgctgcagccaatttaatgattgccacatcaaaagttgtgtgctcaggcatgggcatctattgaaaattgtaacaggaggttttctttctcatggagcttaactattcttctgtgtcccagctgatacaggaagccatcaaaaataaagtcaccatttcttccctggtattaaaccagcaggcacaacaaatggaactttcccagcaggaactttataagaaaatgctgaataattaccaggtaatgaaatcctgtatcacacctggctgtgccaaagacctgagaagtaccagtggtcttacaggaggcgacgcctggaaaatgaaacgatctgtagaaaaaaaagagaaccttaccggttctctgattggcggtgcactttaccgtgcgctggctgtttctgaactgaatgcttccatgggccggatcgtggcggcccctacagccggaagttgtgggattcttccagctgctgtcctgactatggaagaagaaaaacatctgtctgaaaagcagtgcgttatgtcccttttcactgcttctgccataggaatggtaattgccaccaatgcttctctggcaggagccagaggtggctgccaggcggagtgtggttctgcatctgccatggccgctgccgctattgtggaacttgccgggggaacaccggaaatggtaggttctgctgtcgccattgccctgaaaaacattctgggccttgtatgtgaccctgtagccggtcttgtagaaatcccctgtatcaaacggaatgcttccggagttaccggtgcttttacagctgcggaactggctcttgcagggatcaaaagtgctattcctgcagacgaagtgatctggagtatgaaaaagattggcgacgttatgcctgccgccttaaaagaaactgctgatggtggtcttgcagccacacccacaggccgtaaactgcatacacaggttttcggagaatagctccggagtttcttcgctttctttacgaatataacactttacaaaaacgcccctataacagtccaatcagtaaaatctactgattgccaccgtatataggggcatttcattatttcttattcagatacagcgatcacaaaccgctgatccttatttcttgtagtttacgatatcgccaaactctggtttcagagaagcaccgccaacaagaccaccatcaatgtcagcctgtgcaaacagttcaggagctgtctttgcatttacagaaccgccatactggatacggatctcagctgcagtagcctcatcataaatctcagcgatgcatgcacggatgccagcgcatacttcctgtgcctgctctgtagtagctgtcttacctgtcccgatagcccagatcggctcataagcgatcacagcagtcttagcctgctctgcagtcacaccctggaatccaacctttacctgctgacggataaagtccatagtcacaccctgctctctctgtgtaagagtctcgccgcagcacatgatcggagtgataccgtgctcaaatgctttcaacattttcttgtttacagtctcacttgtctcagcaaagtattctcttctctcagaatgtccaagaacaacatatttaactccggcatcaaccagcatgttcggggaaatttcgcctgtgtaagcacctttctcctcaaaatacatattctcagcaccaacctggatgttggatccttttgcagcctcaactacaggaaggatatcgattgcaggtacgcagaatactacgtctacctcatcatttactactaatggctttaaagtctctactaatttaactgcctcgctgggagtcatgttcatcttccagttaccggcaatgattttctttctagacattttatatatctccttttgcactcattaagtgcttgtattattggaatcaccatgtccactaaattcaagcttcaccttcggttcgctttcattaaatgtccaggtgggctttcatactaaattcggcctgcacctacggcttgccctcattaagtattcaatgcctatttatcgttagctgcagctactccaggaagctctttgccttccaggaactcaagagatgcaccgccacctgtggagatgtgggtcatcttatcgccatatccaaggatattaactgctgctgcggaatcaccgccgccgataatagttgttgcatctgtatcagccagagcctttgcaacagcctctgtaccatgagcaaagttcggcatctcaaagcatcccatcggtccgttccaaacaactgtcttagcatcttttacagcttctgcaaacagcttctctgtctccggtccgatatccatgccttcccatccatccgggatttcgccacgtttcacaaccttgatattgcagtcattagagaaagcatctccaattctattgtctacaggaagaagaagcttaacgcctttttcttctgcttttttcatcatatccagtgcatactgaagataatcatcctcgcaaagggaagttccgatgtgtccgcccattgccttagagaatgtgtaagacataccaccaccgatgatcagggtatcgactttgtcaagaagattgttgataacggaaatcttgctggataccttagcaccgccaaggattgcaacaaacggtctgttcgggttatttactgcattgccaaggaaatcaatctctttctgcattaaatatccaacaacagctgtatcaacatatttggtaacacctacgttagagcagtgtgctctgtgagctgtaccaaatgcatcgttaacaaacacatcgcaaagagatgcaagttccttgctgaactcgtcaccattctttgtctcttctgcacgataacgtgtattctcaagaaggatcacatctccatccttcatagcttctactgctgcttttgcattcggtcctactacttcaggatctgctgcaaatttaacttcctgtccaagaagctcagaaagacgtacagcaaccggtgcaagtgataattctggcttcggctctcccttcggcttacccaggtgggagcaaaggataacctttccaccgtcagcgatcagcttcttgattgtaggaagagctgccaccaaacggttctcgtctgtgatcttaccatcctgaagaggtacattaaagtcgcatcttacaaggactttcttgccttttacgttgatatcatcaacagatttcttattcagcattttgttatgcctccttttaactttatacagacaaaaggatccggtcctatacagaccggacccttctctgagtctatttgtatgctttacagcactgaaaccctactctgccggaaattaagcgttcagcagtttaccaaaatgtttgattgtacgaaccatctggcttgtgtaggagttctcattgtcataccaggaaacaacctgaacctctgttgtgccattctcaagtggaagaaccattgtctgagtagcatcaaacagagaaccaaatctcataccaacgatatcgctggatacgatctcgtcctcgttgtatccgaaggactcattggaagctgctttcatagctgcattgatctgatcctttgttacatttccttcaacaactgctgtaaggatagtagtggaacctgttggggtcggtacacgctgtgcggaaccgatcagtttgccgttcagctctgggataaccagaccgatagcttttgcagcacctgtgctgtttggaacgatattaactgcagctgcacgggatcttctcagatcgccttttctctgcggtccgtcaagtgtcatctgatcgcctgtgtaagcgtggattgtgcacatgatacctgatttgatcggagcaaggtcatttaatgctttagccattggagctaagcagtttgttgtacaggaagctgcagaaatgatgtgatcctcttttgtaagagtctcatggtttacattgtaaacgatagtcttcagatcgtttccagccggagcggaaatgataacatgcttagcaccagcatcgatatgagcctgtgctttgtctttggatgtatagaaacctgtgcactcaagaacaacatctacaccgatctctccccatggaagctcagcagcgttagcttttgcatagattttaatctcttttccgtcaacagtgatggaatcctcgcctgctttaactgtatctgcaagagcgtatcttccctgtgtggaatcatattttaataagtgagccagcatcttaggagatgttaaatcgttgatagcaacgatttcaaatccctctgctccgaacatctgacggaatgcaagacgaccaatacgtccaaaaccgttaattgcaacttttactgccatgataaattcctcctatgaattaaatggtaaattatgatgtacctttgttaaagaaacatcaacctacggcatattgtacctaattccaaacaaaaattcaagagcattttagaaaaaaccttacaatcatctgtaaaaacttcctaaacttatgctacaataaagaagtatgttcaaatgaaaggagttttcagccatgaagaaccagatcctgtgggactgccatatgcactcttcattttctgcagattcagaaacaccaatggaggacatgatccaggcagccatttccagaaatctttccggcatctgctttacagaacactttgatccggactatcctgctgatccggacggcctgacttttgaccttgatatcccggcttatcatgccaggctgcatcatctgaaagagaaatacagccaggatctgcagatccattttgggattgagatcggacttcagcctcatctggcccggcaattccgacagcttttagaagattatccctttgattttgtgatcggatcctcccatgtggtacatggtcaggacccatactatccggaattttataagggacgtaaagttacccgctgctatatggaatactttgaatctatcttggagaatctttctgtatttgaccaaatggatgtttacggccatctggactatattgtccgatacggcccagggcaaaatgcctcctactcatatggacgttttcaggatatcctggatgagatcctgaagcagctgatccgcagacaggtaggacttgagcttaatactggtggctatcattatggtcttggagagcctaatccatgcagccaggtgatccggcgctaccgtgagcttggcggagagattgttaccatcggagctgatgcacatgatccgtccaaagtggcttacggctttgaaaaagccgcagaccttttagcagactgcggcttcacatattacactgttttttgcggacgaaagcctcagttcctgaagctttgatcgattgatcaatcccatcatttctgtattttctcaaagagaagggagaggaaacctctttcttctttttcttctctttcttcgagttttacgtaaagtgtgtggatccatgctgtgatcacgtcgatcaataccggtgaaaatgtcatcaggataaacacaaggataatcataccaaactccaatgcacccagggcaagaagcttctgcaggatcaccgcagctgcaaaaaagataaactgcataccgtaaatgatcactttacgataccggttcaacggtgcataaaccgtcttcagcgctgccatataattccatcctgtaacaagcacacaggctgtgttcagcatctcattagaatgatatacattctggcatacaagcataatagtaaatacacagcctgtaatcgtaactgctgccggaaaggcattcataaatacataccgtagaaagccctgctggatcctgttaaaattattttcctgtgcaagcaggaacgtagggatccccacggcgcaggtgctgatcagagacatctgaattggttcaaaaggataagcatccccccagaaaattgtgatcaggcaaagcagcaccgaaaaaatcgtcttgatcagaaacatggatgctgctgtacgaatattatttaccacacgccttccctggttcacaatatccggcatagcagaaaaattagaatccagaagcactatatttgcaatattcttagcagcatcactaccctctgccattgctacactacagtcagcctcttttagggcaagtacatcattcacaccatccccggtcatagctactgtatgcgcctgtttcttcaaggccagcaccatttcttttttctgctggggtgttacccttccaaacacagaacactctgccactgccttttccatctgctccggtgtggtgatcgtagtagcatctatataatgatccgcatccttaagtcctgcctttcttgcaatggcagcaaccgtaaccggatcatctcctgaaatcaccttaagatccacaccttgactgtcaaaaaatgccagcgtttctggtgcatcctcacggatcacatctgtaagaagaaaaagtgccaaaggcttcagatcttttggaagctctgtacctgtgctttcctctttgctggctgcaagcaccagcactctaagaccctgtgcaccataaactgcacagacatccagaagcggctgatttccctctggaaacaaaaactgtgctgctcccatcaaatatgtgccttctccttcaaatacagcgccactatatttcctgtctgaggaaaaaggaatcacatgggaaaccttcaaatcatttttctttgtaaagtaatgatttaaggcctcagctgtagcatttttatctttcagcacataaagcagattacccataatatggcggatctcttcctggctttcttctgagtcttcaactgtttctggatttgacaactgaaccacaggctgctctgcatctgcttcaactatattggtttcagctgtatctatttcaactggaattgtattggctgtatctgccacagcaacaggcagggcaggcaaaacttcttctgtcttcccggtatcttcagtccgttttaaagccatcttataagaaaccacttcctgtaccttcatagaaccggaggtgatggtgcctgtcttatccaagcacaaggtatctaccctggcaagcgtctcaatacaatacaattcctgcaccaatgtattcttcctggtaaggttcaatgctcccaaagtcaatgccacactggtaagcagaacaagcccttccgggatcatcccaagaactgcagaagccatatttaccactgcatcccggatattatcacctgctatataatactgcttgtaaaacagcagcattcccataggtacaataataatactgatcaccttcaggatcgcattcagggaattacgcagttcagaattatgccttttaaactcctttgcttcactggtgatctgtgacgcataattgtctttccctacatgaacaacctgacagcaagcctctcctgctgtgacaaagcttcctgaaaaaagatcgtccccaggattcttggtcagattgtctgcctcacctgtaaggagagattcatttacctcaatacttccctcaagcactctggcatccgctgggatctgatctccagttttcagaaacagaatgtcatccagaacaagctgatctgtaggaacactccacttctgtccttcccgcaacaccactgctttactctcagtaaggattgccagcttgtccagggtcttctttgcgcggatctcctgagcgatacctatcactgtattgacaatgatgatcccgacgaacatggaattcttatatgatcccactaaaagaaccaggacaagaagcaccagattgagaaagttgaaaaatgtcagcgtattctcccggataatctgcttatatgtcctggtattaggattctcatttgcatttactttgcctgcatcgattcgttcctgaacctgttgatttgtaagtcctgtcatcgttattttcctttttcgtaactgtttcacacactggcatctgcaatgcaaaaactttccagatcacctgaatgaatactgcctgcaaaacagttaccctttttctttttatctcttttgcctcgaatttaagatgaatcttctcacttcaagtcgagcagttactcaacacctgaaagaggtgggagtcttctcgactgagatagactataacgactgcagcctcacctgtatcttgggcctgggaagagattaatactcctcttcctcagcctcttctccctcatggatatcactctttggcttctttaatccttcgatcttgatgccatgcttctgtgagtaatcccataatgcagcatggatggcttcctcagccaaaagggaacagtgtacctttactggcggaagtccgtcaagtgcttccataaccgccttattggtaacttccatggcttcttcgatggtcttgccttttaccatctcagttgccatactgctggtcgctactgcagcaccacagccaaaggtcttgaatttgcagtcttttataatatgtgtattctcatcaatgtccagaaagattctcataatgtcgccacatttagcattgccaactgtaccaacaccacttgcgttctcaatctctcccacatttctgggatgctgaaaatgatccattactttatcactatacatgtttttttcctcctgacaagtgcttttacactttttttagatttagcttctttatttgttctgttttttcatgaaatcttcatataatggagacatgcttcttaaattcgccacaatatcctttaacttatccacaacaaaatctgcatcttccatggtagtctcttcgcttaaggtgagacggagggaaccgtgtgcgatctcatgaggcagtccgattgccagaagtacatgggaaggatccagggatccggatgtacaggcagaaccgctggatgcacagataccaaagctgtccagcatcagaagcatagactctccttccacaaactggaagcttacgtttacattgtttggaagtctcttctttggatgtccgtttaattttgcatatgggatttcactggtgatccggctaatcagatgatctctcaccaggacctcttttgcagtacggtcagccatggaatgcattgcacgctctgctgccacaccaaacccaacaatacccggcacattctcagtacctgcacggcgctttctctcctgagctccgccatgtacaaagctgcggatcttaacgcctttacggatgtacaggaaaccgatgccctttggtccattcagcttatggccgctggaactaagcatatcaatgccaagctcatccacattgatgggaacctgaccaaatgcctgtactgcatctgtatggaaaagaatgccatgctctttggcgatcattccaatctccttgatcggctgcagtgtaccgatctcattatttgcaaacataacagaaatcaggatggtctccggtgtaatggccttttccagctcatcaagctttacaactccattctcatccacatcaagataagtgatctttgcacctctttctttttccaggtattcgcaggtatgaagaatcgcatgatgctcgatcttagtagtaataatatggttgccttttgacttgtaagcctcaaaagttgcttttaatgcccagttgtcagcctcagaaccgcctgctgtgaaataaatttcctcttttttggcgccaagaacatttgcgatctgctctctgccctttgtcacagcatctttgctttttccggcaaaatcatatacactggagggatttccatacatttctgtaaaataaggaagcattgcttccacaacctccggtgccgtctttgttgttgctgcattgtccagatatatcatttttcccatttctatgtcctcctgtcatagtaaagcagactccttgctactgctttacagaatgaagatactacctactgaatagttactatcactcttcgttttttgtacggctgttagggcagatcactccattgcctctttgctgtccctgattcttttcctgcactttaatactttcgcagatcagttctcccagggtcattgtatccacagcctgtgtaatactgtcatttatacgtttccatacgtatttggcaacgcaaagatcagcgcctgtgcattctccgctgtcttcgttgccggcacactccacagcctccagactgccttccagcactcttaaaacgtctcccacagaaatctcaccggccggcattgccagacgatatcctccgcaggctccccggctgctcttcacataaccggctttcttaagaagtgccatcagctgttccagatatcccatggaaatcccctgtctgtcggcaatactctggagagatacgctctctgtctcactgtacatgcctaaatcaatcaacgccctgaggccatatcttgcccgtgtggaaaatttcattttatcgcctctttttaattcctagtgttttccttggatttcacctaactttaccagatacatttcgttctgtcaaggtgctttttagaatatactgataaaaattatatattcaggcggtacggttatgtcaaaggaacaatttctgaaaggaacattgattcttacctgtacagggcttctttgccggctggctggcttcttttatagaatattcctttcacacaccattggtgcacagggtgtggggatttatcagctttctctccctctttctgctttgctgcttgcaatgaccgcttttggtatgcaggcagtgatctcccggggctgcgcatcactgcaagctcttggaaaggatcagcaggcaaaagatacctttctccttggaacaggcatctgtatgtttttgtctgttggtatttcatttattttatataaaaatgcagtttttattgcagtccggattctgaaagagccggccacccttcccttgatttgtcttatgtctttttgttttcctctcagtgcgctacatacctgtgtcagcagttactattattccatgaagcaggccctaacgccttcctgcatacagttatttgaacaggcagtgcgtattggcagctcttacctggtctatctgatccttctgtcagaaaaaaagccggttacaccgcttcttgccggcattggtgccctttgcggagagattgctgcctgcctttcatcccttcttacccttggcattcattttcaaaaaacttcctataaaatcagatttatccataaaccctttgcatccatctgccggcttttttgggaatcggttcctcataccttaaataaagtattgctcaccttacttggcagtattgaagtggtgctgatccccggacagttacaagcatatggtctgtcccgtacagacgctcttggggtctatggagtctttacaggcatggccctgccgcttcttctttttccttccgcccttaccacctccgcagcagttatgcttatgccttctattgctcagcttcaggcacttggaaacagaaaaaggatttcctatgtggtccgcagttcctgcatgggctgtctttttcttggatgtatctgtgccctgttttttctttttttcggtcactttgcaggtgtttttctttttaacagcattactgccggaaactatattacctccctggcttttatctgcccatttctgtatatgaataccgccatggtcagtatactaaatggccttggaaaagcttcccgctgtctgttccacaacatgtgcggagctcttctccggatcctgtttgtaatctttgccattcccgctatgggaatccgaggctatttttatggtatgctgtctggtgaactgcttctttctctgctgcatcttattgccctgatccggtattttactcatctgcaacaagcatctgcttcaagactacaataactttttcttatatactgtgataatttttctatcgacattctcaaaaacttgttctataataaaaaactgatagcaaatgcaaaggagaaagaaaatgggttttgaattcatcaaaaaattacctacaccagacgaaatccgcaatcaatacccgattgatgcaaaaatcaaagctcttaaagagaaacgtgacagtgagatccgtgatatattaactggaaaatccgataagtttcttgccatcatcggtccctgctctgctgacaatgaagatgctgtatgtgattacctgttaagacttcgtaaggttcaggagaaaattgaagataaagttttaattattccaagagtttatactaataaaccacgtacaacaggcgaaggctacaaaggaatggttcatcagccagatcctgagaagaagccaaacatgcttgccggactgattgccatccgtaaaatgcatatacatgccattcaggaaagtggatttacctgtgctgacgaaatgctttatcctgaaaactggcgttatctttccgatattctttcttacgtagccgtaggtgcccgctctgtagaagaccagcagcaccgccttactgtaagcggcatggatatccctgccggtatgaagaatcctactagcggtgatttcagcgttatgcttaattctgttgttgcagcccagggaagccaccgttttatctaccgcggctgggaagtagaaacatcggggaacgaatatgcacatacgattcttcgcggtgctgtaaataaacatggagaagccattcccaattatcattatgaggatctgcgccttctctacgaaaaatattcagcaaaagatctgaaaaatatggcgactattgtagatgccaaccactccaattccaacaaacaatacgaacagcaggttcgtattgcaagagaagtgcttcatagccgtgctgtggattctgatatccacaagcttgtaaaaggtcttatgattgaaagctacattgaacctggcaaccagaagattggctgtgcacctcatatctacggcaaatccattacagatgcatgtcttggatgggaagaatctgaaaaactgttatacaccattgctgaattgtgctgatgttacaataaaagcccgcctcagatcagtgtctggggtgggctttcatatatacatcccgcatgcggttcatattcatacttaagtatatctgggttgtggaaatatccgaatgtccaagcatttcctgtacgcttttaatatctgctccattttgcagcatatgtactgcaaaagaatggcgcaaggtatgcggtgtaatatcccgcttgattccggcatcgtctgcatatcctttcagtaccttccagaacccctgtctgctcattgctttcccggagcagttggtgaacaaagtcttctctttactgtccttaacaaaagtatctcttgccttgtccatatacaggatcaaggcatcccgactcacattgccaatgggaatgatcctttctttctcatgttccttgcaggtcacatatcctaattggagattcacctcatctacctgcaaatgaatcagttcgctgactctcataccagtagcatacaataactccagcatggctttatcccggatccctttaggtgtattcagatctggctgcagaagcagaagatcaacttcctgaatggataatatctccggcattttcttctctactttaggtggcctcagattatctgacggatccttttccataccgttgactttcatctgatactgaaaaaaagcacggatggacgctacacttctggatatggtagaagacgcaaattctccacgctccatataatccaaatatccctccagatcaagttcccgcacagcctttgcttcacggatcccccggtcttccagaaacctggccatttttcttaaatcccgctcataggaaatctccgtattgctggatgacttctttgtttcatgcagataactaatgaaatcatgtatctctctttccattttctcttcttcctgtcacgttcaatacttgtcattcatactccccattctgaataacaaaaaatgtaactgtattatactttgaaattaacataaaatcaaaccctttttttctctgaaatgctgataagttggggctttccgcatttttacacaaaatgtcgacttttttatggtaacttacaccacatatggtgtaaatacattcaaaatatttttaaagtcatcaaaattttttctgttatccatggatttacataggcttccaacagcattccgaggaagtaaatgccccctgtccaaactgtctgccaggaatatccagctgctttgtccggaaaaatcccctgatttttccacatgcttatggattgtttaaaaaccatgtccagaagcataaacagggcaggcagatagatcagatactgtggaaaaaggagggcaattcctgctgccgcacctgccagaccaaactgaaggatacatacggtcagcactgcaccaatcccaaagcctgctgcaatcacagttccaactgctaatggcacaccgaaaacagtaaatccgcacactgcacataatataaaaaaacttcccctgcttttcaatatttctccaagaagtccggttccagccagctcctgtcctgaaaaagagctaagcaggtacatagcagctactgttttctgctgccatttcattttccacataatattgggaagaatggtacctataaaaaagccacaaaaaaataaagctgaccagggaaaaaattcctttccttttattctgccttcctttttccccatatccttctcctgtctttttatgatgtaactgtctgacacagcagcatctttttctcttttccatcttacgcttcccatatagaatttatgcagttctcattaccgaaacactgtaatcatttatatattttttcacacaaaaacaggaaccgttttcctttggtttcccttgggaataacgattcctgtatcttatcttcctgaatgacagcttggattatttagcataatccacagcacggctctctctgatcacattaactttgatctggcctggatattcaagctctgcctcaatctgcttggcaatatctcttgccagaagaaccatatctgcatctgtaacatgatctggaacaaccataacacggatctcacgacctgcctgaattgcaaaggatttctccacccctttaaactggttggtaatatcctccagctgtttcagacggttggtatatgtttccagtgtctctctacgagcgccaggacgggctgcagaaatagcatctgctgcctgtacaatgcaggcgatcaatgactctggttctacatctccgtgatgagcagccactgcattaataacgattgcagattctttatatttcttgcaaagatctacaccaatctgaatatgtgagccttctacttcatggtcaatggacttaccaatatcatgcagaagtccggcacgtttggcaatacgcacatcagcacctacttcaccagctagaagtcctgataactgtgccacttcaatggaatgcttcaatgcattctgtccatagctggaacggaatttcatccttcccagaagtttcagaagctctggatgaataccatgcacaccaacatccatagcagcagtctccccatcctcacggatctgggcttccacttctttctgtgccttctcaaccatttcctcgatcctggccggatggatcctgccatcaacgatcagtttctcaagtgcaactctggcgacctcacgacgaatcgggtcaaaagcagaaagaacaactgcttccggtgtatcatcaatgatcagatctacacctgtaagtgtctccaatgtacggatattacgtccttctcggccgataatacgccctttcatctcatcgcttggaagctgcacaacagaaatcgttgcttctgctacatggtcaactgcacatttctgaatggcatttaccacatactccttggctttcttgccggcttcttcttttgccctgttctccagttctttgtaaagccttgcaacatcaaccttcacatcatcttccacagatctgagcagctcttccttggcttgttctgaagtcagtcctgaaactcgttccagttcctgtactcccttctgctcaagttcgtccacccgtttttctttcttctgtaattcagcatatctcgctgtgcactctgcctcacgcttctcaactgcatccgctttcttatctacggcctcttcctttgataagacacgtttctcatacttctgcagttcatttcttcgttccttggtttctttctccagttcattttttgtacggagagattcttccttcacttccaacaaagtttcccgttttttcgtttctgctgtcttcaaagcttcatctatgatgcctctggctttgtcttctgctgatccaacagtttctgcgtctttttttactttatttgccacagcaactttagtagtaataggaactgcaataagtagcgcgactaccacagcgacaaatgcaacaataattgtgcttgtcacaggagcacctccttattcggttttcattgtacaattacaacaatataagtttatatgtttttgataattatgtcaagtttttctacagaaaaatgaaatttatattttggcaggaagaatcccacagttatttgcagaacgatgtattagattccatctggatctgcagttcctccagcacatgggaaatatcactatagccaaaacctcttcgcaacagaaatccctgaaggcggcgcatccccttttcgtccaggactgtgcctggctggcatttcttaaggacagcttccttaaggatcttctgttcatccggctgggtatactctgatacctgctcccaggcagtctgggcagtctccttgtccacacccttttgaagcagttcctgaaggatcttgcgcctgctcttagactggattctgtatgcaatgtaattctccgcatacctgccatcatccacatatccaaaagagcttacataagccactgcatcctccactgcctctgtacaaaagcctgcctgacgcaaacggtcagacaggcctttctctgtacggtccatatgctcaagaaggagcaaagccttcctgcgggccgcctgttgttcttctcttgtaagtcccatggatcaggcctcatcctctggggaagctgctgcatctgcctgcgcattgtcctgggcagacactgtctcttcttcctcagggagcagatggtaatggatccttaccttcttctcaatctcatcacgaatatctgtatgctctttcagataggctttggcattctcccggccctgtccgatcttattgccattataagcataccaagcaccactcttattaacaatggaacagtctgctgccagatccaggatgtctgcctctctggaaatacctgtaccaaacatgatatcaaactctgcctgcttaaatggtggtgcaaccttgttcttcaccaccttgatcttggtgtgattgccaaccatctctccgccctgcttcagagtctctacacgacgtacatccagacgtacagaagaataaaacttcagtgcacggccaccggtggtagtctccggattaccgaacataacgcctaccttctcacgaagctggttgataaagatcactacgcagttggacttactaataatagctgtaagcttcctcaaagcctgggacatcagtctcgcctgaagccccacatgactgtcacccatatctccatcaatctcagccttaggtaccagtgcagcaacagagtctacgatcacaatgtccacagctccggagcgtaccatcgtctcagtgatctccaatgcctgctcaccattatctggctgtgaaatataaagattgtcaatatcaacacctatattcttcgcataaacaggatccagtgcatgctctgcatcaataaagccggcaatcccgccacgcttctgaacctctgctaccatatgtaatgctacggtagtcttaccactggactcaggtccataaatctctatgatacgtcccttgggtacgccgcctactcccagtgcaatatccagactaagggatcctgtaggaaccgcctccacctgcatactggcacctgactcgccaagcttcatcacagatccttttccatattgcttctctatctgccccagagcagcctccagggctttttgcttttcttcatttatcattctatggcagtctccttattcttgtatttttcataatacgaacctatgttcgtgttttctgctaccatagtataataaatctgtgtttctgtcaagtctttcctgcaaataagaatggattatctttcgacaaaatatgacaggatcagccaatcagccaattatacatctcttcatattgccgtgcagaattaccccaggagaaatcctgtgccatagctctgtcgatcatcttattccattcacgcttcttatcatagtagatacgctctgcataacgaatggtactaagcatctcgtgtgcattgtaattacagaacgaaaatcctgtaccagtgccttcaaactcattatacggctctaccgtatccttcagtccccctgtctccctgacgataggaagagtaccataacgaaggctcatcagctgactcaatccgcatggttcaaacagggacggcatcaaaaatgcatcagctgctccgtaaatgcggtgggacataccctcatcataataaatctgtgcagataccttgccatgatatttccagtcaaaatgacggaacatattctcataacgttcctcacctgtaccaagcgcaacgatctgtactgcatcctggcaaagttcatccataatatacgcgatcaggtcgaagcccttctggtctgtcagtcttgaaacaataccgatcatcatagttttcggatcctgatccagtcccagatccttctgcagctggatcttattcttgatcttctctttacggaatgtagttgcattgtacttggaagaaaggaaaatatctgtatccggattgaaatcattgtagtcgataccatttacaatgccccgaaggctttcggaacgtgcacgcagcagtccatccagaccctccccgtaaaacggagtcttgatctcctcagcataagtacggctaacagtagtcactgcatctgcaaatacaataccacccttcaggaaattagcatctttatatgcttccagcttgtccggaacaaaatagtaatcagacagcccggtaatttctttgatggtctttacatcatacacaccctggaatttcagattgtgtatagtcataactgtcttgattccccagaaaaattcattctgctggaagctgtcatgcagataaaccggcaccaggcctgtctgccagtcatgacagtggatcacatccggtctgaatccgatcacaggaagaacagaaagtactgccttggaaaagaatgcgaacttctccaaatcccatggtacagtatcataaggcttcggaccactgaagtaatattcattgtcaatgaaatagaactgaatcccgtcatattccatcctgagaattccaacataacagttcttatatcccagatccatataaaaatgggtaacatattccattttatctttccattcctgccgcatgcaggcatatttcggcaatattacccgaatgtcaaaatatctcttatcaaagcacttcggcagagatccgactacatctgccagtcctcctgttttaataaaaggcactgcctcagacgctgcaaaaagtatattcttcatccgtaaattccctccttggtatggattcactgcattctccttctatgtccggagaaccgtattactgcctttattataccctatatcctttctaatggaaagagcgatttttatattcaagtcttattttgtctgcgatcagggcaataaattctgaattggtaggctttccttttcctgtacttaccgtatatccaaacagtgcatctatggtatccatttttcctctactccatgctacttcaatagcgtgacggattgctctttctactctgcttggagtggtctggtgtctttttgctatagtaggatacaggatctttgtaatggaattcaacatttccatatcattcacagacaggatgatggcatctcttagatactgatatcctttgatatgtgccggtacaccgatctcatggatcacatttgttacatcccgttctaggtcaccctgtgaaaagcagccaccctcttcactttttccctgtcttgaaatttcttttcttcttctgtcacccagatgccttgcatgcttgatcctattcagcagcatctgattgtcaaaaggctttaacatataatattcagccccaagattaaaagcatcctctgtgatccgttcctgccctactgccgaaactacgataaacgcaggaatctttttcagcacactgctatgtacacatctttccattacggaaagtccgtccatcttaggcataataatgtccaggatcaccacatccggctgcttctccctgataatgttacagatttcttctccattgtgtgcttttcctaccagtgatagctctttgtcttcctcaatcatacgtcccagtacttctgtcattttctcgttatcatccgcaatagccacatttaacttttccatgaggcatctctcctcctaacctgttacctctttttactagattaacagttgctattatagtggaatccaaatggggaaatcaagccgaaagtgtcggtttcactggattttcgttcgataactttcgacttttatccgccatatccaaccattttttaccctttttccgccagcatattttcaataaaaatgccgtatccgctggccgcatcctgtacaaacacatgagttacagcccccacgatctttttgttctggatcaccggactgccactcatcccctgcacgatccctccagttgccgcaagaagctttggatctgtcacatggatcacaaaactcttattactgtcctgatgattcatgtctatttttgtaatttctgctgcatattcttttacctgtccgtttacactgcataaaacagatgccggacctgtttccatttcctgtttgtagccaattttcatttcttttaaagcaattccgtccccacctaagctttgatattttccgtaaatcccatttgccgtattttttgtaatggagcccagcacatttcccacattatagcgaattaatccagacaattcaccaggattgcctttacttcccttctgaatgcccagtatctgggttttgtataaagaaccgcctttaatagacaatagttctccagtatccacatcactgattccatgtcccagtgctccgtaatttcctgctgcgtccacataggtcagagtaccaataccctgggtgtcatctcttacccagattccaagcttgtaatctcctgtctgatcttccacaggcatcaaagatacctttatctttttcccctgtctgttcagggtaaggctcacttccttcccgtcagtttttttcagatcctttatcagttcctttttgcaggatactttttgttgattaaaagcaacaatataatctcccggctttacaagatcctcagcaggcgttatctgttttccgtccctggaaagaatttcccctgtatcaatgatcagtacaccttctgttttcatatacatacctactgtacttccgcttaccaaaaggctggtgctttctgctggtattaccttcacatccttaaaagggatcaggccaaataaacgacagggcaaaaaataagccccatccccggaaacaggcactgtgtcttcaaatgtaacaaagggacgggccagcattgcagacacgtcctgatcctttcctttttccacatggatctcatccggtattttcaggttcaggtatcttatacccaggattcctatcaccagcagatccagcccaagacaccataaaaggaaacgtctgtatcttttctttgggttcatttttgtcacatccttttcctttgtatttatcatcttctatcaaaaaagagagaaaagccggatacctgctccggtcattcctctcttagtatgtgatgaatcttttatttcagtcttgtatttttatgtaccagtgccaattctttcatttcccttgcattttccagcactgcatctgtgatctttgcaccgcccaggagccttgcaagctcccggatagaatcttcaccttctagcgtatggatctgggtgatcatttcattattttccacatgtttttcgatttcaaaatgggtatctgccattgcagcgatctgaggaagatgagtaatgcagatcacctgatgatgtctgccgatcactgccattttttcggatactttctgagcagtccttccgctgataccagtatcgatctcgtcaaaaataagagtctcaatctgatctttatctgccaggatcgctttcagtgcaagcatgatccttgacaattcaccaccggatacgatcttgccaagtggtttcctgctttctcccggattggtagatatttcatattcaataacatcatatcctgcagctgtacagcttctggcttgcttgaaggaaatggcaaaatccacattggcaaaattaagatcctgcaatccctggatcacttttgcttccagctgtctgctatattctttcctgatttttgataattcatccccatttttttggagaactttttcacactgacaaagtttttcttttgcttcctgataaagctggtcatattgttgtattttttccagtttttccatttgctgcttctgatattccaggatctttcctatgctttgaccatattttgctttcagcccattgatctgatccagtctgcgttctgtctgttcaaaggtttcctggtcaaaaaccatatcctccatataagaagacagctcccggttaaaatcgttcagcagactgtctacttctcccagcgaactttccaacccagccagttcttcatcatattctgagactctggacaattccctgagtgcttctcctaccagatctcctgcactgcttccttcatatccggtaaagcctctcacagcctgcagagcatccacgatctttcgtccattggacaatttgcggtatgtcttttccagttcctcgtcttctccttccctaaggacggccttttcgatttcccggacttcaaattcaagaaaagcagactctctgtttctctgttcctcatccatgttaaaggcctgaagctctttctcgcatttacgatattctttataagccttttctactttttcttttactggctgtattttttcttttccatagatgtccaggatctccagctgtttatccggatacagaagagactggtgctcatgctggccatgaatgtcgatcaggcaggctgctgctgccttcatctgggatactgtgcaaacttccccattaatcttgctgatgctccgaccttccataatcttccttgacagaagtacctgaccatcctgtggataaatatccatagattccaacgcctgttttgcttttgtattttcaacttggaataaaagctccaccaggccgtaggatgcattctcacgaatcatccccctggaagtcttgcctcccaggatcagctgtatggagcctaaaagaatggattttccggcgcccgtctcaccagtaaggatattcagtccagggccaaattccacttctatttcttcgatcagtgcaaggttttttacgtgcagatgaaccagcacaaaagccacctccttattttatgcaaaacgctgtcttaacttcctacaatctcattcagcttctttaccacacttactgcctgctcagatgtcttgcaggcacatataatagtatcatctccggctatacacccaaggatctccggccatttcaatgcatccagcgctgtagccacagccatggccatacctgtaactgtctttaccactaccagattttgtccagtatccatggagttcactgcatctttcagcactctggaatacttatctccaagctctgaagaaccgtgatccaggatcgcataacgggatttaccatcctttaccgttacctttgtaagcttcaatgcccgtatatctctggatactgtagcctgcgtcactttaaagcctgcctgattcagcctggcagccagttcttcctgagtatctatatcatattgccggatcaattcgataattttttcatgtcttgctaatttcaattttcatcctccctgatccagatgctgtatcctttccaactattttcgtaactgttcaatacccttacagttacgaaacaaaaatcatctttaattcttaactgtctcgcatcttctgacggatcacttccacaaaactcaaatggtttagtttcaggatctttgtcttttcctctgccctgcgaatcacgatccggtcaccagtaactaaatggatcaccgcatcaccatcaaaagcggcaactgccttttcctgatcctcatgccttcccttcccaacttccacagtaatcacatcttctgctggaaatacaatgcttcttgaattaagtgtgtgaggagcaatgggtgtcatgatgatcatggtgccgcttggagatacaatagggccgcctacagacaggctgtatcctgtagacccggtaggtgtggacaatatgataccatccgcattgtaggaattcagatattcattatttacgaaattcttgaaacgtacaacccttaaaggcccttccctgccgatcacaatatcattcagtgccagatcactgccgatcacctgattgcctctgtatacagtaccggacagcatcatccgttcttctacctcatagtctccacgcatcagcttgtcaagagcctgatacacagactgtctgtctacctctgccagaaatccaagtgtacctagattgatgcccagaaggggaatcctgcaatgaaccacatccctggcggcctgaagcaaagtaccgtctcctcccagcacgatcacacactgggtatcctcagggatcttctccggatcagtataatgatagggtccatcctgcttccgttttgccatctgcacctgacaggcctttccatgacttttcagataggacacgatcatgtctgtaaaagactgatcctgatctttttcactgtttgtgatcacataaaacttatccatttgatccacctatttcctgtccagcataccatgggcttcttctactatagactctaccgtggtctgcagctgatctgtgaccaggactccttccggacgcttttgcagatgaagcagatattctatatttccctccggtcccttgattggtgaaaaggacagatggcatggctccaaaccaatccccatggcaaaatcacgaaccttttcgatcacttctctgtgaacctgcggatcgcggacaactccttttttgcctaccttttctctgccagcctcaaactgaggcttgatcaggcatacgatctctccatcttctttcagaagctgccgtaccggcggcagtacctttgtcaatgaaataaaggacacatcaatcgaagaaaaatcagcagcctctcccagatcctctggaaccacataacgaatattggttttttccatgcagaccactcttgggtcattgcgaagtttccaatccagctgaccatatcctacatcaatggaaaatacacggacagccccgttttgaagcatacagtctgtaaaacctcctgtggatgctccaacatccatacatacctttccgtccagatgaatgtcaaaattcttcatggccttttccagtttcaaaccgcctctgcttacatagggtaatgtatttccacgcatctcgatctttacgccttctccgaacatggatccggctttatcttctttttgtccgtctacatacacatctccggacataatatatgcttttgctttctctctggaagaagcaagtccatgctctaccaataaaatatccagtctttttttcatattatgaaatccccgtttctactgtctgtgcgatctctgctgcagaaagtccgaccttgcaccgaaggctgtcaatactgccctgaggcacaaatctgtcccagatagcaatgggtatcaccctgcatcccggatggcatgcttccatataggcacatacatgctctccaaaacctccgctttttacattttcttctacggtaacaaacagctgatggtcttctgccagttcatccaataaggctgtatccaaaggctttataaacctggcatttacaaatgtgggatctattccctgttctctcagaagctttactgcatcctggcaaacagacaccatgctgccaactgccagtatggctgcctttttccctttggaaaggatctctgcctttccacggaggatcggtgcctgaaactgctgaaactctgtacatgctgttcctttgggataacggatggcatacggtccgtctccatttactgctgcttccagcatagcttccagctcccagtcattttttggtgccattactatcatccctggcatcatgctcagataagaaaggtcaaaattcccctgatgggtctctccatctgcgccgaccaatcctgcccggtcaatggcaaatattacatgaagcttctgcatacacacatcatgaaggatctgatccactgccctttgaaggaaggaagaatacaccgccaccacaggaatgatccctcctagggccaatcctgctgcaaaagtgactgcatgctcttctgcgatccccacatcaaaaaagcggtcaggaaatgcctgctgaaatgctttcagtccggttccctccggcatagctgccgtaatagctgcaagctttgtattttcttctccaagccggaccattcctttggcaaatacatctgtataggtaggtgcttctttcacagtcagggcttttcctgtctgtatatcaaaaggtcccgtaccgtggaacctgtccggataggtacttgcaggcttgtatcctctgcccttttccgtgatcacatgtactacaactgccccttccacccttttagcttcattaaacagcttcatcatttgccgcatattgtggccatccacaggtcccagataggtaagtcccatattttcaaacaacattccaggaataaaaagctgtttgatactgcttttggtacggcggacagcatctaccatagctgttcccactttaggaatctttttgaccgcttttgtaactcctatcttcattcctgtataagcctctgctgtacgcaaagcacttaaatacgtagacattccaccaacattctttgaaatggacatattattgtcattgatcacaataataaaattcgtatccagttccgctgcattattcaatgcctcgtaagccataccgccggtaagtgccccatctccgatcacagacaccacatggttcttcctgccccaaagatccctggcccgaacatagccaagtcctgcagatatggaattggaactgtgtcctgcatcaaaagcatcacagtcactttccgctctcttaggaaacccgcttaaaccgccttctttacgaagagtggcaaatgcatcctttcttcctgtaaggatcttgtgggtataagcctgatgtcccacatcccaaatcagcttgtcctctgggaaatccaacacattatgaattgcaagggtaagttctactgctcccaggtttgatgccagatggccaccggtcctgcttacagattcaataagaaactgacggatttcatccgccagctgcggaaaatcagcaagtgcaatcttatgaatgtcatttggcttatttatcttttccagaaacatccgtatccttctttcacttcctgcgtcccaccagttcccttaccagtgtatccaggaattcattttttcgacccaggctatccaaaagagctactgcctccccggataagtctgctacacactctgaggctttgctgatccccataagtgttacatatgtagtcttgttgtttttctcatcactatgtaccggtttgcccagttcttcctgggaactggtaacatccagaatgtcatccctgatctgaaaagccaggcctatgttctttgcagcctggtcgatcactgccagttctctttcatctgctcctgccaaaattgctcctgtcagcatagaagcctgaatcagcgcagaagttttgttctcatatatataatcaagtatttcccttgaaacaggattgccatcattctccacgtctacactctgtcccccaagcatcccgtacaagccggtattatgggtcatgatctccatagcgcggatcacagcctgtggtctttcggtaagggcaaatgccttcagcatagtctcatatgcataattcagaagagcggctccgcttaaaactcccatagcttccccatacactttatgggtagtaagtcgacctctgcggtaatcatcattatccagtgcaggaagatcatcatgtaccagggaatgggtgtggatcatctcaatcgcagccataaaaggctctgccacatgcccgcttccgctaaacagtcgaaatgtttcaccaagaagtatggggcgaagcctttttccccctgagcatacgctgtaattcatagcctctgccagatgagcggcaaaaccttcctccttcggcagatatctgcagattatctcttctgcttcttttgttttttcctgtaattcactttgaaaattcactgaatgtcccatcctcattgatctgcagcatttttttctctactgtgtccagtttctcgctgcaatactttaacaattccattccttttttatacagggcaaaggattcctccagggatgtttcctgatcctccagcctgtctgccagtctgtcgagttcctgaaaagcagtctccacagacaattcatcctgttgttctgttacttcagccatggaccctccttatttgtacctattacctctgtctcaacccttccatctgtgacagcgataaacagcctgtccttttctctgataccttcaatgctggtaactgcatgtccctggatatccgttacataggaatatccctgattcagtttccgaaggggcgacaggcctgcatacttctccagatataacgcaagaagattccgtttctcacggagctttgcctccattcctttataaagccgctcttccatatcagctgcatactgctgtctgtcccgcagccttccctgtggattcagatactgcatccgtacctgatactgatcaagcctgctcttaagcagctgcagtttgccccacatggcacgatgcagccgttccctgccggaatcgactgcgtccacaatactcttataatcaaacactgccagttctgcagcggcagacggagtaggtgcccgcaggtctgccacaaaatcagcaatggtaaaatctgtctcatgacctaccgctgagatcacgggagtttgacactcaaaaatagctctggcaaccctttcatcattaaaggcccacagatcctctatggatccgccacccctgcctacaatgatcacatccagatccagcccgtccaggatccggatccctttcataatactttccggagctccttccccctgcacaagagccgggtacaaaacgatctgcagatatggattgcgccgcagggaaatgttacggatatcctgtactgcagcccctgttggtgcagtcacaactcccaggcgctttacaaatctgggaatctcctgcttgtattcctgagcaaacatgcccatctcttccagttcctgcttcagaagcaaaaatctgcgatacagatcacctgctccttccaaagtgatctccctggcatacatctgatacctgccatcacgctgataaacatcaatagtaccggctaccacaacctgatctccatccttcatacggaatgcaagaccctttctctgacctgcaaacatcacacaggaaagggtgccggtctcatccttcagggaaaaatagatatgtccgctggtatggtacttacaattggatacttctcccttaacctgaagcttctgcaggaagtaatcctgggtaaacatattacgcacatagctgtttacctgtcctacagaatatatattattcatttgccagcttaccaaggataccgtttacaaaagaacctgaggcttccccgccaaagcgcttggccagttccactgcctcattaatggcaacccctgtaggaacatccgggtcatacttgatctcataaacagccagtcttaaagctgtaagatccacacggttcattcgctttgtcttccatccatggcttgtctcattcagctgtctgtcaatatcctccaaatgctccagtacatgattatatttctcccggatatactccagatccttctcttctccttcagcaaggccttcaaaataaagctgcacttgctctcccatctcgtcctgggaattaaactgggtcataaacagaagtttaaaaatatgttctcttagttcccttcttcgcataatatcctcccgcaatctaaaaaaggaaagccttactttcctttttcattctccatatctacgctggcaatgtggatattcacatctgccacttcaagcccggtcatattctcgatggaagatttaaccttttcctggactgtcttgcttgtctccaggatattcttgccatactggatattcagggtaagatctacacgtacaatcccatccagtacttccacctttacgcctttggaaagactcttcatcccaagcttgcttaccagctcattcgtaatattcccggccatggaagcaactccatcaacctctgtagctgccagaccagcaatgatcgcaactacttcgtctgcaatattcacttcaccaatgccgccaagatcctgtattttatatgttgttctcttttcagccatatgataaccctcctaaggtgttatattcagttacctgtaattatatcaaatcacccaataaatgaaaagggttatttgctgaattccgtcaatattaaatccggatttctgtcctgtgtcattcccacactccacggatttacaaagagaagaagcggatttcccttaagatctgttactttcttcatatctgaagtaccggtaatactgtccacatctactttgtctttattggcgatccaccggatatgctcataaggaagattctccagacggatctccacattatactcattctccaggcggaatttcagcacatcaaactgaagcacaccaacaactcccacaataatctcttccatgtttccaaacagctcctggaaaatctggatcgctccttcatgggcgatctgtgtgatcccctttacaaactgctttctcttcatggtgtccaaaaggcgcactcttgcaaaatgctccggtgcaaaggttggaatcccttcaaaagcaaattttctgccaggcacacaaatagtatctccgatagaaaaaataccaggatcaaacacaccgataatatctcctgcataagcttcatccaccacatgtcttgactctgccatcatttgctgtggctgaagaagacgcatcttcttttctccctgtacatgatatacctcctgggaagcatcaaacttaccggaacagatcctcataaaagcgattctgtctctgtgcgctttattcatatttgcctggatcttaaatacaaaggcagaaaaatcatctgacataggatccaccagtcctgcatctgacattcttggaagaggagaagtggtcatcgccaggaaatgctccagaaatgtttccacaccaaagttggtaagtgcagatccgaaaaatacaggggttaattctcccttgcttacaagctcctggtcaaaatcagcacttgcaccatcaagaagttcaatttcttcaagaagctgctctttctgttccggatccattacctgatctgctcttggatcctgaagcggtatctcctcaatatggccttcctttgttcctttctgagtatcagaaaacgtaaggatcttctctgtattccggtcataaacaccacggaattttttaccggaaccaatgggccagttgatgggacaggttgcaatccccagttccttctcgatttcatccagaagatcaaatgtatcattggcatccctgtccatcttattgataaaagtaaaaataggaatgtgtctcataacacataccttaaacagctttctggtctgtgcctccacacctttggaaccatcaatgaccataactgcagaatctgcggccattaatgttctgtaagtatcctcagagaaatcctgatgtcccggcgtatccagaatgttaatacaatatccatcataatgaaactgaagtacagaagatgtaacagaaatacctcgttccttttcgatctccatccagtctgaaactgcatgacgggccgttgccttgcctttaacacttccggccagattaatggctccgccatacagcaaaaacttctccgtcagcgtggtcttaccagcatccggatgtgaaataatagcaaaggtccttcttttttctatttctttcgtatattttgacacagtatgcctcctgcaaaatgttctgtcataaataggtttcccataataactcataaacattcctattctagtatacagaaagctttcctgtcaagggaatttcctcagtaaggggctgtgttagtcatagattccatccgtttcaaccagatcatcgctttttgcattccctgctgatgtttcttctgcctcctggtctggtatctggctgattcccgcatccttattgccgctctcctcagcgctctggcttaaaggagtgatcacaatattttccggtgcgatccctgtctttcgttttacaatatcctcgatctgcgctcttctggcatcatccagatctgtatccggcactacgatatccgcagtttctcctgtaagatttacaatcacattctcaaagcctttggctgaaagaagcagttctgctgctgcctctttttccgtcagttcagtgacagataccatggtattaatagcttcctgcttctgctcctctccaatgtcctggttgttgataatatcctgaagatctgctttattctgggagcggatctgctctctggaaagctttgcctgggcagcaaaaccggatgcccctgtaagtacggcttctcccggagcagtcacatcctccgtatccccggtgccatctgccccgttctcatctagaagggctgtttcatctgtcaagtcataatccacatcttcaaggatactgctgctggcctcctgatccttaaagcccagatccacatccgcaaaattaagataacctgctgctgcgatcagaattgccagggaggtgatgatcacctgattcttttttaaaccttttttcactttgcctctccttatatcatttttattactttaattctatgggcttccacctgaaataatgccatcactgcctgctgaatctctcgtactgtcaccgggtcatcagctccctgggcagcgatcagcactcctgtgatcaattcgctgttatcattgccaaagccaaaggtgcttttttcatttcctgtcataagcatgacttgtacctttcccacaccttccacgccggaaagcacctgctgaagcctttgttccagagcagaggcattcccctgctcctgtatctcttccctggcagcatttcccacgcgattatccgatccagtctttttttcagtaggaactgctatcacccccagaagaagtcccaccagaaaaagtgtgatccactgtgtccggtttattttttttaacctggatctgacagtttccagcaaggatcccccattttcccaaaagctcatccttcagcctcctctccagttcctgatccggttctgattgcagatacagcacggcttttatgttttctccctctattagtacttccaccttttcagctttcatgttctttttcattaaatcttctgctatctcttcttccagctgttgttcaaggcttttccatataaacattttctgcagattttccccttcctgtacttttcgctcctcttctttcttgtcatacaaaagctgaaagctttctcctaattcttctgcctttccaaacaaagtgaatacaggaatcagaagtatcaggatcagcagcagtcccataaaaaaacgtacatatttttcatattttcctgctggcaccagatgaagcaccattgtaaaaagaagataaaaaacagccaggtttttgatccaggcatacagattttctttcatccgcctcctccaaagcttaatgtaaggataataaacataagcatacacaacacttcagctgtaaggaggatcctaagaagcaatccgcagccttctcccatagtagtcaacgcacctacgatccttttatcagctacaggctgggcaagggctgccaggaaacgatatgcaagacttaaaaagccataatgcaatacaggtgcagcagctgtgaccaaaagagccagaagagctgccacacctacacagtttcttaccagtacacccgttgtaaccaccagttctgtaactgtatttaccgcatttcctataccaggtatcgcactagcagtttttccaagagcggtccgtttcagtgaatccatcaccggtgccaccattccttttacaatctgcagtcctgttacgattccaagcaggcttttcattccccatcggatcagactttccagaagatctgccagcttgctgagcatgctttcttttgtcagatgatttaccaaacataacagaatgtacagattcacacctggcagtaaaaacgcagtcaggatccactggatcatccaggtcagcataaggattccctgataaaaaacagctgctgtggcagctccggtggaggccgctactgtcataaaataagctggtgtaagaaccttcataaaatcacagatccacccaaggcttccggaaagattacaggacaactgtgcaaaggaattcatgatcataataaacagcagaagatatagcatataaaatgtgatttctacagcctgtccgtcttcaaatactgctgacagatttgtaagaaacgctgttccaaggatcagaagcaggatcctgagcaaagtgtctttttctccttttacaaggttaaaaaaaaggccctgcagaaatccctgcaacacctcttttgaaacttcctggttcccgcttagtattttttttattgcatctgcaaaagaaaattttcctttgcccagtgcctgatccagcatcttctgaatcccttcaaagtccatctgaccaataagctgctcctgtacaaaatcatcacctgaagccattgtctctccctgggcacagtctgtccaggccaaaaagacaaagcatatagccagccattttatcatcttttttttcatatcagaaaactctcaactgtttccagcaaagccataagtacaggaatacacaaaaccagcacagacagtctgcaaaataattcaatctgcacaccggttgcctgatatcctgcatccttacagatcccggacgaaaactgtccaatgtatgtgatccccatcatttttatcagggtcagaaaatagcttccatccacaggcagactttcactgatctgatccagtgcctgaaacagataggcaatttttcctacagccaggccaaggatcgtaagcccaatacccagggtgataaagcaggtatattccggccttgtgcccttcataagaaatcccagtattacaccacatactccaagaagagaaatcttgataatatccatggatatctgcctcctgctgactttatagtctgtaactgttcagtatttttccagaaacaaactgctggacagttactaaagttcaaataattgccggatactgtcaaacagttcatatatataaggtacgatccagaataaaacaaccagaagtcctgccaggctaaccagaaatgcctgttcatccctgccactgtgcttcagcacctgggacagcacggagaccaggatcccaactgcagcaattttaaaaataatactgacctccaaggtctcctcctttcattccctctaccagaccagcactgctgccagaagccctccaagcagtccaagactctgatacactttcttttttgcaggaatctgtgcccgcacttcctgaatgtgctgtatcagattgctttcatacaattcaagctgcctgcattgcatttccacatccagatatcccagcctgctgccaagaatcagaaattcttcctgctcttcccgggtcagttccagtcttcccaaatactgttccccacattctgcaaaaatctgcgcaaatgtcttttcagtattttgcgccagttccctgcttactgccagaaaaaagcccctgtattccccggaaagcttattcgctccatctgcaaaagcctcttttagagacaatcttccgtagcgtatctcaccctttagataaaccgtcatctgcatacacatattcagtgcttccagtctttgagtaagacggcaggaaccggaaaagcccaatcctacacctgccagaaccatcagaatcaatcctgcatctttcagcataaatttccattcctgtcatatattccctggatcatgcctgcatgttcccctgtgccaagaagaatatatctctgaaaaacccggtctttccacaatttccggaataaaggctgctccagcacatcctccatggaatcgccgtgagcagtggcgatcagtttacagccacaatggatcacagactcaactgccttataatcgtcttcttttcccagctcgtccactgccacaacagaaggtgacatagagcggatcagcatctgcattccctctactttgggacatccgtccaggatatcagttcttggtcccagatcattctgaggaatcccctgataacagcctgccagttcacttcgttcatccaccacaccaacggtcagtccaggtatacctttcctgccattacttaactgtcgtataatatctcttaacaaagttgtttttccgcatcttggcggcgaaacgatcaatgtatgtgccacccaggtattcttctggatataaggcatgaccggatcagcacacccaagtacctggtgtgccagccgtacattaatacaggaaatatatttcatcccacggatctgatttccgtccaggatcacttttcctgttactcctaccctgtgtccaccctgtacacttaaaaatccctgccggatctcatcctcataagcatacagcgaatatccgctgacgtgctccatagtttctttaagatcctcacgggtaaccaggtactgttcttctccctgttttcgcaggaaacattctccaccgtcataggaaacaaataagggtcttcccacacgcagccggatctcatacaatttttcataatccagtctggcatctacaagcagccttcgaatatttccaggaaacaggttctgtatctgatttgcgtctattttctatcacctctttaacaataacaatatatgcaggtcttttgcttttagtacctgcttttctcctccaaaaatcctgcctcggccaggaatctggatggctgtctttctttttcaaactgccttcgtacataacacaaagtcagttcctttctcgctctggtaagccctacataaaaaagccgcctttcctcttctacagcttcttccaacactgcttttttataaggcatactgtcctcattcacgttcataattaatacacggtcatactcaagtccctttaccctgtgaagggtggataatgtaacaccttcttttttccgatcctgttttcttgcctgctccctcagcttttccgtgtatgcttccatatactctttccactcgtccaggtttttcatctgcatggcagtttcctggatccggtctgctgcttccatgaattcttccggccggagctttcgaaatgccgcaaaatcctgcagatattcatcatacttcatcccttttcggataaaattcacagctgcataaggaggcaaggttttcaatatgcgaagatgggtttccagagttgtgatcctgtcacacatccagtctttatctttataatatgccttcagcttttgaaaatctatatcaggggcttccagcgcatcccttgcaatataccggttaggcctgttcatgacctgcagaaagtttttacggctaagatctccttttgccatttcctgataagtaagaaaatcacggcagatccagtgtctgaacaggttaggaagctgttctttcatggtaaatgggatctgatattccatcagaatccctacaagcatctctgcttcctgatttgtcctgaaaagtactgctgtgtcttccagattttctcctttttccaaccgtttcttcagttctgcagctaaagtaagataagcttctcttggattttgaaattccctgattcctaccggtctgccggattcatttggtgttgtcagcttttttgcaaaccgtttccggttatttctgatcaactgcattgcagcagaaagaatattgccgctgcaccggtaatttacatcaagaagcacctggtcagcctttggataatccttcttgaaatttagcatgatctcaggcctagcaccacggaagtgataaattgactggtcatcatctcctacaataaaaagattgtcttctggccttgccagcatccgtacaatatcgtattgaagatggttaatatcctgaaactcatcaaccataatgtaacgaaatttcttctgccatgccttaaggatatcctgcctttgtataaacaattcatagcagtacagaagcatatcatcaaaatccagttttcgttttgcctgaagttttttcttatacccctgatagatctgtcggaatacttcatctggacagctggaagaatagtaatgctccggagaaatccggtttcccttgatcacactgatctcctttgcaatatcctccagaaagtccccctctccagacatatcttctccgtattccagaaccagttcttttaagattccgtatttttcttcttctgtaagtatatttcccggaccaagcccatatgcctgctttaaaatgccgtaaaacaccccgtgaaaagtaccaaaagtaacctggctttttgtaatgcccataaattccagaaagcgttcctgcatttcttttgcagcagccctggaaaaggtcacaacaagtatggaagatggagatatccccttctccctgaccatatacgctgttcgttctacaatcactgaggttttccccgaaccggggcctgccagaaccatcataggtcctgacaggtgggcgatcgcccgttgttgagatagatttcttttcattcttttttcagaagatcatacctgtgctgtaacgctgctaagcttttcaatggcagcctttactcttttcaaggtttcttccttgccgatgatctccatgatctcggtagctccggctggtgtcatctgctttccagaaacagcagtacgcagcggccacatcacataaccattcttatagcctttttcttttacgaatgcacttaaagcttcatacagaggatcgttggtatattcctcctgtgcctctagtactggcagaacctcctgcaataccaaaagtgaagattcttctgttgttttcatttttttgtgacggtacatggaagcatcatactccggcacgctctcaaagaaatcgatcagttccggaatatccgggaatacttcgatccttgtctgtaccattcctgcgatcctgtggaaatcaaaagctttggtcagcacctgtttcatataaggaagtgctttctcatagaatacttccggatccattttcttgatatactctccgttcatccagcgaagcttgcccatatcaaatactgccggagatttgttaatatgatgataatcaaacttctcgatcagctcctgtaaggagaagatctcttcgttatcctgaggactccatccaagaagtgccacataattcacaattgcctctgatataaagcctgcatccagaagatcctcataagaggaatgccctgaacgcttggaaagcttcgcatgtgtttcgtctgtgatcagcggacagtgtacataaaccgggatctcccagccaaaggcttcataaatcctgttgtactttggtgctgaagaaaggtattcatttcctcttaccacatgggtgatccccatcagatgatcatctactacatttgcaaaattgtaggtaggatatccgtcagacttgatcaggatcaaatcctccagttcttcattatttacagtaatatctccatagattacatcgtgaaacgtggtggtgccttctgtaggcatattgaaacggatcacatgaggctctcctgctgccagacggcgctccacctcttcttttgaaagccggagacaccgtttgtcataaatggaaatctccttaccggctactacacgtttcatgttttccagttcttcttttttgcagaaacaataatatgcatcgccctgctctaccagctgctgtgcatattttaaatacagtcctgatgcctgtctctcactctgtacataagggcctacacccccatccttgtcaggtccttcatcatgaagaagccctgtctttttcaaggtgcggtaaataatatctacagctccctccacatatctttcctggtctgtatcctctattcttaaaataaagtcaccaccctcatgctttgcgatcaggtatgcatataatgcggttcttaaatttcccacatgcatccttcctgtagggcttggtgcaaatctggtacgaatcttactcatgttttttctcctgttttcttaatgatgatattgtaaccgcctgatactgtggctatttatgcacaccaaacagttacacaatattccgaaaatgcccttccggcatcttaaattatactcccaaatgcttcagaatgtccataggatttccgtgaatcacaaggtctgcccgattatctgcaaagtgctcacggtcatttaccagaacaagttcatttccctggaaataccgaaggaacgtatttgttagggatgctttcagattacagcccaataccagcagcgtatctgccttacgcacttcctctgctgccagtgagatcagcccattatcaacgatctctcctaccatagacactcccgggcgtatcacagatccgcagtcttcgcataccggaacccctttggaatcacggatatactccagcggatactccttgccgcaatggggacatgtattcttatatacactaccatggagttcatatacattctggcatcctgcccgtctggcaagcgaaaaaatatctctcgtgatgatacacttcagcttccctgcatcctccagtcttttcagacagtacagtccttcatccatagtacccagattactgatcatatccttcttatagaactggtaaaactgttctacccttgtattgaaaaaagtcacattgaacatctcatcaggagaatacccgtattttgcctcaatatcataagcatcctcctcattacggtaatttgtgcagccacagccagagccaataccaacaccaaataggcataccatgtatttgctcctgtcaactacatttctcaggaaaccaatcttttcttcgtatgaaccattcataaaattacctccctgcttccaggatctgtcttctcattgctgcgtccttattataaccagagaagtatcatttttcaattagcgaacctgcaaaaaagtttcctgtcaccaggctttttttatgctttgtgtaatatgatcattactgtgtaataggagcattatagagtaattgcctgttacacaaaaattctccctgaagccttacgcctcggggagattaaataaattacgcatccacgcctctgtctttaagatattctatcacatcgcctacagtattcagatcattcagctcttctgcaggaatctcaagattgtattcatcttccagtgccatcaccagttcaaacagatccagtgaatctgctcccagatcatccttaaaagaggtatcagcagtaattgtctctgcctcgcagttcagctgctcagcgatcatttctctcattctttctaacatttctttgtctcctttaaaagatattgcctttagcatggagtatataatctgtgatagtatatgtcaagactttttacatgataaattccggttccagaaacctgatctttctggccacgccaagggccagtcccatctctatcataaggaacataatggaagttcccccatagctgataaaaggcagcgtaactcctgtattcggcatcagattcagcacaactgcaatattaaagataacctgcaatgcaatatgtataaaaatgcctgttacaagaagacttccgaaaagatccggtgcattctgtgcaatgaaaaacagacgatacaaaagatatccgaacaggaccaataccagtaaagccccaaaaagccccagttcctcgcagataatggaaaaaatcatatcattctgagcctcaggtacactccccagcttctgaatactgttaccaaggccacgtccgaaaatcccaccagatccaatggcataaagtgcctgaagtgtttgatacccatcaccgctggcataatcctcaggatgcagccatacaagaatacgtcggatacggaagcttgaactggtctccaatgtttttgaaaggatcattacaccaatcactgcaagtgcagcaataagggcaaggccgatcataaacggccgtgtcttgggatgtgcaacaaaaatcagacctgctgtaatacaaaaaataataatggctgtacttaagttactggtgagtacataggcagccaggccctgcagacctccaagtcctgccagaaccatacaggcctttaaagttttaacagttttgcccatctgtacgatcatataggacaggcacacgatcactgcgatcttggctacttctgccggctggaactgcggaagagagccaatctggatccatcttttagcgccatgtgattcatgcccaagagacgtcttaacaagccccatcaaaaagatggcagctccataaagaggcatggtcaatttgataagcagatgataatccagcatagaaatcccgatagccatcacaatacagcccacactgatcaatgcctgcttcttaaaataaaacatgtcatcattataattcatttgtgctatataagaactggtgctatacagcatgatcagtccaaaacagatcagaagaatgatcactgcaaccagactgtaatcataataatccgctcttttttttcgccgcacagaagacctgctgcgcctgcctgcctttgtacctgcttttgattgttccataagatcaccctttacatacaaaacgggggctgtcgcagaacgcatcctgcggcagcctcttctttaaatttcctttattatagcagaatctttttttttaggcaatgcaattaacaactagattatttaacatctggtgcatcaatggatgcggtttcgataatgaatttaacatttccgttcatggaagaatcctttcctgaataggaatcataagaaacctcatccgactggattgcttccagtcgatccaggatatcctgcagatctttatctaccatatctttcagcttagtgataccatcatcataaaattcctgctgtccatctttcagttcttctgcaccgtccttcagttcaccaataccatcctgaacctgatcacttccatccttcagatcagcagtgccctcagataaggtaccgataccgcttgtaagctcctgtgctccactgttcagcttgctgctgtttgcactaagctgtcctgctccactgcttaaagtaccactgttagcaagaagctgtcctgctccgctgtacagtgctccactattagatgcaagaaggcttacaccgctttgaagctttccggttgccttattaatctgttttgttccgtccgtcaaggtcttctttgcatcctgtaatgcttttgctccctgaagaagctgtgttgcatttgtatcatttttcccctgaagctgtgtgatacctgcattcacttcctggcttttctgcagcaaagtgtctgctcctgcaagaagcttttctgtgtcagcctttacaagagtatcatagcctgtttgcaggttcgtattgccttctgtaaggtctttcacaccagcatttaattttgctacatctgccgatacagaagaaagatctcctgctttggtaagaagaccacccagtgcactgacgcctgactctacagccgatgcctgtgccgtaatgcctgctgctccggcacttaatttagcagcatctgtactattcttcaggccctgtgcctctgttgcaagtgtatcaatacctgtctccagagttttcagcttatccagctgtgatgtcatgttctcaagaccaagtcctgaaatagttgtcttggcatcagatatcttcttgttcagattacctgcttctgtactcagctgacctgccagttctgctactgtagatgcagccgcattggcagatgtggtctgggcattggcagaattaacagcttcatttgcacttgcagctactgcctgggcattttgatctacagctccaagattggtctgtgcacttccaacactgccactaattccacttaagatagcattcagattggccttagtcgcctcgtccatctcagctccagcaagagcactttgcagactagcaatctgcgtctgtgcatttcccagatcctgactgacagctgctgtgctggccgttactgattgtgtatctacagtagcggcagactgacctgctgcaccagatgcggaaagctggcttgctgcatcagccattaccttggcagctttaccgctttctgtcattacgtctgtcaatgtgctttgtacagttccaattgctttttttgcagtatctgcagtggtgccaagtcctgcactctgttgctgcagattcgccagattatctgcaacagcacctgccttattcatgtagcttgtagttcctgctgcaaccccagctgcaccagatacataagtttccaatccctggatcattgcctgtgggttttcaagctttgccacatcctctgcaacactgtttaacagctgtgctgcattcgtaatgccctgtactgctgtattaattccaggtaccagctgtccgattccctgtaccagctgtttgataccgcctacataagcctttgttccatttgcaagggtatccacgccttctgtatattgtgaaaccccttttgtaagtgtctgtgctccattaacataagcagttacacctgaagccagctgattaccacccttcacataagcatttaccccttttgtaagtgtttttatgccttttgcataatctcccatattgtcatttacagtatccacaccttttgtatacttctgtacaccgcttgccaaagtgttcgttcccttggtatactgctgtacaccgcttgccagtgtatctgcaccagatgtataagaactgatgccatcagaaagtgtaccagccccctctgacagttctcctactccatcctgcaaagtagaaataccatctgcaaactctttgtatttctcatccagtgtatcaactccatcgaacagatcacttgttccatctaccagcttcaatgctgcttcatcaagatcgttcaggttatcctttaattcatccagatcttcattgtcactgaaatcaaaatccttaagaagatcagtaagcgcaacggtataagtagattttaccggacaatttgttacgtctgcttccattgtaaagctttccggaatattaatcttgtcagacagatcactggacagatccaggctttcctttaatccaggaattgccacacctacaaccatttctttatctccatcagagataacctttccattatctacagttacattcgtataattatcaccaggaaggatcatgccggtcatcataacaaaaggtgaataaatatcaacatctttatcatcaatcttttttgtctgttttgcattattagtataagttacttccatacgaagatgtcctgtcttgccagccagttcttcaggcttaatttctgtgccatccaaatagtatttaatagacacggaaaccggcagatctttatctgatttaccctgataataaatatcatcgccatctgtattccaggtcacattctctccatcctgctggaaagtctcatcaccctttacatttttaatatctgacagatcagaagtatctgtaagttctccctttgtcgttcctgaattcttcagccagtcagatacggttacatccgtaactgctccatctgcacctgcatttacatatactgtttcttctttgctaatctgatcacctgtttcctgtgcagccattacagttcctgcagtaagtacagctgccattcctgctgctacggttactgttgcaattcttctattacgattcatgattctacaacttcctttctgttttgtttctgctaataactttgtctttatctgcctttataatttttatgaccaacggtcatgttttaatctatggaatgttatataacaaaaatgaccaatagtcaatatctttttctccaatattttcccttatgtttattgacttttagtcattattgtttaaaataaggataaaggcacttgctaacagcttaaattcataacaactgatagtattttgccgcttactacctgtacaggtggaattcatctcaaacctattcaagaatgcctcggcattcttact

SEQ ID NO: 36 - DNA, 35098 bp, Unknown
  gut microbiota DNA sequence
ctttgtataatttatatgcatctgataccaataacaatgtcctgttggagacgattggtgagattaacaaggaactggaaaatctgaatacacagattgaacagtacaccttaaagaacacaagagctaaagatatggcagcaagagcgaaagcattcaaaagtgttgctgacagctgggagttcatgtctttcaatgaaagacaaaagactgtacgtgaatatatcaagaagatcaaaatatcgaatgattatgttgaaatcgagtataatgatcttttgacacgacagtaaaatacatttctatagttaatacatcgcaaggggatacatcttcttgcgtgtaaaatttcatatatcttattcaagataattaccctattggataaaggaaatttcaaaatttccactataatacattatccctatgatcgcaggtgaaatcaaacgatatctgagggatgatggtcttttgaaggtgagccgttctttgaaagaaaattattatcgtatatataaaaagagagaagaattggaatattccctgggcagggagcctatgatcacggaactgtcgaaggctttggaaatgcctgtggaagatctggtgatgactatggaggctgcggcagaggtggagtcccttcaaaagtctgtttatcagggagaaaacagtgaaatttcactgtcagaaaagctggcgcataaggaaaacccgcaggaaaagctgttgaatcggattttactggaagaacttctggcacatctggataagagagaacggcagctgatctgtatgcggtattttagggatatgacacagatggaagtggcggcagaactggggatttcccaggtgcaggtctccagactggaaaagcggatcctgaaccggcttaaggagttaatttgaaaaagacgggcttatctctgaacaagaggtaagtccgtctaatataacataagcgtaaacctgcttatctggctgctgttttggaacctgagaagatggaaccgcggaatttggaaagagcactatgaaggatcagcccaaagataccgcaggaaacgatctcgccagcacctacagtcagcatcatcaatgggataggaagattaatgccgtatccatagtgaagtacgaaaggcacgatcactgtattggagatgataggtggaagcggggcaaggaaccgactggaattacgcagcttgtaagtaaaaactgcgcccagcagtgtggcaatgcttccgaagatgatgtctaccgggatacagccgcccaggatattggcaatgatacatcctacaaataatccggggattgccgccggtgtaaaataaggaaggatggtcagtgcttctgagatacgtacctggacttctccatagctgaagggtgcaaacacaagggtaagtactacatagatggcaccgatcagtgccgcctgtaccagaaacagggtacttttgtttttcatattcttttgtctcctttagttttgttttacgagtggaaggtcacgaacactcgattcattttcgcgctgcaatgagtcaagcggccatgcttgcatggacatttgacgaatgccgcggaggcatataccggaaggtatatggcctacgccgggaatcggcggaaaagccgcttaagaccttatttttacgggcttttcaacgggcatgagtatagcatatttaggagaggaatgcaagggaaaactatttgctttttgtaaacataattgcaccgcctgccagaagcagaagtgaaaaaacaattgaaaaaatagatgctccaatcccaggtgcacctccctgtttaatggctgtttctcgatccagtgcacctttttgcagattatctgtaacctccggcgatcttctgagtgtttgaccgtcctgtataccaagtgctgtcacagtgtctcctgttttgaaatcggaagcactataaaaataacgaacatcattttcggcatcatcccgctgtgtctgagccagaggctctatgaaatctttttgtgtaaagctgctgtctggcacataagcataaccggcggctttcagctctgcttcatcataatggtcccaggttgtattcaatcttattgcatcaataaaatcctgtgaaagtgtataatcgccaatcttaccttcaccggaataagtcttttccgaagttgttgtgccccatttcagaacgccatatcgtttttcctcgtcagttaaattttttaaggtttgttttgaattggaggtgcttttgtctcgccgcatagtctgttttgaacgtgaaatacgaatgctgtcaaacgcaagtcccagttcaccgtcataggagggctccgtcaattcaagcgtaccacatacgattaccgtttttccttcgttctcggcatgaagagcttcgtttcctacataaacaacttctttcagagcggattttgcctttggaatatccacaaaaattgttttgacagctgttacgaaaaaaaacaatccggcaatgatgagaacgatccctaatattttttttaacatttgatcaaccttccttcctttggtatccagaccagttatgagtctgtacggttattccgctttcattatgccatattttttcccatctgccactagcacttatgacagcaatgctgttgtgaacggagtgcatagcaacctttgggaaaataagggtgtattttgtaggatcattcttgtgtttaaacgtgggattctgtataataaatacatctgtacggcatctgaaatacagaaaaggggtataagctgaaatttacacaatggatttcacttaccatagaaatagaaaaggaaagagaggatattgtaacatgacagaaagagtaacaaagcgggggatcaggaatttcattctgatctgtatcctggcgatgttggcaggaacctttgttccagtaaaggtatcagcagccacaacctattcaagaaccatgaattcctacattgtaaagggaaagaagggcaggatcgtactggcatataatccgtcacagacaggggttccggtatatgcacgtacatcaccaaaatctcagcaatatggggtactgggatttggagatgctgtagtggtaaatacaaaaaaactgaaaatgaacaagaaatatgcatggcttcctgtatatatggataatcttaaggatgctaaaggcaggaaggccacagcatatgtgcgaatgggacagcttaagatgctttccttgaatgcaaagaagtattcaagcaaccgtattattgataaagctatcaaaacaggtatgaaatatctgggtacaccttttatacttggaggactgtccatgacagatggtattgactgctctggctttgtgggaaaatgcttccagatggcaggaaggaatcttgcaagctggtatcataccattacactggagggagtatccagacagatcttctggcataatacgaatacacctcttactaagaaagaattaaataagatgaaagtaggcgatcttcttttttatctggataaggatacaagtggagccattggccatgtgggaatctacattggaaagggtatgatgctgaatgcttccggtcattatggatatgtatatcctacaggcggtgtatgcattaagagagtacagtatggacaccgctatatggttctttgcaaaaggatcattggcttctgagccggttaagaggggaaagagtaatgaataagaaaagaaagatcagcaccctgtatcaggcggcttttattattggccttgcacttctaatgcttttaggaacagcgaaggtcagggctgcttcttttacggagattacagattctgcctgtcttcatgcctatccgctgtcaaagaaagcttttcccatttacagtgaccatgaaatgacaagcgtggcaggaaagggtacttataaagaatacaagattgtcaagttttttggaaataccatgcagctggtttataaggcagaagatggaaccagaaaaaagggatatgcatctgccagctgttttctgcagcagccatccggcaaaagagaaggaatgtacgtagggtcttccggcggtatagatatttataaggttccaaagaacagcagctcccagcggtttattcatgcagctcaggctgactgtggccttaaggttggggaaaaggggcaatggacccaggtaatgatccagaaaaaaagacagtattatctgggatgggtccctacatctagatttaaaagcagcatgttccattttgcagtgcggacagggcagattctggcagacggcagatatacgttatgtcctgctttggtaggcacagatacactgaagaaaaccacatatgatgtgaagtatatcggaactggtctttatacccttaagaatgtgaaaaaaggataccttcaggtggataacagcagacaggtgcgcattcagaaaaaagatgatttctattatctgctgactggcagccgtaagctggcattgaatgcaaaaggggagacggaagaggctgtgcaagatcagactcaggcatggaattttcagaaaaaatccactcgcacagttacggtcgtatattcccaatatgatccggaatatggaaaaaccgtttataaagatgggaatataggcccaagaaccatatctacttccggatgcggtgtgatggctcttgtgaatgctatttatgcattaaatggttcttatattcctcctgagaggctggcacgtttttctgctgccagaggacactatttttacaatgcgggcacagctgataccctgtatccagatgtggctgagaaatggggaaagaaatatcgctttaagtatgatggcctgacaggatcctttgcagaattacagaaacatttaagaaaaggcggtacagctgttgcacttgtaccaggacattatctggcaattgcaaagtacagaagctctgatgggaagtatctgattttagattccgcagtaggaggcagaaggcctacttctatcaatggagactggatgagtatggggcagcttcaatccggagcactgttctgccagcattttcatttattttctgctgtaaaggcgtcaaagcaccgttcctgatcctctataattgttgtatttacatcattttcataaagccgcatctgcacctgcatgggagtaggatcatctgtcagcttgatatgaccgaagtgattaaagaaaaataatactccaagacctatgcctacggaataagagatggcaagtgcaggaaaggaactgccatcctggcctgtgacctgtgcagtgatctgccggaaaagtgcaggtacatccacatcattgttaaaggtcataatggagaatgcggcaccgaaaaaggaagccaggcagacaaagatcactttacaccagcaccatgcagtagaggtgttgggcttcgtttggtaagtaatgataaaagaaggttctccaatgtgagtgatctccagatctggttccttcttctggatttcgcggatcagatccatggctgacagaacatatcgcccagggcgtttgggatccaggctggccacatgcagtacgcgaagtctgtttaaaattttagaattgctgcaagacagcttaacgatatcttgcagataaacatgggggtgatgtacctccatgttttcgtctgtctggatataaagggtgtcgctcatatttcttcctccattgttttggttgctcgacttgaattactctttcattttaggtttaaagatcagactggcaatataggaaaaaatcagggctgctgaaatgccggcagcacaggctgtaaagcctcccataaaaagccccagcacgccgttttcattaatagcttctttcattcctatccataatgtgtttccaaatccaagaagggggactccggctccggccccggcataatccagcaggggctgataaagcccaagtgcacccagaagtgtacccgtacatacaagaagcaccattactcttcctggcatcagttttgttttatccagtaggatctggaccagggcacagattaggccacccacccagaatgcattcaggtaatccataataacctccatttatgttttttcttcaggttttttgcattacaaagaaacatgctccaatacaactccatgggcaatacctggaatggaatcgccttcattaaaagtggttttggaaagaagagctccagtaggaataaaaagaacttttttccatgcgccggaaagaagctttggcaggatataggcagcaagaacagttgcagcacagccacagccgctgccaccggaatgtgtatcctgggacggattatcaaagatcagaaggccgcagtcctgatgacggctttggatatcaatgttttcttttaagagaagatccagcaaaatatgttgtcctacatctcccagatccccggtgatgatctggtcataatcggatggctttctatgaaagtccagcaaattctggcagatggtatgacaggcggcaggtgccatacaggcccccatattcatggaatctttaaaaccataatccaccagggttcctgtggtgattccggtgatttgtatacagctttttccggtacgaagaggagaaggcatgacagtgcttttttcagctggtggagcagaagaaagaatgcaggcaccgcttcctgtaactgtccaggtggcagataaaggtctttgattgccatagcctaaaggaaaacgaaattccttttctgcactggcaaaatggctggaggtggcacagagaacatgatctccataaccggctgctacagccatggagccaagggaaagtgattcacccatggtagaacaagcaccgaaaagtccgtaaaagggaatgcccatatcggcaattccgaaggaagaagcagtagtctgggcaagaagatcgcctgcaaaaaccatccgcagatcttgcggactaagaccagccttttggatagcaagaaaggcggcctgtttctgcatggtactttctgcggcttcccaggtatccattccaaacattgggtcttcccatacctgatcaaagcaggaaccaagtggaccttctccttctttttttcctgcaacagatgcacagctctggataaatacaggcctgtggaaggatatgcttgctttgcctgtctgttgattttctgttatattcatgatgctactcctatcatttttaaaatgtaatagataatgccaagacaccaggaacttaaaatgccataaaggatcacaggtcctgcaatggtgaagattttgcagccaataccaaaaacctggccttctgctttatattcaatagcaggtgctgccacggaatttgcaaatccggtgataggaaccaggcttcctgcgcctccaaatttcccaatcttagggtaaatatttaacccggtaagcaatacactgatgaaaaccagggtaacagaacaccagatccgggcctcatccagatcactacccatccagaggaacagatttgtaatcccctgccctgccgtacagatcagccctccggtaagaaaggcttttgccatgtttataccaagattatgggatggagtgatttcttttacgtacttctcatattctttttgctcagtctgcttgttcatattatccataacaacctcctgctgcagatgatttataatgtaaggacctacagatcttaagattaggggaaccattctttataatagtagaataaagatcctaaggtttttcccagggcaatggacaggatcactttgggcagaccttctgaaaatctggctcgtcttgcaaagatagggaaaatgtctgctacttctgctaatgccatgatccagccgccgaggaaaagtcctgagaaaagaccatagagaatgagaaagagcaatccgccaggaatctgccatttccaaaggaaaaaaagatttcccagaacagttccaagaagaatggaatcttcatataataagatatgttttccggtatgggtgatccctgcatatctgggaataatggaaaggccgatgagaaggccgacttcgccgcctgcaattataatgcctgcggaaaaaccaatcataataagcaataattgattccacatataagctccttccttgagcatgttttaaggtcatttacctgctttcgcataagcataagtggatcggaccttttaacactgtaatcatagtatttggaaaaaagaaaaaaatatgtgttatcctgtacttttttttcatcagatggtaaaatagacagcgtacttgaatagaaagatagaggatttttttgtgaaacagagattaatagaagaattaacagaactgctgggaaatgacagggtgcttacaaacgagcctatgagccgccatacaacattccggatcggagggccggcagatctttttctccttcctaatacagtagaagaaataaagaagatccgtgagatatgtatccaggagcaagaatcatattttatcctgggcaatggaagtaatctgctggtaagcgacagtggttttcgtggcgtgatcattcagacatacagaaatctggcgcagatccaggtggaggaagattgcatccgtgcacaggcaggagcactcctttcagggatcgcccaggcagccaaagcagcttctcttacaggctttgaatttgctgcaggtattcctggtacattaggcggggctgtggtgatgaatgcaggggcctatggaggcgaaatgaaagatgtgctaaaagaagctactgtactggatagtgaagggcagatccgtcgtatccctgccgggaagctggcaatgggatatagaaccagtgtgatcaaagaagccggatatatggtgctcgaagcagtgatttccctgaaaaaaggggatccggatcagatccgggaaacaatgaaggatctgacacagagaaggatcagcaaacagccgctggaatatccaagtgcaggcagcacttttaagcgtccagaaggatattttgcaggcaagctgatcatggatagcggccttcgggggtacacccatggaggagcgcaggtttcggaaaagcactgtggctttgtgatcaatacagggggtgctacagccagggatgtatgtgagctgatggaacatgtgcagaaaacagtttacgagaaatacaatgtaaagcttgaaccggaagtaaaatttctgggagatttttaacaggagataaaaaatgcgatttgtgattgtgacaggagtatcaggcgcagggaaaacagcagccttaaaaatgctggaagatgcaagatatttctgcgtggataatctgcccattccgcttcttgagaagtttgtatcactgatgccggagatccacggagaggatgtacagaatgtagcgcttggtattgatgcaagaagcggatccatgggagaattggaactgatcctggataagatgcaggaagcaggttatcagtttgaaatactttttatggatgcagaggattctgttcttgtgaaacgatataaagaaacaagaaggagccatccattggcaatgtccggacggatcgatgaagggatccgtctggaaaggaagaaaatggagttcctgcgcagaaaggctgattatattatcgataccagccatctgcttaccagggaattgcaccaggaaatagacaagatatttgtagacaatgaagaattcaagaatatgatgatctctgtcctatcctttggattcaaatacgggatcccggcagatgctgatttggtatttgatgtccgcttccttccaaacccttattatgtggatgaacttcggcctatgacagggcttgatgacagtgtattcaattatgtaatggacaatgagactgccaaaaggtttatgggaaagctggaggatatggtgaattttctaattcccaattatgttcaggagggaaaaacaagcctggtaatcgccataggatgtacaggcggcaagcatcgttctgttaccattgcaagggaactatacagcaggctgatcaagaataatgagtacggttttcgcctggaacacagggatgtagagaaggaccggcttcttaaaaaataaaaaggagtgggaagatgtctttttcagggatggtgaaagaagaactttccaagcgtacaggagcatccaggcactgccagatcgcagagctggctgcgatgtatctgttatgcggcaaactgaagtgtatccagggtcaggaactggttttatgggtgcagacggaaaatcagtgggttgcaagaaagtgctttacaattttgcaaaaaacatttaatatagaaacagatattaccgttcatgagagcgcacatcttaagagatgtagagtttatcatgtgaccacacgggagacggaacaggctctggaaattcttgaggctgtgaagcttgttgtgaagggaagcagcgatggtacgcttaagcttggcaatacaatgatccttcagaggaactgctgtaagcgtgcatttatacggggagcttttcttacatcaggttccatcagcgatccacagaaaggataccatttcgagattgtctgtcctgatgaagaaaaagcgcaacagttgcaggagatcatccgcagttttcatattgatgcgaagatcgttttacgtaagaaatcatacgtggtctatgtgaaagaaggtgcgcagatcgttgatatactggccattatggaggcgaatgtggcactgatggatctggagaatatccgtatcctgaaagaaatgcgtaattcagtcaaccgtaaggtgaattgtgagactgcgaatattaacaaaacggtaaatgcagcagtgaagcaggtggaggatatacgactgatcgaaagaaaggccgggtttgaaagcctgagtgaaggcctgggggagatcgccagactgcggctgcaatatccggaggctacattaaaagaattaggaatgatgttgaaccctcaggtgggaaagtcaggtgtaaaccacagattgagaaagctttcaatgattgcggaggaactgaggggggacgaggaggaattattatgatcaaaataccaatcaccattaatctgtctactggtctggaggcgcgtcctgttgctcagcttgtacaggtggcaagtcagttcaacagtgagattcatgtagagattggcaagaaaaaagtaaatgccaaaagtattatgggtatgatgacactggggttggacacaggtgaggagatcactctttatgtaaatggagaggatgaagaagctgcgatggacagcattgagaaatatctgagcaatcagtaagatacagtgctttgcatgttaaagccatatgaaagagaggaatgtttaaaatgtcaaaggtactgaagtttattgtacattttgtggtgatctgcaccatattaagtatacttgcactggcattacctccgtttttcggagtaactacagagattcgcgatcatgcagaccaggaatccaatcttcctatgggttcagttacatatgcgatccctgtgaagtcatctgagatgacagtgggagacagaatccttgcacagaaagatgataatgcatggcgttatgatattgccagcgttgatcttgccagtggcacaggcacagcagtgaatccagatgccctggaagagtcccctgtgaatctttctattggcgaatatatgccgaaagttgtagtgacaattccgctgattggttatcttatggtagccacacagagtattgaagggctgatcattctggcacttgcagtatttttcctgattattttgtacgtgatcgcagagctctggaaaaaggatccaaaggaagaagatcttccagaggatacagaaccgggatatgtgaaatccaaaaaggaactgaagctggaagaaaagaaaaaagaacgcctcttgagagaagaagagcgtgagatcaaagcggaaaacaaaaagaacaagaagaaaccgaagcgtacagtacgtaccggtggttttgttgatgagatcgaagaggacgatccagacgaggaagaggatgaacgtccggagaaagcggttcagacagctaccagcgaagctcatgaagtcctgaaaaaggagattgcagccgctactgcggaagatgattatcagcagccagtacgcaaaaaaaaacagcagctggacgagacaaggaaagtggtaacacacaaaaaaaaagtccaaatccccgataccttggaggagtcggtgaaagaagagattcctgaaaaaccggtcaagctaaaaagaatggcaattccgagaatgacagctgcacagcttgctgacaaagcaaaggctgaaggagattcgccggagatcgtaagagatgatattacaaaggtgacacttcttgattattctgatatctttgcagaagaagaggatgaagacgaagaagaatgatcctttacctggtataagaggacagtaaaacgcctgggaagtacaaaagtatttccacaggcgtttattacataatgggaaattaccccataatgttccaactgcttgtttttgaaaaaatacaattttttttgaaaaagccttgcaattagaaataagattgtgtatactgttacttgctgtgacatgatagctatgaagcgagaggttgctaccacatggtaggttttccgtggagcgaatgtcaagttaggaaactgacgacaagtcactgtacaagttcagaagaccatctagggatgggcgtgtggaaagaagtcttaggacacacacggagatgtgtacagtcgccgcttgtcgtactgattgtgagtacgaataggaggagactttttttatggcaaatcaggtaatgagaatcacattaaaagcttatgatcatcagttagtagatgcatctgcagctaaaatcatcgacactgtaaagaagaatggagcaacagtaagcggaccggtgccgcttcctactaagaaggaagttgttacaatcctgcgtgctgttcacaaatataaagactccagagaacagtttgagcagagaacacataagagactgatcgatatcgtagcacctacccagaagacagtagacgcactgtccagactggagatgccggcaggcgttcacatcgacatcaagatgaaaacaaaataattgaacgcattgctttcctaatgtaaatgcatgagcatttagctatttattatatgattacctatccgggtaatccgctataggaggaagaaagaatgaagaaagctattttagctacaaaagttggaatgacgcagatcttcaacgatgaaggaatgctgattcctgtaaccgtattacaggcaggtccatgtgtcgttactcaggttaagacagaggagaacgacggatatgcagcagttcaggttggctttggcgagatcagagagaaactggttaacaagccggagaaaggccactttacaaaagctggcgttgacgtaaagagattcctgaaagagttccattttgacaacgcagctgaatatgaagtaggacaggaaattaaagctgatatctttacagcaggtgagcatattgatgcaacagctgtttctaaaggtaaaggtttccagggcgcgatcaagagacacggacagtccagaggacctatggctcatggttctaagtatcatcgccatgcaggttcaaatggtgcttgttctgatccgagcaaggttttcaaaggaaaacacatggctggacatatgggacatgagcaggtgacagttcagaaccttgagatcgtacgtgtagatgctgagaataacttactgttagttaagggtgctgttccaggacctaagaaatctttggtaacaatcaaagagacagtaaagtccttataatgagaaaggaggagcacacagatggcaaacgtaactgtttataatatggaaggcaaagaagttggaacaatggagctgaatgatgcagtgtttggtgttgagatcaacgagcatcttgttcatcttgcagttgttcgccagcttgcaaataaacgccagggtactcagaaggctaaaacacgttctgaagtaagcggcggtggaagaaaaccatggagacagaaaggaactggtcatgcaagacagggttccatccgtgcagcacagtggacaggcggcggaattatttttgctcctactccaagagattatgaagtaaagatcaataagaaggaaagaagagctgcattaaaatccgctcttacttccaaagttcaggataacaagctgatcgttgtagacgagctgaagcttgaccagatcaagacaaaagagatgcagaaggttcttacaaacctgaaagcagagaaagctcttgttgttactgcacaggatgacaaaaatgtgatcctttctgcaagaaacatcactgatgtacagactgctacaccgggaacaatcaatgtatacgatgttatgaaacacggcgcattagttgttaccaaagatgctgtagcaacaatcgaggaggtgtacgcataatggcagacattaagtattacgatgtaatcctgaaacctgtgattactgaaaagtccatgaatgctatgggagaaaagaagtacacattcttagtacacccggaagcaaataaaacacagattaaagaagctgtggagaaaatgtttgaaggaacaaaggttaaagctgtaaatacaatgaaccttgacggtaagaaaagacgtcgtggtatggttgttggaaaaacagctaagactaaaaaggctatcgttgcccttacagaggacagcaaggatatcgagatttttgaaggcctttaattaacaggttgcgatgtgcgggcgcacttcggaagctatgcttcctcagtcgcgttacacgcttgcaagtcttcataagagttcagccttgcatgcaagcatgacggcttccctcttatgaatccttggcgctctgttcatcgcggatatacgcattcaaaagcgtgagaacaaatttgaaaggagaactgaaatgggaatcaagagttataacccatatacaccgtccagaagacatatgaccggttctgacttctctgagattactgctgcaaagccagagaaatcattggttgtttccttaaagaaaagcgccggccgtaacaatcagggtaaaattactgtaagacaccgcggaggcggaagcagaagaaaatatagaatcatcgatttcaagagaagaaaagatggtgttccggcaattgttaagactatcgagtatgatccgaacagaacagcaaatatcgcactgatctgctatgcagatggtgagaaagcttacatccttgctccagaaggactgaaggttggccagaagatcatgaatggtccggaagctgaggttcgtgttggtaactgccttccattagagctgatcccggttggtactatgattcataacattgagcttcatcctggaaagggcggacagatggttcgttctgctggtaacggtgctcagttaatggcaaaagaaggaaaatatgctactcttcgtcttccatctggcgagatgagaatggttccgatcgtatgccgtgctactgtaggtgttatcggaaacggagaccacaatctgattaatattggtaaagcaggacgtaaacgtaacatgggtatcagacctaccgttcgtggttctgtcatgaaccctaacgaccatccacatggtggtggtgaaggaaagaccggtatcggacgtccaggtccgtgtactccttggggtaaaccggctctcggcctgaagaccagaaagaaaaacaaacagtccaacaagctcatcgtaagaagacgcgatggcaaagctttaacaaaataataaggaggattaagaatgtctcgttcactgaaaaaaggaccttttgcagatgagagcttactgaaaaagatcgatgctttaaatgctgcaaatgataaatccgttattaaaacatggtctcgtcgttccacaatcttcccgtccttcgttggacatacaattgctgtccatgacggaagaaagcatgttccggtatacgttacagaggacatggtaggacacaagcttggcgagttcgtggctacaagaacttacagaggacacggtaaagacgaaaagaaatccggcgttcgctagttagcacatacaatgtgttattcacctggacacttaatgaaccgtaaggcgatttaagtgaccaaggtgttctgatataagatgtatattgaataagacgaaaggaggcacttaaaaatggcaaagggacatagaagccagattaagagagccagaaatgagagtaatagagagacaaggccgtctgcaaaattatcttatgcaagaatttctgttcagaaagcctgctacgtattagatgcaatccgtggcaaagatgtgcagacagcacttggaatcctgacatataatccgagatacgcttccagcgttgtaaagaagctgcttgagtcagctgttgcaaatgctgagaataacaacggaatgaacgcagacaacctctatgttgcagcgtgctttgcaaacaaaggacctacaatgaagagaattcagccgagagcacagggtagggcttacagaatcgagaagagaacaagccatatcaccatcgtgctggatgaaagataaggaggaaaaacatgggacagaaagttaacccacatggccttagagtcggtgttatcaaagattgggattcaagatggtatgctgaaggcgaattcgcagactatctggtagaagattacaatatcagatctttcctgaaaaagaaattatacagcgcaggtgtttccaagattgagatcgagagagcatctgacagagtaaagatcatcatctatacagcaaaacctggtatcgttatcggtaaaggcggagctgagatcgagaaagttaaagcagagcttgctaaatacacaacaaagaaattaatcgttgacatcaaagaggttaagagacctgacagagatgctcagttagtagcagagaacattgcattacagcttgagaaccgtatctccttcagacgtgcaatgaaatctacaatgcagagaactatgaaggccggagcaaaaggtatcaaaacatccgtatccggacgtcttggcggtgctgatatggctcgtacagagttctacagcgaaggtactattccgcttcagacacttcgtgcagatattgattatggttttgcggaagctgacaccacctacggaaaagtgggcgtaaaggcttgggtttacaacggtgaggtacttccgactaaaggaactaaggaagggagcgataaataatgttaatgccaaaaagagtaaaacgtcgtaaacaattccgtggctccatgagaggcaaagcacttagaggcaaccagatcaattacggtgatttcggccttgttgctacagagccttgctggatcagatcaaatcagatcgaggcagcccgtgttgctatgactcgttatatcaaacgtggtggtaaagtttggatcaagattttcccagacaaaccggtaacagcaaaaccggcagaaactcgtatgggttccggaaaaggtgctctggagtactgggttgcagttgttaagccaggtcgtgtaatgttcgagatcgcaggtgtatccgaggatatcgctcgtgaggcgttgcgtcttgcaatgcacaagttaccatgcaaatgtaaaatagtttctcgtgcagagttagaaggcggtgataacagtgaaaattgataaattcgtagaagatttaagaacaaaatcagcttctgaattaaatgaagaattagtagctgctaagaaagaacttttcaatctgagatttcagaatgcaacaaatcaattagacaataccggacgaatcaaagaggttcgcagaaatattgccagaatccagacagtaatcactgagcaggctaacgcttccaaatagtgaatataggaggaaacaatcgtggaaagaaatctgagaaaaacccgtgtgggtaaggttgtcagcaataagatggacaagaccattgtagttgctattgaagaccatgtaaaacatcctctttacaaaaaaatcgtgaagagaacatataaattaaaggctcatgatgaaaataatgagtgcaatattggtgataccgttaaagtaatggagaccagaccgttgtccaaggacaaaagatggagactggttgagattgtagagaaagtgaaataaggaggaagaccagtatgattcagcaggaaacaagactgaaagttgccgacaacactggtgcaaaagaaatcctttgtattcgtgttatgggtggctctacaagaagatatgcaaacattggcgatactatcgttgctactgtcaaagatgcaacaccaggcggcgttgttaagaaaggtgatgtagtaaaggcagttgtagttagaacaaagaagggcgctcgtcgtaaagatggatcctatatccgtttcgatgaaaatgctgccgtaatcattaaagacgacttaactccgagaggaacacgtatctttggaccagttgccagagaacttcgtgagaagaaattcatgaagatcgtttccttagctccggaagtattataggagggtgcctaatgtcagctatgaaaattaaaaaaggcgatactgttacagtaatcgctggaaaagataaaggtaaagaaggaaaagttcttgcagtaaatgcaaagaacagcacagttcttgttgagaacgtaaatgttgttacaaagcataccaaaccgtctgctgcaaaccagcagggtggaatcgttacaaaggaagctcctcttcacatctccaatgttatgttacttgttgatggaaaagctaccagagtaggtttccagatgaacggagacaaaaaagttcgtgttgctaaagcaaccggtaaagtaattgatgattaattgagagaggaggcagacataagtgagtagattaaaagagctttacaaaaatgagatcatggatgccatgaccaaaaaattcggatacaaaaatgttatggaagtgccaaaactcgagaaaatcgtcattaacatgggtgttggtgaagcaaaagaaaacgcaaaacttcttgacgctgcaatcgctgatatggaactgatcacaggtcagaaagcaattgcaacaaaagctaagaaatccgttgctaacttcaagatcagagaaggaatgcctatcggatgtaaggttacattaagaggagaaaagatgtatgagttcgctgatcgtcttatcaatcttgctcttccgcgtgtacgtgacttccgtggtgttaatcctaatgctttcgacggcagaggaaactatgcactgggtattaaagagcagctgatcttccctgaggtagagtatgataaggttgataaagtaagaggtatggacattatcttcgttaccacagctaagacagatgaagaagcccgcgaattactgacattattcaatatgccgtttgcaaagtaattgataggaggaaagattcatggctaaaacagcaatgaaaatcaaacagcagcgtggatccaaattctctactagagagtacaaccgttgcaaaatttgtggacgtccacatgcatatttaagaaaatacggaatctgcagaatctgcttccgtgagttagcttacaagggtcagatcccgggagttaagaaagctagctggtaggctgatagcaacttaatgaatgcaagccattaggcgctgcatgaatttagtgcgaagtccatcccgaatcttaatgaatgcaggccatcaggcactgcatgaatttagctgagggatgctgatattttggtaacacgtaaattattaaaatatatctaagacatgtaaagtctgaatgaggaggaaacttacatgacaatgagcgatccaatcgcagatatgcttacaagaattcgtaatgctaatactgcaaaacatgacacagtagacgttccggcatctaaaatgaaaattgcaatcgcaaatattcttttagatgagggatatatcacaaagtatgatttagttgaggatggagcaagcaagacaatccatatcacactgaaatacggtgaagacaaaaacgagaagatcattactggtttaaagagaatctccaaaccaggtcttcgtgtgtatgctggtaaagatgagcttccaaaggttctcggtggacttggtgtagcaatcatctctacaaacaagggcgttatcacagataaagaagctcgtaaacagcaggtaggcggcgaggtactggcattcgtttggtaagcaggtaagcttacactgatgcacaccaaagacgcagcactgaaaacagaggggatacagtttcccctccgataatctaagtaaggaggacacacagtatgtcacgaatcggtagacttccagttgctatcccggcaggagttgaggtatctattgctgagggtaatgtagtaactgtaaagggaccaaaaggaacacttgaaagagcgcttcctacagaaatggaaatcaaagttgaagatggtcatgtagtagtagcaagaccaaatgatcttaagaagatgaaatcccttcatggattgaccagaagccttatccacaacatggtagtcggagtaagcgaaggctattccaaaacacttgaagtaaacggtgttggttataaagcagcaaaacagggtaaaaagcttgtattaagccttggatattctcacccggttgaaatggaagatccggatggtattgagacaaaagttgaagacaacaagatcgtcgtatccggtatcagcaaagagaaggttggacagtttgcggctgaaatcagagataagagaagacctgagccatataagggcaaaggtattaagtattctgatgaagttatcagacgtaaagttggtaagactggtaagaaataattaaggagagtgagaaaatgattaataaagcatctagggcggaaattcgtcagaataagcatagaagattacgtcatcatttaaacggcactgctacgactcctcgtcttgcagtatttcgttcaaacaagcatatgtatgcacagattatcgatgacactgttggcaagactttagtatctgcttctactcttcagaaagatgtaaaagcacagcttgagaacacagacgatgtagcagctgcagcagctcttggtaccgtgatcggtaaaaaggctttggaagctggcatcgaaagcgtagtttttgacagaggcggttacatttaccatggtaaagtaaaagcattggcagaggcagcaagagaagctggactgaaattctaaaaggaggagcgaaaacacatgaaacgtaatcttattgatgctagtcagttagaattagaagataaagtagtgtcaatcaagcgtgttacaaaggttgttaaaggtggtcgtaacttccgtttcacagctttagttgttgtcggtgacggcaatggacacgttggcgcaggtttaggaaaagcagccgagattcctgaagcaatccgcaaaggaaaagaggatgcaatgaagaaattagttacagttgccagagatgagaatggttctattacccatgattttgtaggaaactacggaagcgcacagatgcttctgaagagagctcctgaaggtactggagttatcgctggtggtcctgcacgtgcggtaatcgagttagcaggtattaaaaatatccgtacaaaatgtatgggatccagaaataaacagaatgttgttcttgctaccatcgaaggcttaagacagttaaagactccggaagaagttgctaaacttcgcggtaaatctgttgatgagattctggcttaaggaggaatacgaaaatggcaaacacattaaaagttacattagtaaaatctcctattggcgcagttccgaagcacaaactgactgttaaggctatgggtcttacaaagatgcataaaacagttgagatgccggataatgctgcaaccagaggaatgattcagcaggtacagcacctggttaaagtagaagaagcataatagttaaaagagttgaatactaaaaggaggtgccaatatggaattatcaaacttaagaccagctgatggttctaagcatagcgataacttcagaagaggccgtggacatggttcaggaaacggcaaaacagccggaaaaggccataaaggacagttagcacgttccggacataagaaaccgggatttgaaggtggacagatgcctttatacagacgtctgccaaagagaggattcacaaacagaaattctaaagagattattgcaatcaatgttgacattctgaaccgttttgaggatggtgcagaagtaactgttgagagtttacttgaaagcagagcaatttccaaagcaggagatggagttaagatccttggaaatggcgagttgacaaagaaacttaatgtcaaagtaaatgctgtcagcgagactgcaaaagcaaaaatcgaagctgctggtggtaccgtcgaggtgatctaatgttagaaaatctgaaaaatattttcagagttaaagaaatgcggcgtaaacttctctatgtactgtggatgattcttgtgatccgtattggatcacagctcccagtacctggagttgacagtgatttctttaaggactggtttaaacagaataccggcgatgcattcaatttctttgatgcatttaccggtggttcctttactcagatgtcgatctttgcattgaacattacaccgtacattacttcttccattatcatgcagctgcttaccattgccattccggcattggaagagatgcagagagatggtgaagaaggaaggaaaaagatcacagcgatcacccgttatgtaacggttggtcttgctctgtttgagtcaattgccatggcaatcggattcggacgtcagggtcttattccgaacatgaacttcttcaaaggatttacagttgttgtgtgtctgacagctggttcagcaatgcttatgtggattggtgagcgtattactgagaagggcgttggaaatggtatttctatcgtgcttactgttaatatcgtatcccgtgtcccaagtgatctgacagttctgtatgagaactttatcaaaggtaagactatcgcaaaaggaatgcttgccggattgatcattgcagcgatcattatcgcaatggttgttttcgttctgatcctgaacggcgcagagagaagaattcctgtacagtattccaggaagatggttggaagaaagcttatgggcggacagacgaccaatattcctttgaaggttaatacagcaggtgtaatccctgttatttttgcttcttctattatgtccttcccgggtgtgatcgcccagatggcaggaaaggcaaatagtacaggtattggcggtgagatccttcgtggtctttcttccaacaactggtgtaatccaagccagcttcagtatacctggggactggtagtgtacatcttactttgtgtattctttgcatatttctatacttccattacctttaatccactggaagtagcagacaatatcaagaaacagggtggttttatcccaggtatcagacctggtaagcctacgtctgattatctgaccaaaatcctgaattatataatctttattggtgtagttggccttattattgtggcagttattccgttcttctttaacggtatatttggagcaaatgtttcttttggtggtacatctatcatcattatcgtaggagttatccttgaaactgtgaaacagatcgagtcccagatgcttgtccgcaattacaagggcttcctgaacgaataaagccatgataaggttgcggtgctattttgcatcgcagccttgcttaaaataaggaaacctataataatcccatagtaattccatgcaggaggtattttatgagaatcgttatgttaggagcgccgggagccggcaagggtacacaggccaagaagattgctgcaaaatatggtattccccatatttccacaggcgatattttccgtgcaaacatcaaaaacgggacggaacttggcaaaaaagcaaaaacatatatggatcaggggcttttagtaccggacgagcttacatgcgaccttgttgtagacaggatccagcagtcagatgcagaaaatggttatgttcttgatggatttccaagaacaattccacaggcagagtgtctgacaaaagcacttgagaaactgggaagcaagatcgattatgcaattgatgtagatgttccggatgaaaacattgtaagacgtatgggtggaagacgtgcctgcctgaaatgcggtgcaacttatcatgttgtttatgcatcaccaaagacagaaggtgtatgcgatgcatgtggagaagatctggttcttcgtgatgacgacaagccagagactgtgcagaagcgtctgaatgtgtaccatgaacagacacagccactgattgattattatacaaaccagggtgttttaaagacagtagatggaaccagggaccttgaagaggtatttggggatatcgtgactattcttggtgaataaaacggggaaaacaaatgtcagttactataaaaacagagcatgaaatccaacttatgagggaatccggacatcttcttgaaaaggtgcatgatggactgatcccttatattaaacctggaattacaacaaaggaactggatcatatcggcgaagaaatgattcgttcactgggatgtattccaaactttttaaattatggaggttttccaggatctttctgtatcagcctgaatgacgaggttgttcatggaattccttcggaggagaaggttataagggatggtgatctggtgaagatcgatgccggattgatttacaaaggataccattcagatgcagcgcgtacctatgcagtgggcgaagtatcccaggaggcaaggcagctgatggatgtgaccaggcagtccttcttcgagggaattaagtatgcgaaagcaggaaatcatcttaatgacatatcaaaggcaattggggcatatgcggcaaaataccattatggtattgtccgtgacctggttggccatgggattggcacacatcttcacgaagatccgcaaatccctaatttcccgcagaaacgcagaggcgttaagctaataccggggatgacacttgctattgagccaatgatcaatctggggcgtccggatgtagtatggctggatgatgagtggactgttgtaacaatggatggttctctttcagctcattatgagaatacgatcctgatcacagatggtgaaccggagattctgacgcttactaaataattgaaatattcgtaactgtgagggtattctacaggtacaaatactcgttttcagatgacagacacaggaggttaatcaatgtcaaaagcagatgttattgaagtggaaggaactgttctggaaaaacttccaaatgcaatgtttaaggttgaactggagaataaacatgtggttcttgcacatatcagcggaaagctgcgcatgaacttcatccgtattcttccgggagataaagtaacgattgaactttcaccatatgatttgtccaagggcagaatcatctggagagacaaataagatccgttttaagcttgcaaacaaaggctgctgtatttattcctatcataggagtgctacagcagctttttttgaactatgatttttatttaactgtcagaaattcttctccttttaggatagggcctttttttgcgctttcacccacagctgtatgaatctgaaaattttaccttcttctggcaggccggcaacaggaagaatagcgatgggaagcatgaagcttcgcccaatcctttgcagtacactgaatattttatctttcatcaggatttcctcaggaaatagttttttagatacatgaatggccatcatttatttctgattattattaagaaaaaaaacaaaaatatacttgctttttggaaaaaataatgttagaatacactttgtacgcatgtatagtctttgtatacgtgcgcccatactgcagattttaatgctatattttacggaaggaggatttccaagtgaaagtaagatcatctgtaaaaccgatctgcgaaaaatgcaaggtcattaaaagaaaaggatctatcagaattatctgtgagaatccaaaacacaaacagcgtcagggttgatgcctggattgtgtggtatgcggctgcagttgagacacctggacaggttgtcaggactgatgaaataatgaactattcatgtattgcctaataccgagaggcgacgttggcccgttggccgcaacaaatcggaaaggccgcaacacgccaaagcggctgggtgtattaccgaggcaccccaattaggaatgaaggagaaggcagcgtacagatgcaccccatttcaccttgtagaaatacaagtggtgtacaggacgaaaggctttcagtaaaagaaaatggaggaaacagtacatggctcgtatagctggtgtagacttaccaagagagaaaagaattgagatcggccttacctatatttatggtatcggcagagcaagtgcagacaagatccttgcacaggcaggtgttaatcctgacacacgtgtcagagacctgacagacgaggatgttaagaaaatcagtgctgtcattgatgaaacaatgatggtagaaggagatcttcgtagagaaatcgccctcaacattaagagactgcaggaaatcggatgctacagaggtatccgtcatcgtaaaggacttccggttcgtggacagaagactaagacaaatgccagaacacgtaaaggtccgaagagaacagtagcaaataagaagaaataataccttataaataattaatcgaaaaaggaaagcgtaggttagttttaaaatggcaaaaacaacgaaaagaacggtaacaaaacgtcgtgtcaagaaaaacgttgaacatggacaggcacatattcagtcatccttcaataacacaatcgttacactgactgacagcgaaggaaatgctctttcctgggcaagtgctggtggtcttggatttagaggttcaaggaaatctaccccttatgcagcacagatggctgctgagacagctacaaaagctgctttgattcatggattaaaaactgtagacgttatggtaaaaggacctggttcaggccgtgaggcagctatccgtgcccttcaggcatgcggtcttgaagtaacaagcatccgtgacgtaacaccggttcctcacaatggatgtcgtccaccaaaacgcagaagagtttaatttaggaggtaagccacaatggcagtagatagaacaccggtcctgaagagatgcagatctcttggccttgacccgatttatttaggaattgataagaaatccacaagacagttaaaacgtgctaaccgtaaattatctgagtacggtatgcagttaagagaaaaacagaaagcaaaatttatttacggcgtacttgagaaacctttccgtaactactacaagaaagccgacagaatgaaaggtcagacaggtgagaacctgatgatcatgcttgagtcaagacttgacaatgtaatcttccgtatgggctttgccagaacaagaagagaagctcgtcagatcgtagatcacaagcatgtactggtaaatggcaaatgtgtaaacattccgtcttacctgatcaaagctggtgatacagttgaaatcaaagaaagctgcaaaggctcagagagatacaaaggtattctggagatcacaggcggaagacttgttccgaactggctggatgttgaccaggagaacttaaaaggcgttgttaaagagcttcctacaagagaagagatcgacgttcctgtagaagagatgcttatcgtcgagttgtattccagataagccctttgaatcataaataccctcaaatgttgattaaacccagaaggagggaacattaaagtgtttgatttcaataaacctaaaatcgaaatcaccgaaaaatccgagaaatttggaagattcgtggtagagcctcttgaaagaggatatggtactacacttggcaattcacttcggagaatcatgctgtcctccctgccgggagccgcagtaagccaggttaagatcgaaggcgtgcttcatgagttcagctccattcctggagttaaagaagacgttactgagatcatcatgaatctgaaaagccttgccatcaagaataacagtactgacaacgagccaaaaaccgcatacattgagtgtgagggcaagggtgtagtaactgctgctgatattcaggctgatcaggacattgagatcatgaatccagatcaggttatcgctacactgaacggtggaaaagactgcagactggcaatggagcttaccattaccaaaggccgcggttatgtgagtgctgacaaaggcaagacagatgacatgcctatcggtgtgatcgctgtagatgctatctacactcctgtagacagagtcaacatgactgttcagaatacccgagttggtcaggttacagatttcgataaacttacattagatgtatacacaaatggaacactggatccggatgaggctgtcagccttgctgctaaggtgttaagtgagcatttaagccttttcattgacctttccgagaatgcaagaaccgcagaagtcatgatcgagaaagaagataatgagaaagaaaaagttcttgagatgagcattgatgagcttgaactttccgtccgctcctacaattgcttgaagagagccggtattaatactgttgaagagctttgcaacaaaacttccgatgatatgatgaaggttcgtaatctgggtcgtaagtcactggaagaggtacttgcaaaactgaaagaacttggtctgcagcttcagcctactgaggaataagcagccaggacacatgcaatgataattacagtgggatgccaaagcagcggtacagtaagaccgaacaagcatgtaccgctgtcccacagatggaggaaaataacatggcaaaatatagaaaattaagcagaacatctgatcagagaaaagcactcctcagaagccaggtaacaagtcttttataccatggaaagatcgttaccactgaagcaaaagctaaagaggttcgtaagatcgctgagagcatgatcgctatggctgttcgcgagagagataacttcgagacagttactgtaactgctaaagttgcaagaaaagatgctgaaggcaaaagagtcaaagaagttgtagatggcaagaagaaaaccgtatacgatgaagttcagaaagagatcaagaaagattctccttccagactgcatgctcgtcgccagatgctgaaagtattctatcctgtaaaagaggttccggtaaaagctgctggaagaaagaaaaacacaaaggatattgatcttgttaagaaaatgtttgaagagatcgctcctaagtatgctaaccgtaacggcggttacacaagaatcgtaaagatcggacagcgtaaaggtgatggcgctatggaagttctgctggagcttgtttaatttaccatattgaattgtgaactgctgcaagactgcaggtatttagcctgttgttcctgcagcagttttttttgtgtgacagaatattactctgtaatgattactgtcacgttgttcaaacaacctgtaatgttgtattacacaaaaagaaattgcggtctgtactttttaaatagaaaagggtatactataacggaatatagaaagagaaagggtaaacaagagaaaccaatgaatataagaacacttgcagctatctgggcggcaaaatttgccggatttgcatgtaaaaaacttggcagacagggtgtgacatgggctggaaaaatagctcttcggatctccccccatatcctgaaagagctttcttcccaggtgaggaaagagatttttgtaacatgcggaaccaacggcaaaacaaccactaacaatatgctttgtgcagcactggaagcagaaggacaaaaggttgtatgtaatcatacaggttccaacatgctcaacggtgttgtggcagcatttgtactgtcagcagggttaaatgggcgtttggatgcagactatgcatgtatagaggtggatgaagcttctaccagacatgttttcccgcatcttcagcctgattatatggtgatgacgaatcttttcagggatcagctggaccggtatggagagattgatattactatgaatattctggaggagatgatccgtaaggttcctaagatgaaggtgatcgtaaacggtgatgatgcgctgtcagcatatctggccatggactgtggaaatccatatattacctatggtatcagcaaacaggtgcttaaaaatgataccaatgagatccgcgaaggaagattctgcaaaagatgtggggaacgtcttcagtacagtttttatcattacagccagttaggtgattacaaatgtcccagatgtggttttaccaggcctgccctggactatgatgctacagatgtaaaggtggcagaccagctgtctttccaagtggaaggacgtaggctggtggctaattatcgtggattttataatgtatataatatacttgctgcatatgcaggagtgcggactgccggttacagtgccgatcattttcaggatatgctgaataagtttaatccggaaaacggcagaatggagcagttcaggatcaggggctgcagtgttacattgaaccttgccaagaatccggccggctttaatcagaatatttcggcagtgatgcaggatacagctcctaaggatattattattaccatcaatgacaatgcacaggatggcagggatatttcctggctgtgggatgtggattttgaccggctgatggatccttcggttaagtcaatcacagtcagcggtatccggtgtcaggatatgcgcctgcgtctgaagtatgtggatatcccctctatgctggaggctgatgtggaaaaggcaattcgtgcaagggtggaggatggagtatccaatctttatgtgcttgtgaattacacagccttattcggcacaagaaatattctgaaaaggatggagggagagaaggaatgaaaatcaccattggacatttatacccggatcttctgaatctgtatggtgacagagggaatattcagtgcctgatgaaacgatgtcagtggcgtgggattgaggcagagaccatcccttttgaacttggggatcagattgatttctccaggctggatattgtgctcctgggcggcggatctgacagggaacagatgcttgtatgtgaaaaattaaaggagattcaggcggattttaaagcgtatgtggaaaagggcggtgtggtgatcgctatctgcggtggataccagcttcttggaaaatattacaaaacagaccagggaaccattacaggacttgacctggtagacctttatacagagcaagaagagggccgtctgatcagcaatatcgtgcttaaaagcgatttatttgatatgcctgtagtcggatttgagaatcatggcggaaggacttttataggggaaaataagcctcttggaaaggtgctgtacggctctggaaatgatgggaaaacaggttatgaaggagtagtatacaagaacgtgatcggtacttatcttcatggaccgcttcttcccaagaatccccagcttgcagactggttgattgcccgtgcccttgaacagaagtatcataagccagtagaactgtcccttcttgatgacagtcaggaggcagaggcaaatgcatatgtgtaccacaggtttgttaaaagcggccaggcagaggagtaaaagacatggcaaagtcatataatcaaaagggaaagatcttatatcttgaaaggatcctgcaaggtacaggggagaatcatacagtgtctatgcaggagattttggacgaattaacagaacagggtatatctgcagagagaaaaagcatttatgatgatatggaagtgctccgtttgtttggaatggatatccggtacaaacgaggaaaatcaggcggttattattgggcaggaaaagcaagcgggcagacatcagcaaacgaacagggaaccgtggacgggcagtgtgcagtaaaagagcaaagagaagctgaacctgtttgggttattgaaagaaagcaatctcagaaagaggaaaagcagatcaagcttttatgtgaggaagcggcgcgtcctcaagttcagcgctggtttggccctcaggttcagtataaagaaaaagagttcggttattttactgcagtggtacagactgcagaggatccggagttttacggatggctgacccgtatggggaaaagcgtacatatcgcaaagcctaaaaaggcagggcaggcatacagggactatttgaaaagtctggcaagagagtataaaggcatataagaaagaggaatgtgttatgattaataaaactgcaggaaaagcattgttattaagtgtggcagcattttcggttatgatgacaggatgcggttctaataaggccacagaggctgccaatgaaagtgtggaaactgaaaaggaaggaaaaggtgacagcgaggcggcggttactgaagtacctaagaaagaggaagcggatgcaaaagagccagaggaagaagagccagcaacgatagtaggggtccttttttctacagaccggcaggatgaaaggcatacattagaagaagaagagcttcttcagcagcttgaaaatgcagggtatgagccaaaagcttattatgcagagaatgatacggatacccagatcaaccagatccgccaggcaaaagaagaagcagccgctttggtgatttcccctgtagacgaatattctcttacagaggtgttggaagagataaagcaggattcagatccgataccagtatttgcctatgataagctgatccgtgatactgatgcggtcaattattatgttacctttgatacaagaaaagcagggaatgaagctggggataccattataaaaaatgcagagctggaaaaggcaagagaaaataaggaatcaaaaaccatcgaatttcttatgggctctccagatgatggaggagcactgtttttctataatggtctgatggaaagcctgcaggagtatctggatgatggtacactggtatgcagttcccagaaatcttcgtttgatgattctgctataatgagatggagcgaggacagcgccagatccagatttgaagagattataaaagagaattaccaggaagagggaaccccggatatcatctgtacagcctatgatggatttgccagtcaggtaatacaggtactgaaggaagaaggaatctcccaggaagcctggccaatgatcaccggtgtaggtgcggaagctgattctgtaaaggaaattgccttggatcagcaggattttactttgttcctggatggaagggagctggcaaaggcctgcgcagatatggtggatacttatcttaagggagataagccggaggtgaatgactatgagcagtatgataatggaaagaagatcataggtacttatacttgtgaggcacaggtgattgacaaggataattaccagatccttgtagataatggtttttatatgaaatctcagatcgttccagatccaactgcaacgccggcaccaaccgaaaacccggcgccaaccgaaagtccggcaccaaccgaaagcccggcaccaaccgaaagcccggcgccaaccgcaagcccggcaccaaccgaaagcccggcgccaaccgaaaatcccacgccaaccaaaacactgacctcaaccaaaacacctgcagtaacaaaggaagaaagttcaggaaaggattgaacttctttgaagaatagcgtatcatgatattaatttacaatacgcccagaaaaaaggagaaaaaacatgaagcttttaaaagaccgtattcttaaggatggagttgtgaagcctggaaatattcttaaggtagacagtttcctgaaccatcaaatggatattgatctgatcaatgagatcggaaaggagtttaaggcgcggtttgctgactgcccgattacaaagatccttactattgaggcttcaggcatcgggatcgcctgtattgcagcacagtatttccatgtaccagtagtatttgccaagaaagcacagagcgttaatctggatggggagatgtatactacaaaggtagaatcctttacccacaagaaagtttatgatgtgatccttgcaaaacggttcctcacagagcaggatcatgttcttctgatcgatgatttccttgcaaatggatgtgcccttttgggactgatcgatattgtaaagaaatccggagctacccttgagggagccggtattgtgattgagaaaggcttccagtctggtggacagcagatccgtgatatgggtgttcgtctggaatcccttgccatcattgagtccatgagcgatacatcccttacattcagggaataaagccactgatcgtacaagagataccagaccatataagagatatcaaatcatacaaaagtatcagaacgtacaaaagtgtcagatcatacaaaagtatcagatagtataagaagcccttagaaaggcggcacattacagatgtgcgcctgatccaagggcttctttttcatttgagcaggcataaatgcctggcattagtatctttgtagttatgctttgatctgtttttcaaggatatccagaatctcctgcataccaacaatctggttacggtatgcagtgtcacatagccggataagctcctgccggacaaactccttgcgggttatgcatggatgaaatgttcttgcatatacatttgacacaagtgaaccgctccccgtcaagtagacaattg

SEQ ID NO: 37 - DNA, 1882 bp, Unknown
  gut microbiota DNA sequence
acataccaaattcaagccctaactcttgtctttatttcacggttactttgatcttacaggttttattccctgattttactgtgatcactgcagtaccggcctttttacctgtgatcactccatttttagcagcctgagcaaccttcttgttggaggaagtatatgttgccttctgaagacttgtcacaggtgcaactgctgcctgcaacttcaacttcttgttccttccaagctttacgctctttgcaaccttcttgcctgtagcagcattggtaactgtcaaagcagtagtctttactgcctttttctgtacctttaccttgaaccatacagaatatccgcttttcagtttcactgtgatcactgcagtaccggctgccttgcctgtgatcttcccttttttacttactgctgcaacctttggtttgctgctaacaaaacggtcaacactgtcgccctttgccagaccacttaccttcacagtataagactgttttaccttcagaggaaccgttttctttgccccaacagacatggtaagtgttgccggcagtgcaggaatttcctgtacgttcagttctttctggcataccgtacatttctgtaccttctttcctgccacaagagcagttgcctcctgaaccactgtccattctcctgcctgatggttacctgttgcaggaatcactgtctgggtcgtttcagcacaggttgcacacttaagaaccttgtatccattttcactgcaggtagcagccttgcctccgatttccactgtatagctgtggtttccggttgcagggatcactgcctctaccggtgtgttacacttaatacatgtagtctttttcagacctgtttctttacaggttggctcctttacagtaacccatccgttttcatttggcacatgagctgtacaaatatcactgtcctgattttcttcagtaaagatataatcactaagagaactgataaggaaagtaacgttcatgtcctcttcatcataatcaaatggcagttcttcccttgttccatcccccagtacgtggatcagcttcatattatctggatccattccatccgggatcggcattgttacacggattggcacagatggctggatgttttcttttccttccactacctggttattattttttgtatccactacagacagcttaatactcagtaccagactgttacctggtgtataaccgtaagtattacctgattcctttactgtcagcttggctgccagtacctgatcctggctggttccggcagacgcagcatccaaagcagtaagcgcagctcctgtaacctggatcttgcctaccttatctgttacatctgtaacattctcattggccattattgccagcttctctgatattggaagaacattagtgaacctcacatggttaaagtcacgtgcttccagacgctttaggcgtcagactgaatatcggcggatacgcctgtaacttaggtctgcacagttatgtgctttttccatgccggatacggcaggcccccacattacaggtaatccgctgtatatctgcctgtgtttatgctgcttttaagatctccatttgcagatgaagttctcttaagtcagcataaacacataaggtcctacgctttacagaagggacttttgcctccagtaaagacctttccgttgccggaaggggttttaaaagttctcggataaaatatctcgccccgatattataagaagccgacaggtcacagtgatatctttttcctgttgaaaaggtacacagactatggttctttccatcacgcaggactatcccagacccatcatatgccagacggctggtattccacgcacagatcctggatacatgca

SEQ ID NO: 38 - DNA, 331 bp, Unknown
  gut microbiota DNA sequence
atgtcagactgcgacagctgagcggttgcgtctgctacaacggcacatgtctgttcgcccagaagctgagtagttccgcctgctgcatagaatttgcatctgatagaggtaacatttcggggatatccaagagcatattttccgtcttttgatacaggcacttttccatccttggcggttagaaccgtatacagtgaccggcgcacttctgattcatcctgtgtactggtgtaaaccgttctccatacaccatcatcattcaatacttcctcaataacgaaccgaccattcagagggtattttgttatgtcttttccaactgtgtagtaag

SEQ ID NO: 39 - DNA, 973 bp, Unknown
  gut microbiota DNA sequence
tcagagcctttgccagacctcttccgatctgtgcaaaatcaatcccgcctgttccgatcagctgattgagagtgtatacagctgtgttcagtccggctcccagtgtccgccctaagagtggccagtcaatgttggatacaaggctgttaaacgcagttgtgaatgcggttgtaaacgccgtgattttcggccccgcattatcccagctgatcacgttatacacatactgcagtccggtattgataccatctgcgatatattttccaaggccctcccagtcctgttcttccacaagctttttgatcttatccgccagatctttgatggtagaattgatgggtacctcctcgaacatctcacttggagacggccctttatactttgtggagccagtatcatccgttttcttatcgtcatacctctggatctcatcaagaccgctaagatagccggtcagggatttcttagcctttttcgcattctgtgaggttttgtccagactggcagcataatcttcctgtgcagtcacggccttggtaaaagtgctctgccctgaaagcgccgctatgaacattcccacataggtcaaggctttggaaatctggttaataaatgtaaccaggatcggtgacaccacggacaggatcggattaaacgctgtggcaaagctgtttttcagctgggtaagtgccgttgtcagtgccgatatactgttgttggtagttccgctgtactgtgcaaggttcttaaatccatcaacaattgctgaacgcaacttattgaaaagcacaaacaaggagcggatccccaggccatacttcaacagattctttagcgacaaagtcgttttgtttgcagacttatggattccaaagatacccgcagacacttttttcagcttttgcaccactgttccaccaagcgcagatgcaagagcctccgccttttttagaacaaatgaaaaggttttctt

SEQ ID NO: 40 - DNA, 7528 bp, Unknown
  gut microbiota DNA sequence
agtgtatgcatatcggagcgtatgacgatgagcctgctacggtagatgcaatgcacagatttatggaagaacagggatatacacttgatataacggatcagagaatgcaccacgagatttatctgagtgatgcgcggaaggtagcgccggagaagctgaagactgtaatcaggcacccgataaatagagcctaagggtatggagaaaaataatatggcatcaacaaaagagtatttggattttgttatggaacaattatcaggactggatgaaatcagcagtcgggcaatgatgggagaattcattctttattaccgtggaaaggtttttggtggaatatatgatgacagatttttggtaaagccggttccggtggcggtgaaaatgatgccggatgctgagatggaaccgccgtatgatggtgcgaaaaaaatgattctggttgatgatgtggataatcggcagtttctgtgtgaattggttgagagtatgtgggtagaattgccgaagaagaaagagaaaaagtgcaagtaagacttgacaaaatcgaacgaatattctgtattaacagcggagattttatacccaaaagcagaaactacgaatgtacaaatggagctcaaacttctaaatgtaataacaaatgcgccgttaatctgcattgatgtggccatgtaatcatatgttaccagtttccaaccttcggtagatctctcgtttagtaaattatccagtatggtaatatcttttgcatctgctttatctgaaaaccactttgttcctaagcattattgctggattagctatatttccatattctaaaatgcgcatattggtctcctttctggttaaacaaatatcgagttgtttaaccttgtatatattgttgcaggatttattttatgtatcaaaaaatttaggctggttgtgtcattggctatatcagctgggagatgactcccacctctataggtggtgagcaacaagctggtatcagtggtgggagtcaatcccccagctgatatagcctccggcaggattgcagaggtgcgcaggagaagtatgtcatgcaattgcatgacgcgcaccttgcagcaagaatgccgaggcattcttgaattacaaagcgtaaatggatgatcagtttgtcatagtgtgatggaaaataaatttatgtttttatttattgttacttgttctgattccgccattctcgaggagaaataccataaatatttttaaaggcacgggaaaaatgaagctgattttcatatcccacagcagaactaatgtctgcaatagacaaggatgtcagttttaataattcggtagcctttaccatacggtagttcataagaaattcctgcggagagcggccaattgagttgcggaagatttttccaaaatagctccggttgatgccgcatactgcagcgatatcttctattgaaatgttattctgaaaattctgttcaatataattgattgcttcttttatataataatcactcatgcgtccactggagactagcttagtagatttcgctgactgcagcaaatagtctataaacagatacagatgaccaatgagatgaaaagaagatttgttaggatgatttacgatataaagcatttcatcggcaagttttttacgcaattctttggagtgggaatgataaacaggtgcatccttacacaaatctgtgacacttaaagcttcttttatgcgtaagccatcaaattcaatccacatatattcccacggaagccgttcatccgcaatgtaggtgttaatctgacctggaaaaatcataaatccctgtccactttttacggaataagtctgtgttatgccctttgcatcgtctgccataagtgttccggttccggaaagaatatagtggaacaggtagtgattgcgtgttgcaggaccaaaagaatggccagggtcacatttttcatatccaaattgatacatacacaaatctataaagttctcatttggaaaaatattaaataatatattgctcataaaatgctccttacatgctttatataccaaaatgcgatatcaacatctattataacataaaatattgtattttggcataaaatataaaaaaaactgatattttacatcgcataaaggtatgttataatttgattaccaatagaaaaagcggatatcttacagaaaaggagagaggaatatggcaaaaagaaatatttttcgtggtcttgcggctgtgtttgcatttggcatatgcataacaggatttaccggatgcaatggtaaaaaaagcacagacggaaaaaccgagatcgaagtggtttcctataagccggaagcagttaaagcatttgaaagaattgcagagaggtttaatgaagcgcatgatgacattcatctgacaatttcatcgccaaatgaagcaatgaccattttaaagacacgttttatccgggaggattatccggatatcatcgcaatcggaggagatatcaactattccaactttttagatgcagacctgtttgaagatatttctgatctggatgaggttcagacggtaaagcaggcatatctgaatatggacaaggaactggaatttattccaaaggatggtacgtatgctcttccgtatgcggcaaatgcggcaggaattctgtataacaaagatatatttgaggaaaatggctggaagattccgactacatggcaggaatttaccacactatgtgatgaaataaagcaaagcggagtacttccattgtatctgggcttcaaagatacatggacatgtctggctccttggaatgcactggcggtcggacttactgattcggatacttgcaaccaggtaaatatgggaaataccacatttgctgatacgtatggaccagtagcagaaaagatgcgggcacttttggattatgcagaaaaaaatccgtatgcatacggttataacgatgcatgcacagcatttgcccgtggggaatctgtcatgtttcccattggaagttatgcaatcccacagatcaaatcggtcaatccggatatgaatatcggttcttttacatttccggcaaatgatttggaatcagacaatgttttaaattcaggaattgatctgcagttctctgtgatgaaagcatgtaaaaataaagaagcagcatatgaagttttaaaatatctgtatgaagatgagactattcaggtttatctggatgatcagggtgggattgcctgcaaagaaggagattttgcaattccggaaacccttgaggatatgcgtccttatattgaagataaccgcatggcagattatcaggatcatcattatccaagtgaaatgagcgtggatgccatgatacagacattcttactggatgaaagcgataatgcacaggaaaagttcctgaaaaaatttgattccgactggaagcgctacaaccgggatttgattcggaaagtacaggattatcagaaagaacaggaggatgcacaatgaaaaagaaaatgtcaaacagggataaaacattttgggcagttattataccagttctgatcttgttttttacattcaatacacttccaatgatcaaaggcgtgatctacagctttactaattataaaggatatggaacctacgattatgttggcatccggaactatgcagatctctttaccgatatccgtgtgggcaaaagctatctgtttacatttaaatatgcactggcaggaactgtattggtaaatgtactaagcctgatcatggcagtgggattaaacggtgccatccgtttcaaaagtgcattgcgtgggctttattttgtaccgaatattttaggcggacttgttatcggttatattttcagttttatttttacttatattcttccaactgtgggaacggtgtttcatattggatttttacaaaatagtattcttgcaagtgaaaaacatgcatggatcggtgtactgatcgtgggtgtatggcaggcagttgccatgaataccattatttatatttctggcctgcagaccgttccagaggaagtttacgaggcaagtatgcttgatggggcaagtaaatggaaacaattctggaaagtaacctttccgctggttatgccttttgtaacgattaatctggtattgagcacaaagaattttctcatggtattcgatcagatcatgtcattgactaagggaggcccggcacaaagcaccgaatccatctcttatctgatttataaaaatggtatggatggtggacagtttggattccagagtgcaaatgcagtcattttctttatagtgatcgtggcgatttcaattttccagatgacgatcatgaataagaaggaggagcagttatgataaaagaaaaaaagaaaacaaactgggtacttacgattgttctgattttgggaactgttacagtattatttccgctgtatatggcagtgatcattgcatttaagaatcccagtgaaatgaccaatgatgtggcaggggcactatccttcccgaaacagtggagttttgataatttccgccaggcaatggaagtaactgatttctggcactctcttggaaacagtttactgattacactggtaacgattgtgctggctatattgatccattcaattgctggctttgtgattgggcgcggcatggcaagaagaaaaagctttcgttttatctatttgtatattgtcagtggtatgtttgttcctttttctattttaatgatgcctctggtaaagcagacggcacaaatgggacttggaaaccgtgctggtgttatcctgttgtatctggtattttatatgcctatgaatgtcctgctttacagtggatacttaaaaaatataccgatagcacttgaggaggcagcagatattgacggagccagcacatggatcacttattggaaagttgtatttccaatgatgatgccaatgcatgcaacagttgcaatcctgacagctcttggaacctggaatgatgttatgacaccgcttgtgatcatgtccggaaccggacagaatacactgccgcttgcacagcttaatttccagacacagtttggaactaattacaatctggcatttgcttcgtatattctggcattgattccaattctgattttttatgtgatttgtcagaaacagattttaaatggcgtggcaaatggtgcagtcaaaggataaagaataaaatgaggtgatttctatggcaattatatacgatccaaataaaaagatatttaccctgcatacggctcatacaacctatcagatgcaggttgattcactgggatatctgctgcatctatactacggagataaaacaaacggtttcatggattatcttttaacctatgcagaccacgggttttccggaaatccttatgcagccggcatgaaccgtacctattcgctggatgtgctgccacaggagtatccttcccttggaacaggggattaccgtaatattgctttgaatgtaaaaagctgcaaaggtgttgaaagtgctgatttgcttttcaaaagctatgagatccgaaatggtaaataccagttacagggacttccggctgtctgggcagccgaaaatgaagcacagactctggaaattgttcttgcagatgaaaatgcaaaggttgaggtgcatctgctgtatggcgtgctggaagaaaatgatgttattaccagaagtgtccagattaaaaacataggaactgagcagattaccattgaaaaagcagcagcggcctgcctggattttgtacagggagattttgacgtcctgcggttttatgggaagcatgccatggagcggagtttagagcgcactccactgggacatggaaccacttcttttggcagccgcaggggaacatccagccatcagtataatccggcagtgattctggctgaaaaagggacaacggaggtggcaggcagctgctatggaatgttgtttgtatacagtggaaatttcttatgtgaagcagaaaaagaccagtttaaccagacacgcctgcttcttggattaaatgatgaattgttttcatatccgcttgcaggtggagaagtatttacggtaccggaagttattttgtcctattcagcaaatggactgtctgcattgtcacagcaatatcataactgcatccgcaatcatgtatgccgtagcaaatatgtccatgtgtcgcgaccggttctgatcaatagctgggaggcagcatatttcgattttacgggggatacgatcgtggatcttgccaaagaagctgcttcccttggaattgatatggtagtgatggatgatggctggttcgggaaaagaaatgatgacaattcttccctgggtgactgggaggtaaatgaaaagaagctgcagggcagcctggcagatcttattaaccgggtgcatgatcagggcgtgaaatttgggatctggattgagccggagatggttaatgaagacagtgacctttaccggacacatccggactgggcaattcagattccggggaaaaagccggtgcgctccagaaatcagttagtgcttgatttttccagaaaagaagtgagagactgtatatttgaccagatttgcaacgtgttggaccaggggaaaattgattatgtaaaatgggatatgaaccgtagcatgtcagatgtatatgccggaaatctttcctatgattatgtaattggtatttatgactttttggatcgtctgtgcagccggtatccggatcttctgctggagggatgcagtggtggcggtggcagatttgatgcgggaatgctttattattccccgcaaatctggtgcagtgacaatactgatgcaatcaatcgcacaagaatccagtatggaacttcgtttttctatccggtttctgcaatgggagcacatgtttcagcggtgccgaatcatcagaccggacgtgtaacaagcttccatacccgtggagtgacggcaatggcgggagctttcggttacgaattgaatccggcacttttatccgatgaggaaaagcagcagatcagagagcaggtccttacttacaaaaagtatgaaatgcttattaacgaggggacttactggcggttgtccgatccgtttaaagatgagattgcggcatggatgtgggtatcagaagaacagactcatgcactggtaagtgtggtgcgtcttatggcagaggcaaatcaggcagctgtttatgtccgactgcatggattaaagccggatgccgtttatctggaagaacaaagcggaagacagtattttggtgcagcgcttatgcatgcaggaattccgcttccaccgtttatccgggaatatgaggcgtatcagttttcttttacggagttgaaagagacaggaaataaaaataatatgtgatttttggtaattgtgcatctgactcattacttaacgtgatgagccagatgtgcatttttttatataataaaaattactacgtaatgttccaat

SEQ ID NO: 41 - DNA, 112993 bp, Unknown
  gut microbiota DNA sequence
acatattatataatcatctcatggaaaaagatatattgaatatagaaaatacttggagagaatcagtgtatgtttaaaaaattggtattggtgcaggcaatcctgcttttttttcagatcctgctgtatttcggatgcgagctttttcagaggaggatccatgatgtaaaacgtccagtggatgcgaagattccttttcttccatggacagtattgccttattgcttctggtttccgctgatcgctgtttatccgctggtggttttccagacggatccttattcatattgcagttacttgatgaccatggtgatagaaatcgtgtttagtgtagcatgttatttgatctatcccacttcttttcagagaccggtgccgccagatggcttctggggggattttatgaagcttatttatcatggcagctaccgtggactgaactgtgcaccaagcttgcattgttccagttgttttctgattatctgtacttcttttatatgtgtgggaatgaacccgtggattcgtatagtgacagtttcgattgctgtcatgatcgtattgtcaactcttacaaccaaacagcatacgttaatcgatgtgctgacggcagttccgctttttttgatcagcaggatcctgggaattatgttggcagaccagtattatgtacagtttcttacatttattggaaaataaaatgtaatcgcacatccctcactattaggataatcatcttattcaggcatttgtatgatcggcattggccatatggtagatcttttccatatctttcatattcagctgcatgaacaccccaatggtacgtgtatcctcaaagctgcagcgaaaggcaagatcgtggatctggctgtcggttagatccagtccaagctgatgaaggctggtaggcatctggatggaacggaagaagtcctccatagcctgaatgccctgcagggctgttttttcaaaatccagtccacagggaatgtgaaatacatttgtggcaaattgggcaaagcgctccgggttttctttgtatacgtatctggcccagcttccccataaagcagaaagacctgcaccatgggtcacatcatattgaccgcccagttcatgttccagctgatggcaggcccagtcgccgcctcctgttccacagccggtaagaccattgtgagacagggaaccggcccacatgatttcggcccgcgcattgtaattcccaggttcattcatcaggatccgggcattatagataactgtctgcataagagattcgctgatgctgtcagttacttccattgtttcaagatttacgaaatatcgttccatagtatgcatcagaatatccacacatccgctttcagtttgatactgaggaagtgtataagtaagccgcggatttaaaatggcaaatttaggacggcacagatcggtttttacgcatccacgctttaaccagccgtcttcgttggtgatcacagcggaactgctcatctcactgcctgaggctgcgatggtaaggatcacgccaataggaaggcagtctgttggagtttttttcttcaggaaaaagttccacacatcggtccagggattggcagcaccatatccaatggccttggaagagtcgatcacactgccaccgcctgctgcaaggataaaatccacctgttcttcccggcacagacggatcccttcgtagaccttggaaagccggggattaggtaccacacctccaagagtaacataggatacgcctgctgtgtccagaatgtctgtaatctcttttaaaaggccggaccgaactatgctgccgcttccgtaatgaatcagaacctttttataattgccttgttttaaaagctccccgatctggtaatgagtatcttttccaaatatgatacgggtaggagtatagtattcaaaatttctcataataatcctttcgcataattaataatcgatagttgttatatttgtttccacctatgtgcaagcacaggtggctttagaccttttgacactgtagtcattacattcttattaaatcaaaaaaatgatcattagtcaaaataaattgccaaatcttcataagagcttcataagaaaagaaataaatcaaaaaagtttttgtgagacggacaaatgtctttttgctgttgacatataccatgaaaccatatatactataatttggtaacgctttaaaagaaaagagaaaactacccttatgttataggaggagcaggaatgtattcatttgaagaaatccagaaagtagatcctgagattgcagggctgatcaagtcagaagttgaaagacagaactcccatattgagctgatcgcatccgagaactgggtgagtaaagcagttatggcagctatgggaagccctcttaccaataaatatgcagaaggatatcctgggaaaagattttatggtggctgtgtttgcgtggatgaagttgagactcttgctattgaacgggcaaagaagctttttggctgtgaatatgtaaatgttcagccgcattccggtgcacaggccaatatggctgtattttttgcaatgctgaagcctggagacacagtgcttggcatgaatctgaaccatggagggcatttgacacatggaagtccggcaaatatgtccggaacttattttaaagcagtttcctacggtgtaaatgatgatggtgtgatcgattatgaagaagttgcccgtattgccagagaatgcagacctaagctgatcgtggcaggtgcaagtgcatatgcaaggatcattgattttaagaaattccgtgagattgcagatgaagtaggggcatatctgatggttgatatggcacatattgcaggacttgtggcagcaggacagcatccaagccccattccttatgcagatgtgactaccaccaccactcacaaaacacttcgtggaccaagagggggtatgatcctcagtgatgcggccactgccaagaagtttaattttaacaaagcagtatttcctgggatccagggcggtccgctgatgcatgtgatcgcagcaaaggctgtttgttttaaggaagcactggaaccggaattccaggaatacggaagactggtagtagaaaatgcaaaggctttatgtgctggtcttatgaagagaggtgtggatattgtttccggaggaacagacaatcatctgatgcttgtagatttaagaaatctgggagtaaccggaaaagagatggagaaccttctggatgcagtgaatattacctgcaacaaaaatgccatcccaaatgatcctcagtctccatttgtaacaagtggtgtacgccttggaacaccggctgttacatcaaggggaatgaagccggaggatatggatgtgatcgcagaagccatagctttaatgctgaaaagcagggatcatcaggaagaagcaaaggcactggtgaaaggacttaccgataagtacccactggttggttaattttttacaattgcaaagaacattacaaagaaccttttggattagacgggaatgctctgatacagaaggttcttttatgtgcaggcctgtcttgattttaaagggcgtgaatgttaagataaggagagttgacagagattcaggaggaacttgatttatgaataaaagaaaatggatatctgtgatagctgcgttctggagtgccgctgctattgccctgtcaggagagtttgtagaagccaatggccttttaaggacactgaatagtgaattaaatgggatacgtttggacaaactgatcgtattggcagcgctggttgcgttttattataaagtgtgggacaggttcgtggaagaaagtaagtggatcacccatcttttggctgcgttcttttcggtgtgcatgctgatcggtatcagttattccacgcagggaagctgggtattttttatgggtaaccgtaagcagacggtgattgctttccttgcttttgcagggtattttattctgtttgacgtgactctaagcatattttatggctggctgtccagattgaatctgtatcagatcagggcaaagaagccgttgcctgcatttgctcaaaagcacagccacttgtgggcatttcttgtcatatatctttgctggctgccgtggatcattgtatttttccctggctctgttccggcagatggatacagacagctggatatgtactttggcggtgagaagtttactacaaggcatgcctgggtgctgactatgtttgtaggactgcttatgagtattggcaggctgatcaatgataatatgggagtttttctgatcatactggtcacatctcttctggaatgctactgctattccggtgtatgcagccgtttgaaaaagtggaaagcaccaaagcagctgtatgtaggttctgtactgtttttcggtctgatgcctatgtttggtacttatgcccagactgtgatcaaggacagtatgtttagtgcagtatttgctctttatatggcattgtatgcagaatgcgctattcctgcgcttcagaaaagaagcggcaaaagactgtcatcacagctgatacagcttgccattgtggggatatttacctgtttctgcaggaataacggaatttatatggtctttgtttccatggttttcctgatcttttttgtggcaaagagacagagagtggtggttctggcgctggcgattgcagtgtttggatgttattcagtttctgagaaagcagtggcacctgctcttggtatttcttctatttccagcagggtttatttttccattcctttccagcagactgccagatatgtacggtcttatccggaggatgttacagaagaagagaaagatgccattaaccagatcctgaattatgatcagctggcacaaagatataatccggagttgtctgatccggtaaaagccacttaccgcaccgggaatattacaaaagaaaagctgatgaattatttcaaagcctggttttccatgtttaaaaagcatcctggggtttatattgaagcaacccttcataatacttacggatatttttatccattttaccataatacggcacagggaccttaccggttatataataaaacctttacagagtatcagtttgaatatgactatgtgttcccaaatgaggccaggagtgtgatggcccaatatgcatatttgtggagaaatgttcccggctttgcccagatcagtaattccggtgcatatacctggatgctcctgatccttgcaggctacctgttttacaggaagcgtggaaaggggatattggctttggcagcaccggctttgaatgtagctatctgtgttgcttctccggtaaatggaatgttccgctatgtgctgccgcttattgcatgtatgccggtagttgtgtactggtgtattggatacggagaaaaggaatttacagatgaatcagaagaaagcaggtgattgcttggaaaaaattgtgatcataggggacggaccggcagggatttccgctgccttatatgcagccagagggaatatggagccattggtgatcagtatgggaagcagtgcccttgataaagccgaactgattcagaattactatggcctgtcaaagtccatgacagggaaagaacttcatgaaaccgggatttctcaggccagagagctgggagtccgttttatggaggctcaggttctgggagtcagtggatttgatacctttgaaattaagacaacggcaggggatctggaagcagaatgtgtgatcctggcaactggcagccagcgcaagaccccagggatccagggattgaaggagctggagggcagaggtgtcagctattgtgcagtatgcgatgctttcttctatcgtggaaaagaggtggcagtgctgggaaatggagaatttgctcttcatgaagcagaagaactggcacccatggcatcgaaggtgactatttgcaccaatggaagtgcaccggatttttccggagaggcaaaatttcctgttaatacagcaaagatccaaaagattcagggagatgaccaggttacggggatttgtttttcaccggaggtcagtgcaatggatacagaatctgctcaggcaaatatccttccggtggcaggcgtttttgtggcttccggaactgcaggcagtgcatccattgcaaggcagatgggggcagtccttacagaaaagggcaatatacaggtcaatgaaaatatggaaagtaccattcccggactttttgcggcaggagattgtacaggcggacttcttcaggtggcaaaggctgtttatgaaggcgcgaaggcaggactttctgcggtacagtatgtgcgcataagagccagggataaataatagaagtaccagtaaagaccaaaagtctgccggatcatctgaaaagataagatttacggtatcacaaaaacaaacaataaggaggaatgttttatggtaaagacagttacagtacagaattttgaagaggtagttcagtcagagaaaacggttttgcttgatttttgggcaacctggtgtggtccatgtatgcgtcaggggcctatcgtggaagcactgggagaagaaggctttgcagtaggcaaggtagatgtggatgcacagccggaactggcacagagattccggattatgagtattcccacattgatcgtttttaaagacggaaaagaatacaaaaaaatgatcggccttacatctaaagaagaactgaaggcccttcttcaggaataaaggtccagacggatatgaagatcattcttgctgcatgtaatgcaaaatacatccattccaatttggcagtatatgatctgcaggcttatgccaggcagtatcagcagcatattcttttaaaagaatataccatcaatcagcagaaagatgagatcatgaaggatttatacgaggaaaagccggatgtgatctgcttttcctgctatatctggaacatctcgtttgtaaaggaactggcggaagacctgaaaaaggtgcttccgtctgtacctttttgggcaggcgggccggaggtatcctttgatgcagaagcctttcttgcggccaatcctgcatttgacggtgtgatggtgggcgaaggagaagaaacctttctggagcttgccggatactatgtggatcataggaaaagcctggaacagatccgggggatcgtatttcgtaaagaaaaccaggttctccataatggatggagagaaatcatggatcttagcaaggttccttttccatataaggatctgcaggattttgaccataggatcatttattatgaaagcagcaggggctgtcctttttcatgtagctactgcctgtcttctgtagataaaaaactgcgattcagaagccttgatctggtgcggaaagaactgcagtttttcctggatcataaggtgccacaggtaaagtttgtggatcgtacctttaactgtaaacatgatcatgccatggcaatctggaaatatattgttgaacatgataatggagtcactaattttcactttgagattgcagcagatcttttgcgggaagaagagctggaattgatggccaccatgcgtccgggactgatccagctggaaatcggtgtacagtctaccaatctgcagacgcttgaggctatccacagaaaaacagatttttcaaggatatgccagattgtggaaagaatccacagctttggcaacatccatcaacacctggatctgatcgcaggacttccatatgaggattatgacagttttcatcattcctttaatgatgtatatgcattgcgtccccagcagtttcagctgggtttccttaaggttctgaaagggtccctgatgaagcaaatggaaaaagagtatggcattgtacataaagaaaaagaaccctatgaggtgctttccactaactggattacttatgaagatgttttaaatctgaaaaaggtggaaaacatggtggaagtgtactataatagtggacagtttgaaaattcattaaaatatgtggagactttgtttcctgacagctttaccatgtatgaagctttaggcaggttttatgagcaaaagggatatgactgtatttcccataaccggctgcgcagatatgagatccttcttgaatttatagaaagcctgaagcagggagatgtacaaaaaggtgcagacgtacttgtgctggatctgtatcttcgggaaaagctgaaaagccgtccttcctttgcaaaagaccagaaagcagaggaaaaaaagatatgggcataccgaaaacaggaaaatattccaaagacagctcatatccaggtgttttgggatggaagggttcttttgtttgattatgagaaaaaggatccgcttacaggtaatgcattgacagaagaaatcagattataggaggttcgatgtgatggggatgtttgatccgaagaaaagaaaaatgatcactgcggtgatcgccatcattcttgtgctggcaatggtgattcctactgtgatctctctcctgctgtaaacaggataggggaggaaagcagatgagacttaaaaagcaggtcatggaagcgctgcagcaggaaataacaggaagactgcagccaggggatgaactggtggttattggtgctgtggctttggaaggcacaagacttttggcgaaagataaaaagacaatgctggagatgcgcttttcccaagggtttatccaggatatgttatacgccagggagagatacggtgtccaggatttaacagaaaatggctttgtgtggaaaatggcagaggcagcaggggcagatgtgatctatcctatgggtgaaggcggatttttaagcggcctctggaaagtagcagaggtatccggcacaggacttgtggcagatttcaggaaggttcccgtccgtcaggaaactgtggaattatgcgaggtactggatctgaatctttacaggctgcgctctgatggcgcctttctggcaggtatcccatcaggagagggactggtgagaaaatgtcaggcggctggacttcctgctgcggtgatcggacaggcaaatgcgggaaatgaccgcctgttgtacagcggtgagaatttccgttatcttgaccgtccggcagaagatgaaatatacaggctggggctttttaaataacaggaggatcctattatggctttaaatattgtattacatgagccggaaataccggcaaataccggaaatatcggtcgtacctgtgtggcaacaggtacaaggctgcatctgatcgagcctcttggctttcatttaaatgaaaaggctattaagcgtgctgggatggattactggaaaaatctggatgtgaccacttatctgaattatgaagacttcctgaaaagaaatccaggagcaaagatttattatgccactaccaaggcaccacagacttatacagatgtgtcttatgaagaggactgttatattatgttcggaaaagaaagcgcagggattccggaagatatcctggtggatcatcaggacacctgtgtaagaatcccgatgataggggatatccgttccctgaacttaagcaattctgtggccatcgtgctttatgaggcattacgtcagcatgatttttcccatatgaatctgcaggggcatctaagaaattacgaatggaaataggccatcaggccttttccagagtaaagataaattctgttccaatgccttctgtactgaccacatcaatattctggtcatgggcattgatgatttcttttacaatggaaagaccaagtccggtacctttcctgtcttttccacgggaaacgtctgttttataaaaacgatcccagattctggaaagactattcttggggattccacagccatggtcttttacggaaataaacacacggtcatttttttctgtggtttctacttcaatggaggattcatcatcactgaattttactgcattgtccagaagattgtatagtacctgctgaatctgttccatatctgcattgacaaacaattctgtacctgaaaggattaattccaatcggatccggtgtttggtacattctccctcaaaagcttccgctgttgttttgatggtctgattaatatcgaatttctgtttatgcatgatccgcttctgcacgtccagatcattcagggtaagcaggctgcgtgtaagcttctccagccgattagcttcaaaagaaatgatatttaagtatttgccctgcatttccaccgggatggtcccatccagcatagcttccacataacctttgatagatgtaagaggagagcggaaatcgtgggagatgttggcaataaaatgtctctgatattccccattccgattcagcttttctgccatatagttcaacatattggcaagataacccatttcgtcatcagaggtaacagggattttgtaagatagattgcctcctgcaaattcagtagtaccacgaatgatctgggataaaggcctttgcacatgccagtggtaaagcagtattaaaagcaaagtggtcaggtaaatacacagaaaaaggatttgcatgatcttaaggagcccgctgcggttttgataaaggaaacgcatctgataatggatggccacatagccttttgttgccatatcagctgtgatgggggcgatcacgctcagccttggggaagagaaaaaaccataaaaatcccctatctgataatagcttccgccccaggctgtaggatcaaaggattttacaggggctgggaaattggaggctgttttatctgtgtttacaataatttcattctgattgttcaggatccagatttccgtatcctgggctatggctatagaggtcaggttttcctgtatggtatccagattgtaactggaaatattatgagtcactgtttcattggaggcaatggaaactgcctcctggtaaaaagactcacttaaggagtgttccagatgcttttcaatgagacgggaaccgccaccggttaccagcagaaaaccggtaatgccaatcaggatgtaacagaagataaattttctggacagagaagctttcattcgctttttacctcaaatttgtatccgattccccacacagttgctatggaccagctggggtgatctttgatcttttcacggagacgcttgatgtgaacatctacggtacgagtatcaccaatatattcatagccccagatatggtcaagaagctgttccctggtaaaaacctgatttggggaggatgccaggaagtaaagcagttctagttccttggggggcatatccacctgccgtcccatataggtaacagaataattggtaaggtttactgtaaggtcaggatagcttacacttttctcgttggaagggacggcaggagattttacattaaatctgcggagtactgcccggatcctggctaccagctccttggaatcaaagggtttgatcacataatcatctgcaccaagctcaaggccaaggaccttgtcaaaggtctctccttttgcagacagcatgataatgggaatatcagatacatgacggatctcacggcatacctgatagccgtcaatcccaggcagcatcagatccagcaggatcagattggggtggaaagcctggaattcctttaaagcctgctctccgtcattgacgatctttgtctcgaagcattcttttgtaagatacagggctaccagctctgcaatattgttgtcatcatctacgatcaggattttctgtttggatgccatttcatttctcctttcacttcttgaattcaacaatagtcacacctgcatctccctcgccaaattcacccaggcgataggatgcaacccgtttattacgtctcaggtaatcgtggactcccttacgcagggctccggtacctttgccatggacaactcgtactttgcttaggtgggcaaggtaagcatcatccagatatttatccaggattgcaatggcttcatcaacagttttgccaagcagattaatctctgtggaaacactggaggacttagacatgcggatctttcctgcaccggttttctgaagtgcagaagaggagatcacaggctcgtccaccagttccagatctgaaatatgaaccttggaacggatgatcccggtttgtacgaaaagaaagcctttggaatccggacggctgctgatggtaccggtcaggttcatgctcaggatgcgaaccatatctcccagggaaagatctttggcagaaagctttttcttcggttccttcggcgcagccttgatggaaagtgcattgtccgctttattcattcttgcccggatattctggcgttctttttcgactgctgcagtatccacatggtctttctgaaatttatggaaaagcttcatggtctggtcggcatattcctttgtttctgccaggatacgtttggcttcctcgttggcatttttcagtatcttgtccctgcgctcatccagcctttcctgtttggtttccagttgttttttcagtgcttcgatctgttctttgtatgcctcgatctgtgcacgttcgttttcaatagttactcggctgttttccagggaagtaagtacatcctcaaaagattcatcctgttcgctgatctgctgttttgctttttcaatgataaaatcaggcagtccaagcttggaagatatggcaaacgcattacttttgccgggaacaccgatcaacagccgataggtaggacgtaaggtttctacattaaattcacagcaggcattttctacaccaggggtacttaaggcatataccttcagctcgctgtaatgggtggtagccatggtacgaatccctttctcatgaagataagagagaatggaaatggcaagtgcagctccctctgtagggtctgtacctgctccaagctcatcaaaaagcaccagggaatcactgtctgcttccttcaggaaagagactacattggtcatatgggaagagaaggtacttaacgactgttcaatactctgttcatccccaatatctgcatacacctgatggaaaacggaaagctgggagcggtccatggcagggatatgaagacctgcctgccccatcagagtaagaagtcctgcagtcttcaaggaaacagttttgccacctgtattaggaccggtcactaccagaagatcaaaatcatccccaaggcgcaggtcaataggaactgcttttttgcggggaatgagaggatgccgggcctgcttcagccggatcctgtgctcagtattgaaaatgggttcagttccgttcatatccatggcaagggacgctctggcaaaaatgaaatccagctgtaccatgatctccagatcatcacggatctgatccgtataggcagcagcctggttgcttaactctgcaaggactgcttcgatttctttttgttcctgaagctccagctcccggatatcattattcagctttacaatggccataggctcgataaaaagggtagatcctgtggaggactgatcgtggatcattcccggaacctgtcccttatactctgcctttacaggaatacaatatctgccattacgcatggtgatcactgcatcctgcagatagtttcttgcacctccgttgaccagggaagtaagctgggtgtggatccggtcattggcgatcttcatgctgcggcgtaccttcaaaagaccgggactggcactgtcgctgatctcgtcctcggacaggatacaacggcggatctctgtagaaagaggagtaagaggggaaagctgttcaaacatttcatccagggaatctgccggatggtcacctcgttcattccgggagtaagcttttaccctggatgtgttctccaaaaggctgcagatagacagaagctcaatgatcccaagtgtactgccgatctccaggcgtttcagtgaaccacgcacatcttttacacttccaaaagagatgcttcctttctggaaaagacgggacagtgcatcccgtgtctgagcctgcataagctgtatctgtacaagatctacggaagggagcagatccctgcaaagctcttttccaagaggagaggaagccttctccgtaagctgctgtatgattttataatattcgagagattttaatgctttttcgttcacgtaaatacatcctttattttcaaaatattattagaaattccttatggaaccctgacttcattttacatgattttatatcggatgaaaaggaaaatgtgaaaaaatattcatgaaaagttcacactttcctgataaaatacataagtctaagttttgcaatccacaggagaacagcacattatgggaaaggacatgaacataaagccagaaaatgaagactaccagtttatgagagaaaccattaagaaaagacctgctgaccgcaggcgcttgttcagaaagggactgatgctgtttattggcggagttttctttggattgtgtgcggcaggtgcttttatctgggcattgcctgagtttgctgagcgttttgctgaagagaagggacttgtttctgctgtgaagctgaccactgcatcttcagaagagcaggcttcgtcagaagaaaaagagagtacagtatcaaatacagattcatacacatatgtacagggagaaaccagtcttacacaggataccggcagccttgaaaaagatacagatccgctgatcaaatatcagcagatttaccggagagtcctggatgtggccaagaagcccagaaaggcattggtgagagtgacaggcacatccggacaatctgatcttctggatgcttccattcttcactatgaagagggagaggggatcatttttctggaaagcagttcctgtatttatatattgacgaactgggagccatctgagaagaccagcagcctgcaggttacatttgcagactccagcactgccagggctcatttatgtcagacagatgatgcaactggtctgtctgttatgtgggttcgcacatctgagctttcagacagtaccaaaaaagcaatttcagtggtttcccttgcacagtcttttgcaccggagcaggcagaacctgtgatcgctattggcagtccttctggggagtttgatggagtgctttatggcatagttacttcaacatcaggaaggttttcagcggcagatgcagagtaccagctgatgactaccaatatccagggatgtataagcagcaagggcgtactgataaatacaaagggtgagatcgtaggtgtgatcaaaaagaatatcagggaggatgtgaatgtgatccaggcattttccattgcacagcttcggtcccgcattgagcagatgactaataagcaggcaccccgttatcttggcatatacggggtaagcattccagaggcaaaggcagccagccttggcatttcaaagggcatatatatagagaaagttgacaaggattcaccggccatggcagccggcatccagcgaggggatattatcactgcgctgaatggtaatcctatcagtgatatgcaggaatacagtacatatcttcagagctgcgaaaacggtttggagatcagcatgcagatctctaggtacagcggggacggagaactgggggaagtagaacttaccgttaaggtaaatgaaaaataggccggatcaatagagacccggatcagagagaggcagaacatgcgttatattaatgagttacatgaaggcgacagggtaaatggaatatatctttgcaaacagaaacagtctgcaatgactaagaatggaaaaccatatgagaacctgatcctgcaggataaaacaggtgtgatcgatggaaagatctgggatcccaattccaacgggatcgatgattttgacggactggattacattgagatcatcggagacgtgaccagctttgcaggagccatgcagctgaatatcaagcgggtacgcagggcgttccctgaggaatacaatccggctgattatcttccggtaagtgagaacagcacagatgacatgtatcatcagctggtatctatgattgacagtgtaaagaatacatatctgtctgcacttcttcataagctgtttgtggaggacaaagattttttaaagtcttttgaggagcattccgctgccaagacagttcatcatggctttattggtggtttgatggagcatacattaagcgtgaccaggctttgtgactatatggcaggtgcgtatccggtgataaagagagatcttctgatcacggctgcattgcttcatgatgtaggtaagaccagggaactttcttcctttccattgaatgattatacggatgagggtcagcttttggggcatattgtgattggtgcgcagatgatccatgatcttgcaaaggagattccaggatttccggttgatctggagaaccagctggtccattgcattctggctcatcatggagaactggaatacggctctcctaagaagccggcgcttgtggaggcagttgcactgaatcttgctgataatacagatgcaaggatggaaactctgacagaggtatttgctgcagacaaaggaaagaaagaatggctgggctttaacaggatttttgattccaatttaagaagaacaggagacatgtgattcatatggaatatcgcaagaatgatctggtaacattgaagattgaggattgcggcgtggacggtgaaggcatcgggaaagcagatggcttcaccgtttttgtaaaggatgctgtgatcggggatacagtaaaggcaaagattatcaaagctaagaagaattatggctatggaaggctgatggagatcattaagccttctttattcaggacagagccagaatgtgcattcgccagacagtgcggaggctgtcagctgcaggcccttacttatgagaagcagcttgaatttaaagaaaaaaaggttagaggtcacctggaacggatcggaggttttacccagattcccatggagcctgtcataggggcagagcatcctttccattacaggaacaaggcacagtttcctgtggggatgaataaagaaggcaggatcattaccggtttttatgcaggcaggacccataccattattgagaacagagactgtgcccttggagtaaaggaaaacaagcaggtgctggatttagtgatcgatcatatggaaaaatacgggatccagccttatgatgaggtgacaggcaaaggtcttgtccgtcacatcctgatccgttatggattttttacaggacagatcatggtatgtgtgatcattaatggggacaggctgccaaaggcagagatcttatccgggcagcttcagcagatcccgggaatgaccagtatttccatcaatatcaataaaaaacgtaataatgtgatccttggggacaggctggaagttttgtggggcaagccatatatagtggataagattggagatatttcttatcagatctccccattatccttttttcaggtaaatccctatcagacagggaagttgtatgcaaaagcactggaatatgcacagcttaaaggagaagagaatgtgtgggatctgtactgcggtacaggaaccatttctcttttccttgcccagaaagccagatttgttcgtggggtggagatcataccggctgccattgacaatgccagggagaatgcaaggctgaaccatatggagaacctggagttttttgttggaaaggcagaagaggtacttccaagggaatatgaaaagaatggcacatatgcagatgtgatcgtggtagatccgccgagaaagggatgtgatgctcaccttcttgatacgatcctgaagatgaatcccagccgtgtggtatatgtaagctgcgacagtgcaacccttgcccgtgatcttcggtatctgtgtgacgggggctacagattggagaaggtctgccctgtggatatgttcccaaataccgtgtcgatagaaactgtatgctgcctgagcaggtaaaagcagaacttgcaaaaattcatattttccatatttccgtttctttttgtccattttaattatgaaaaaatcaggatatacttaccttacttgataatcatttatgaaaaaaggaggataacaagtatgaggaaaaacgcaaaaagactggcagcgttggctatgagcggagtgatgactctgtctgtagcaccggtagctgtacatgcagatgataaggtagaacttaccggtatggtacagcagtccagatggtattccggattacagaacatggtgcagaagctggaggaagacgagaatatctctattgattttgaggtcgttccggatgatcagtatgataacctgatgaaaatgagattaaattctcatgaggctccagatctgatcgcatatcagtttgctgatctgtatgctgctgtagacccggaagaattctttgttccgttagatgaccaagcatggatgtcaaaagtaaaagctccggaaattacagaatacaacggaaagcattacggatattgtttcgaggcatccaatggtttccagggactgatctacaataaagatgtttttgaagcaaatggaatcacagagcttccaaaaaccttagatgagttttatgctatctgtgataaattaaaagaagctggagttgttcctattgctatgccgtctgacacttgggtaccgcagatctggatgacctctggtatgtcacgtgcattaggaactgaggaagcttgtgaggattttgcaaataagatcctgacaaatcaggctaaattcaatgattatccggaaatggctgctgtaatcgatgaatatctggatttattcaaaaaaggatatgtaaatgatgattatatgacagtaagctatgatgagatccttggacgtctggcaagtggcgagatcgcaatgatctatggcgcaacagaaatcctgacttccatcgaagagtcttatccggatgctaacctgactattttcaatccgcctgtaggctatgatgacaaagatgtgctggcatatcttcctacagctatgggattagctgtaaataaagatacagaaaatctggatactatcaagaaagtgtttgatctttggagcacaccggaatatggaaatctgtatttccagtctcgcccaggattcccgaatattgaaggcgttgatggaaatgaaagcgcaatgaatccggatatcccgaaaatctacaatgagtatatggaagatggcagagttgttgcacagatgaatcagtacattgatacacttcagccactgtttggaaatactatttgggtttactatcttgaggcaccatccaaaggaaatatggatggaaaagcagttctggatcgtttccaggaggacgtggataaatttatgaccgaaaaaggagcagaaggctggaactaatacatcctctgcagtttgattaataagattaatccaaaagaggactggagcaaagagctttagtcctctttccattaaggagatataatatgaccaaaaaaaagaaatcaatttatcctttgtgggtgattcttccggcgattgtgatatacaccattttttccgttgttcccattgtgatcagcctggtatgctctttcacagattggaatatgggacggttatacaccccggttttcagaggcctggctaattatgtggagcttttaaaggatcctgtttttctcaggtcaattggcaatacatttctgtttgccctggcaaccactgtactgaaaacagtggtaggatttttgcttgcacttgcaatggtaaaaaagatacccggaagagggctgatgcgaaccatttattatgcaccatgtgttatcagtattacagtggtgggagtattatttaaagccattttagcaaataaaggtttattaaataatgttcttcaaatgatcggatttagcggacttgcccatgattggcttggaagctatggcactgctatgggcagcgtgattatggtagaaacatggatgtgggcaggattcaatatgtttatttttatttccggcttacaggcgattccgcaggattattatgaaagtgctaccttagatggcgctaccggttttgaaaaattaaaaaatatcacacttcctttgattgttccatcaatgaccgttgtagtgacactaagcgttgccggtggtctgaaagtgtttgatattatttatgtaattacaaatggaggaccgggatttgatacacaggttctggcaacctatacctaccagtcattcagccttggattccttggagaatcagcagctggaagtgttattctggctgtcattgttgtgatcatatcgttttctatgaatcactatctaacaaaacgtgaggtggaaatgtgaagaaaatacatgcagaaaaatatatcctctttctatttatggtcgcactggcattggtgtacatagtaccatttctgatgatgggattggggtcatttaaaaatcaggcagaagctgcaaaatttgatctttccttgccaacacagtggattttttccaactatacccatgtgctggaatccggcaaaatcatacctggatatgtaaacagtctgatcgttactgttccggtaacactgatttccgtttttctgggagcgatatccggtattgtcatttccagacgcaatgacaaattatctcatgggatttattattatttcatctttggtcttacattaactttgcaaactgcatccatcttctttttattgcaggctttgcatatatatggtacatttttatcagtgatctgtatttttatttcgctgagaattccttttacggttatgactttttgcagcttcgtaaaaggagtgccaagggaaattgatgaagctgcgattatggacggctgcaatttctggcagatgactcttaagatcttaatgccaatattgaaacctatcatgataaccaatgttgtaattacggctattgatgtatggaacaattttatgattcctctgttttatttaggctctgctaaaaaagcaacggtttccatggcaatttacagcttcttcggacggtacaacagggactggcaatttgtttttgcagcattgatgctggttgtattgccaatgttaatactttttataattcttcagaaacatattatcgctggtatgacagccggcgcagtgaaagggtaaagggaaaataaatggctacaaattatatgatcatcggatatggatggagagctgacttctactacagaatcgccagacttctgccagaacagttttctatttgcgcaggtgtattacgtacagaagcccgtgcaaaagaggttgctcttaaagaagggatttttgctactgcagatttggatcaggcactggaacgcaagccggattttgctgtactctgtgttccaagggattttgccaaggattacctggtaaaattaatggaaaaaggaattccggtactttgcgaaacacctccgggaaagaatgtggaagaattaaaagaattatgggaaatgtcccaaaaatacaatggccgtgtacaggttgttgaacagtacttcctgcagccttattatgcaggtatactggatattataaagcaaggctatctgggatctgtatccagtattatgctgtctgcacttcatggctatcatgctgttagtattttccggaaagttcttggacttgaatacgaaaattgcacaatccagggcaaaaaattctggtcagaagtcaccgctacaaatggcagaaatggttttgatgaaagcggaactgtgatcaaggaggatagagactgggcatttatgcagtttgataacggcaaaacagcctttatggactttgaaggtgaacaatatttctcacagatccgtacaagacgctggaatatccgcggcgtgcgtggcgagatcaatgacaatacggtaagattcttaaatgcttccaatcagccggtggaacagcctatgcagagaatcgatgtgggaattaataataacagtgaatggtcccataagggaatcatgttcctggataagcaggtttatcaaaatccttattatccggcaagaatgaatgatgatgaaattgcagtagcttcctgcctttcccatatgaagacttacgtggaaagcggaacagagttttactcactgcgtgaagcacttcaggatacttatttatcctttatgctggaacaggcaattgaaaccggagaaacggtcaaaaccgaaacacagtcctggagtatttagaaaatagtaaaagaggtgattgcttgaggaaatatcagtttcagaaaaaaatactgttacgtagtatttttatgatgcttggagtatttattatcgtaactgttgtatttgccggctactttataaagactcgtacaactgagtttgaagaccaggtagataaacagcttcagggaatcacctctcaaatagataatacattgcagcttgccgatgatattgccctgcagattgctgcaaactatcagatcattgatgtttttaatcaaatagagggatatcatggtgataagaattattttgtggaaaatacggatgttgattatgctgtaaagcagcatctgatctcctacatgttaaaacaaaatgtgctgaaacggatcagtttatttgatgcaaaccaggattttatctatgtgggaagagccgtagattatggatatttaaaaaagaattgtccaaattcagagcattttacagacacatttacttattattcagaacaagatggaaaaggaagcctgtttcgggtcgattctgcagatccgtatatgatggattcatcatcaacaatttccgttctgcgggaaatcaagaattatcagttggtaccttcagaatgtttgggttacgtacaagtccagatccagctgaacagttttaaacgaatgtgtaagctccttggaaaagacacggaatgctatatcttagatcagaaaaatgaccatattttgtattcttatcaaggccagaagacagcatctgaagtaaaaaagcttttaaatcaaacggatgatcttgcaaaaggggaaatgtactgcaaactctgggaatctgaacgatatggaatcaaaatcctccttgcatctaaaaacataggcttgatccacagcctgaactccacacttgcgtggggatttattttactgttttttctgatcttcatcatgatttcaggacagaaactggtgatcagacgaacaacagaaccgattgttcaaatgtgtgacatgctgacagggctaaaggttgataaaaatttacagaacattcctctggtaagtggtgatgaaaccgatgaactaaggcaattgaattatgcatttgataaactggtaatcaatttaaaaaaatctatggaaaaagagatgatcagcagagtcaatgaaatacagagccaaatgtatgcattacagacgcaaatgaatcctcactttatccacaatatcttaacagttatttctgcaatgtccggtacatctgaatgtgaaaaaataccggaagtctgtgaaaaactttcaagtatgatccgatatattgtaagcagttcccaggaaaatgtgaatttaaacaatgaagttctgcatgcagagaattatcttgaattaatgaaaatacgttacgaagacaaattccagtattctatgtcctatgtaggggaaatacaaaattgccatttacccagatttattattcagcctcttcttgaaaactgttttgcacatggctttcataataaagaatttccatggaaaatcgatattcagatttattgttctgaagagttctgggaagtacagatccgggataatggatgtggtatggagcaggaagaactggaaaaaataaagcaggagttgcaggaaatgcgtaatcgcgatttgaaatcgcttatgaaggaaatgaagattggcggtctgtctataaaaaatgtttatatgcgcttatttctggcttatgggaagcatatgatttttgacataagtaatagagctgaggggatgtgtatcacagttggaggaaattatgaagatacgagtactggtagtggaagatgagcctcccattcagaggagcatatgtcagaaaatagaggaaagcaatgaaaatttcaaagtgatagcagccatagacaatgggaaggatgcaatacaatacctgatagagcatccggttgatgttatgtttgtggatatgaacctgcctattgtaagtggaaaggagattctgaaattttgctacagtgaaaagcttccggtgctgcctgtggttttaagcggatacacagattttgaatacgtaaaatgtgcagtagccaaccatgcggttgattatttgctgaagcctttaaacagtcaggaactgactatcctattacaaaaaatagaggcaagaatccggaaacagcagcaggaagaaaaggttcaaaatctgacagatgcggtaaaagggctccacacattgcaaacaaaagagaaccgtccggaaatggatccttcatatagtatgctgttggtaactcttggtgcatgtccgtatgaaaatgaaagaaattacagggagctttttgaaaagttagatctgggagggaatttctcgcaaattgtacctaaggagaatttctggctggtgaatggcaaaaatattaacgaaaaaattatttttgtacgtagagatcgtgtcccggatatcaatcatttaaatcaatttgtcagaagtctgaagtttcccggccttaccattacggttgtattttacaaagaagctgtaaaaatgacagacatttttgctacatatcatttgctgcagaaatatgcacgtgaacatatgatatttttgaaaaattctgttttgatctacagtccggaaggtttcaaaccggattttacaggtcttagggaaaaaattgacagcctgatacttcaatgcaataatatgagtatcaataatataacaggatcttttgcagacctacttcatttgtttactgtgcggccggttacgcaaaaagaagctgtacgaaatattaaatattttgtatcagaattgtataaagtgcaccagggtcacagaggcttttttgaagtagaagaagatatacaatttattttggaaaattattatacagaagaagaattacttaaagaatttgatttcctgttaaaagacattttcggaattgaggtatatgattccagagataaaaagcttattgcagtaaagatgaaaaactatctggatgaaaaattcagaaccaatgttacgaatcaattgctggcagccagctttggatttgtaccgtcctatttggtcagcatttttaaagcttgttatggactgacacctatggattacctggtaacgaagagaatcgatgaggcaaaaattcttctggcagatggctcattaaagatcaaagatattgcaagcggcgtggggtatgaagattctctttatttttcaaaagtgtttaagaaatttaccggggttagtccaaaagaatatgtaaagtcgaataaataaggcaatcgggatttgctgcagacgcatgctgtgaggaatattttggaaatgagtgtgagaatctatggcgaaaaagaaaatatatgcagtgcgaaaggggaaaacaaccgggatattttattcctgggatgaatgcagtgcttctgtaaatggatatcctggcgctgaatataaaagctttaccacaaaagaagaggcaaattcttatctggggaactcttttgctgtacagatcgaagaagaaaaaaaagatcaaaagaatacagctctcgacggcacagaatccacattaacagcatacgtagatggaagctttgatctgtctattggcaagtatgcctttgggtgtatcctgctgactccggacggggaaatcatccgggaatcaggtaatggccaggatccggaatccctggcaatccgcaatgtagcaggagaaatgctgggagccatgtatgcagttcagtgggcgatcaaccatggttatccgtcacttaccatatattatgattatgaaggaatcgcaaaatgggcacagggagactggaaagcaaaaaataaacgtacacagcagtatgctgagtttatgaatggaaaaagatcttatattcagcttagctttcagaaggtaaaggcacactctggcgatcattataatgaagaagtggacaagctggcgaaatcagcacttgtaaacgggaatgggattcccaggatcagtcgtatataagaataaaaaaggccattggcaaagggatcaacccttcagccagtggcctttccatgtataaaggatcataagcaccattccaaatgcccaggatacaggatataaaataaatacgccctcaatagaaccaaagcatggaagaatgaactgtacccagaggatacggaacaggcacagtgaaaccagcaggattaccattggaggaatagttttacctgtaccacgtactgttcctgccagcccatgcaggatccccagcagaaaatagaaggggcagaaatatttcatggccagctttccaaagtttaccacagaaggatcggatgagaacatctttaacagaggatcagaaaaggtcatcagcaggaagcctgtagtcagggtgtaaagaatctccatggcgagagtgacccagatacctttctttacacgctggatcttgcctgcaccatagttctgccctacaaaggtagtagcggccatgctgaagctcataaccggcatgatattaaaaccgtcaattttcatataagcaccaaaacctgccattgcagaagcaccatatccgtttacactggattgtaccaatacattagaaaaagaaatgaccatgttctggattccggtaggaagtccgacctggatgatccttttcaccatatgcttgtgcagccggatctttttaagactaacctgataatcggactgtacacggatcagatagaggatggccagcacaccggatataagctggctgatgtctgtggcgatggcagcacctgcaacacccatgtgaaatccgcggatcagaagcaggtcaagaaaaatattgatgatagatgcacagccaagataaagcagggatcgtttggaattgcctgcagcattcaggatcccggcagccatattataaattacattaaagacaacaccgccgaagtacagacgaagataggtaacagagtcaccaagcacttctttgggtgtatgcatctgcagcaggataggcttggtaaggagcatgccgcctgcagtcaggatcagtcccaggaaaaaggcaatggcaagtgctgtatgcactgcgctctgtacttcttttttgttattggcaccaagatactgggaaacgatcacgcctgcacctacagaagcaccctggctaaatgcaatcagcaggcagatcaaagatgtgctggagcctactgcggccagtgcattactgccaacataatttcctacaataatagaatctgcagtgttataaagctgctgcagaagattcccaaggatcaaaggtacagaaaagaaaaaaatctgcctggcaatgcttccctcagtcatcagcttattttcatttgtttttacactcattataattccctcccccaaaatattataggctttgctgccaggaaagacaatatatattttatgttacgtatatgttaggatttagaatattccacttaaaaaatatgcgcaggatggaaccttttgcctgatatctgcatctaatgtacagaacatgaagaaaacatgctgctgaacaaagagaatatcagacacgttcctttgtatacagagtatgaaaaacatgttcctgtacgtacagatcttcagaaaggaataaaagggacaagcaggtgaatgaattagtaaatcaagcaaaaaaaggagatccggatgcttttacggaactgatgcagtctcagatgcagaatatgtataaggctgcccgggcaatcctgaaccgggatgaggatgtggcagatgccatatccgataccatccttgcatgctgggagcatctgggtagcctgaaacaagccggatatttccgtacctggatgaccaggatcctgatcaataaatgctatgagcagatcaggaaaaacaaaccggtttctgtgcagaatcagattccggactatggatactgggaaaataaatatgagaatatcgagtggacacagacactggattcacttccccaaaggtatcggctggtgatgatcctttattatgtggaaggatttaaaatcaatgagatcagtaagatgctggatatgccaaagggaacagtaaaaagcagactggccaggggaagggaatgtctgacagattctttcaagttgtgcagggagggcaattaaatgaagaaaaataaggcgatgtatacattacagcaggatattaagattccggatattgtggagacgaaagcagatcagacctttgcaaggatacaggcggaagcaaagacaggaaaagagaagatcattgtttatgataagaagatcagaagtccaaagaaaaaatatgcagtgctggcaatggcggcagtgcttgctgtaggtacagtttctgtatatgccgcttataccaactggagtaaaggcttgaaagaggaattgagggttacggatgatcagcaggagaatcttcaggcaaatggaatggcagccttttcagatgcatctgcaacagatgctggcatcacggtatcggcacagcagagcattacagataattattatacctatctgtcttttaaggtagaggggtatcatctggaggatggaaaacagccggattttgaaaatgtttctgtgactgtggatggaaaacaggattttagttcaggttccagcttttatagtggtatagtttcagacaatgatggaatggccgtgtatgcagatggatcagccctggaaactacagaagatggaaagattattgaacactatgtaatggatgacggaagcatggagtatcatatggtgcttgcgaaaggtgatgagaaaggatattttatcggcaaaaaactgcatgtggagtttgagaatctgggaactgtggctaaggcagaatattttccggatattaccggaaaatgggagcttgatatgacccttggaggggcagatacatctacgattattcagaccggggaacagctgggggatacagggctgacgcttacaagcgtagaactttctccaatatcgatccgggcggcttatgatggtactgctgtagatcaagaggcagaaatacctatgataacaggtttggtgtttaaggatggtacaagaatcgagggtatttatggaggtccgggctcagaggttacggaaggaagccagcatatcacctcatttgctttggacagggtgatcgatccggatcaggtggctgctgtgttgatcccgaaaaatctggagggatcagcagaagggcaggatacagattattatcaggtggccatacagtagggtgagagccggatgaaaattaacagtaaccagcagtagtgaaccgggctggggcttgatgatccaggatagaactgctacaatggaaactgaaagatttgaaagaaagaagattacggacatatggataaagaacaggtggtacaaaatgtgcaggcacagctttttttgatgcaggacctgaaatacagggattttcacagcagcctgatgcctacgattgacaaaaagaaagtgatcggagtaagaacgccccagcttcgtcagtttgctaagagttttggcaaaacagaagaagcacagatatttatgcaggtgcttcctcatcggtattatgaagaaaataatcttcacagccttctgatccagcagatcagggattatgatcaatgtctgaaagaaatggagcgttttctcccgtatattgataactgggccacctgtgacatgcttgcattaaatgtggtaaaaaaacatctggatcagtttattgaagtagtttatggatggatacagtcagacaggacgtataccatccggctggggatcggtatgctgatgcgttattatctggacgacaggtttcaggaggaatatgcagaaagcgtagcaaaggtacagtctcaggagtactatgtaaatatgatgcgtgcctggtattttgccacagcactggccaaacagtatgataagatcctgccatttcttctggaaaagcgtctggatgtgtggacacacaataaaacgatccagaaagcagtggaaagctaccggatcacatccaagcagaaaacatatttgaaaacactgaagataaaatattaaaagaagagtatttatcagatgatattaaaataataaaagaatagtattcatcagatggtatcccacaaggtgtatttaaagggaaacaaaagcgggaatcctggaatcctctgccaacttgtgttatactaaaaggaagttgggtaaagggggactttatttgaaagaatatgaagtgatctgggagatttttaataaatgccccagaaatcagatgcgggatgtgtttgtggaggagatagagctggaagacccggaagagtatgtaaaacagaaatttcagggaaaagaagtcacctatgaaaaatcagttcttgcagacggcacagagatctttgatattattacctcaggaatcaaacaaagatgttcctttacagagatctgatccaggtgttataatgcaagataggctttttatacagaaaagcctgtgatacaggagggactatgagtgatcatatagaacacgcacatactcatgtgctggaggatggaacagttgtcagccatacccacggacacacccacagccacgaacagaccaaagctgtgctgaaccgcttatccagagccattggacatctggaatctatcaaacgaatggtagaggacggcagggactgcagcgaggtgctgatccagttatctgctgtcaagtcagcgatcaataatacaggaaagatcattttgcaggatcatatagagcactgtattgtggatgcagtagagcatggagacaggaatgcaatcaaagaacttgaaaaagctattgatcgttttatgaaatagtgtgagctgtcagtttattatgtagcattatgaatagagtaaatatcaggaggaaccagaaaaatggcaaaagaatgcagcaatccaagctgtgacaaaacaagctgtgagggatgcagccagaagaacaatcccaaaagctttcaggagaaaatgaatgcctgttcagatgtaaagcatgtgatcggtattgtcagcggtaagggcggcgtaggtaagtcatttgttaccgcttccctggcgaaccagatggcaaagaaaggatataaagtaggtatcctggatgcagatattaccggaccgtctattcctaagatgtatggtcttaagggggccgcacaggcagatgacaaggggatttatcctatggagacgaagaatgggatcaaggttatgtctattaacctgctgcttcctacagaggaaacaccggttgtctggcgaggaccgatccttgccaatatggtgaagcagttctggacagatgtgatctggggagatgtggattatctttttgtagatatgccgccaggaaccggtgatgtaccgctgactgcttttcagtctcttcctcttgaagggatcgtgatcgtaacatctccacaggatctggtacagatgatcgtaaagaaagcctataatatggctggtatgatgaaggtaccggtacttgggctggtagagaattacagctatgtacaatgtccggattgtggcaggaagatctatgtttttggcgaaagccatattgatcagatcgctgcaggattaaatattccggtacttgggaaaatgcccattgatcctgcttatgcagcaaaggctgatgagggagcttttgatcaggtagacaatccttatgtagaggctgcttatgaggtaatgccgaaataatcgtatctgtttcttgttctcacagttataaataatcaataaatgtacgggctgcttcggaaagaggcagccctgtttgtgttgcaaggacaatctgtcttggaggcagcgtttcttctaaaggcacacatacaagggatgcatctggtaccatgtaatccggcacacaggcaatcccaaggccgattctggccagatccagcagcagatcattgctgttcaatacgatttcaggggaaagattaacccctctggatgaaaatacccggttcagatattcgctggtagtgctgtggggagacagcatcataatagggtaattcagaagcttctccagggtcagggcagcgttcccaataggaaaggcatcaggatttgcaacaaaaacatcatgaaaattacaaaggactttctgctggaagctggtggtaagccgggaattgggggaattgcacacgatcagatccacctgcctgttttccagaagctctacgcatccaatagaagtgctgtttgtgatcttgatccgtacatcaggatgatcctgatgaaatttctgcaggtagctgatgagaaaatagcggcagatcgtgtcacttgctccgatccgaagatgaccggtgagcagcttttcatcagaaagaagagcttctccttcccccagcatttccagtgcaggctttacatgctgaagaagcagttcaccttcagcagtcaggatcactttcttggtgctgcggataaaaagggtgtgccccagtttcttttccagagttttgatggcctggctgacagcagactgggagatatagagctggcgggaagcctgggaaaaacttaaggtggttgctacaaaataaaatactttgtataattccagattaatgtccatgttgatatacccctgtaatgttttagcgataagtgatgataataaaaaatataagatatattaattttactaatgatataaagtatgttaccatatcagaagataataagcaagagtaccatacattacggatacagcattacaagacgttaaatgctttgctgtatctaatattacctggatcaatgaaaggagtacaggaaaagctatgagcaacgtaagaagagtgtatgtggagaagaaaccggcttttgcagttaaggcaaaagaactgaagcatgagatcagcagttaccttgggattaagacggttactgcagtaagagagctgatccgctatgatgtagagaatatttcggatgatgtttttgaaaaagcatgcaggactgtattttcagagccgcctgtagatgacctttatcttgaaaaatttgatatggcagaggatgcgtccgtattttctgtagaatatctgcctggacagtttgatcagagagcagattctgcagtgcagtgtattcagttcctggatgagaatgcacagccgatcatccgttctgctaccacctatgtgattcagggagccattacagaggacgaattggaggctattaagaaccattgcatcaaccctgtagattccagagagacaggtatgatcaagcctgagactttggtgacagaattcagcgatccggaagacgtaaagatttttgagggctttacccagatgccagaagacaagctggaagagctttacaaatctctgaatcttgcaatgacttttaaggatttccttcatattcagaattatttccttcacgaagaaaagagagatccttctgttacagagatccgtgtactggatacatactggtctgaccattgccgtcataccactttttccacagagcttacagatgtgaagttccaggatggagattataaggctcctattgtaaatacttacaaccagtatctggcggatagagaggtactttacaagggaagagacgacaaatttgtatgcctgatggatctggcattgatggctatgaagaaactgaaatccgaaggaaagcttcaggaccaggaagaatcagatgagatcaatgcctgcagtattgtagttcctgtagatgttgacggcaaagaagaggaatggctgatcaattttaaaaatgaaacccacaaccatcctacagagatcgaaccctttggtggagcagctacctgtcttggcggtgctatccgtgatccattgtccggacgtacttatgtgtaccaggcaatgcgtgtaacaggtgcagcagatcctaccgtatctgtgaaagataccttaaagggcaagcttccccagaagaagctggtaagaggtgcagcacatggttacagttcttacggcaaccagattggtctggctactggttatgtaaaagaaatctatcatccggattatgtggcaaaacgtatggagatcggtgctgttatgggtgctgctccaaggcgggcagtgatccgtgagaattctgatccaggtgatatcattatcctgcttggcgggcgtaccggccgtgatggtatcggtggtgctaccggttcttccaaggtacatacagaggcttctattgaggtttgtggcgctgaggtacagaaaggaaatgcacctaccgagcgtaagatccagcgtatgttccgcagggaagaggtcagccatattattaagaaatgtaatgattttggtgctggcggtgtttccgttgctattggtgagcttgcagcagggcttcgtgtggatctggataaagttcccaagaaatatgcaggtctggatggtactgagatcgctatttctgagtcccaggagcgaatggcagtagttgttactcctgcagatgtggataaattccttggatatgcaaatgaagaaaacctggaagcagttcctgtagctgttgttaccgaggagccaagacttgtccttacatggagaggaaaagagatcgttaatatttcaagggccttccttgataccaatggtgcccatcaggaaacttccgtagaggtggagatcccgaataaagagggaaatatcctggaagagcgtccggaagtaagtgatgtaaaagcaaaatggctgggaatgctggctgatctgaatgtttgctctcagaaggggcttgtggaaatgtttgacggttctattggcgcaggcagcgtatttatgcctcatggcggaaagtatcagcttactgagacacagaccatggttgccaaggttccggtgcaaaatggcaagactaatacagttacaatgatgagttacggatttgatccatatctgtcttcctggagcccatatcatggagctgcttatgcagtgactgagtcagtggcaaggatcgtggcttccggcggtgactacagaaagatccgttttaccttccaggaatacttccgtcgtatgactgaagatccaaagagatggagccagccgtttgctgctcttctgggggcttatgcagcacagcttggctttggccttccttctattggcggcaaagacagtatgtccggtacctttaatgatattgatgttccgcctacacttgtttcttttgctgtagatgtggcaaagatccaggatgtgatcacaccggagctgaaaaaggcaggcaataagcttgtatgggtacgtgctccaagagatacctatgatcttccggattatgataagattatggatacatatggcaaactgcatcaggatattctggatggtaaagttgtttctgcatatgcgcttgaccgtcacggaattgcagctgcagtgagcaagatggcatttggtaatgctatgggtgttaagatcgagcacaatctggatccaagagacttctttgcaccaggatttggtgatattattcttgaggttccggatggcaaggttggggagctgtctgtacagtatacactgatcggtgaggttacagcagatggcagattctcttatggcaatacccagatcactcttgaagaagcttataaggcatggactggcactttggaaaaagtatttaaaaccgtttccggtgaggaagccaagggagcatcggatatcctggttaatccagaggataaggatgctgtcatggaaaatggcctttataatacaaagaagatttatatctgcaagcacaaaactgcaaagcctcgtgtctttattccggtattccctggaacgaactgcgagtatgacagtacaaaagcatttgagcgcgcaggtgcagaagtagatgtaaaagtatttaagaatcttagtgcagaagacattcgtgattctgtggagatctttgaaaagtccattgatcaggcacagatgatcatgttcccaggtggtttttccgcaggtgatgagccggatggatctgctaagttctttgcaactgctttccagaatgcaaagatcaaagaagcagttatgaagcttctcaatgagcgtgatggtctggcacttggtatctgcaatggtttccaggcactgatcaagctgggactggtgccttacggtcagatctgtggccagaaagaggattcacctactttgacctacaataccattggcagacatatttccaagatggtttatacgaaggttgtaagcaataaatccccatggcttcagatggctgatctgggcggagtgtactgcaatccggcttcccatggtgaaggtcgttttgtagcagatcaggagtggatcaaaaagcttcttgccaacggacaggtagctactcgctacgtagatccggaagggaactttgaccagtctgaggaatggaatattaacggttcttattacaacattgagggtattacaagtccggacggacgtgtacttggtaagatggctcatagtgagcgccgtgacgatggcgttgctattaacatttacggacagcaggatctgaagatctttgagtctggtgttgcatatttcaaataagagcatttaaaaaggatgcagcaatttctcttttgggattttgctgcatcctttgtgttatacgctgttcatgatcttatatcgatctagtagaggtaatctttgtttacatatccgtatttcatcaggctggaggaatatacataccaataagaaggatcactggaatcgatcacctgtactgtttctccattatttaatttgccaatctcattagaagaatcataagctttggcattacgaagagccagataaccctttgcaacactgactgtccaggtgggataaacaggagcagtactgccaaccagataatctttgtttacgtatccgttcatattcaatcttggggaataaacaaaccagtaagtaggatcgctagtatccaggatacttacagtatctccggtattcagctggccgatctcattggatgcatcgtaggctttggcgttacgaagagccagatatcctttggaaacactgactgttctggtgaaatctgaacttgctacagcaccggtgtacatagaacctccaaccaggtagtctttgtttacaaaaccgttcagattatatttaggagaatataccagccagtaagtaggatcgctggtgtccagaagctggacagtatctcctgtgtacagctgtccgatctcgttggaagcatcataagccttggcattacgaagagccagatatcctttgtctactttgacaactctggattcgcaggcataaacagtgctgctgcttaccagataatctttgtttacatagccggtacagttatatttgggagaatataccagccagtaagtaggatcgctggtgtcatttacctgcacagtatctccgttatacagctgtccgatctcattggaagcatcataggctttggcattacgaagagccagataacccttggaaacacttactgtccaggcggcagaattcattgagatcaggtaattcttattcacatagccataggaatcatacttgggggaataagcataccagtatgttgaatcgctgtaatcattgacctctacagtatcgccactatacagctgtccgatctcattgcggctgtcataaagcatttgcgtgcgaagagccagatagccactgggaacacttaccatataggtattggcagatgcctgacagttcctgctcatccagggaacagaaagtgcaaatactacagccagcagtgcggcccatttcaaaaaggccggaagatagttgcatttcttatttttcatagatcctcctttcgcctgctatggcaggcttacatgcagcgtcgtgcatgttattctcagatactgggggcaaaaacctgacaggcagacaattgaactccagccatctttattattgtctattataacagattgaaagatatatttgtattcttgattgttataatgtcacaaaatttgcaaatcgtagcttcccatacttaaaaataatacacaggtatcataaccagagcatttgctcccagccgtaaatttatgaggctgaattatagtaatcaaaaatctgtctgctcaggctggcaatagtactttgtgccgagccgcactcactaagattctctgacataaaaaccaggatcagttcattatccacgtcataaatgattccagcatcattttccacattgtccagttcaccggttttattggctgtttttgcgtctgatggcatctgtgccgggatcttattccggcgtgtctgtgcagccagcaggtcgaacatggaatctgcatatgggtattcagaggaattaccactgtaaatcccgtatagcagatgaccacagtcagccacagaagtgtaattgtcatcatatgcattgctttgaagaagaagtcgtcccatatgcgtgttattaaagccatgtgtactgcagaaatcatttacaacagtcatgccggcagaagaatcacctccgcccagacagctggtaagggcattggcagcatcattgtcgctgactgtgatcatggaataaaggttggaatctacctgttgctggccatattgactgataagagtttcataattctcatagacagcacccataatatacagcttgatcagactggccgcctgcatggaatggtcattgacagagccttctgactcattataaagatcgcgcacataaacggaccagcttccattggaaacagggagacgttcctgcagctgggtaaggagagaggaaagtttctcatctgtaggtgcttctacagaagaagcctgtccaaatacactgcttttagaattgtcggatggcggagataatgtgccctgtccatcagaagcctgattcgcagatgtggtgcccggagccggttccgcctggtcggaagctgtcgcattagtgcccggagccggttccgcctggtcggaagctgtcgcattagtgcccggagctggttctgattggttggttgttgcagaacctgtgctcggtgccaccggtccctgcacttctgcagcagtgactgcagaaaagctccctgctgttactgctgcagctgtaacaagcggaaagataaatttatatttgcgattatttttgcctggtttcatacaaacctcctggtatgctaaatgaaaagaaagtgaagaattttcttaagtctttttaagtataattcatttgttgcagatttccaatatttttgcaggaaaacatgaagaaaagatggctttatagcgataaatatgaaataatacaagaaatcctacacatgcaactgcaggttgacaaatcttaaagccgggtatctggtgtgcaaccgatggatattgtatgctgagaacgtcaaaaaaagaaatgctttcccataatggaaggcaggaaggagaaaaaagatgattctggcagacaaaataatgaatttgagaaaaaaggcaggttggtcccaggaggaactggcagaacagctgaatgtaacaagacaatccgtttctaaatgggagggggcaagagcagttccggatatggaaaaggtagtacagatgagccgtatttttggtgtaagtacggactatctcctgaaagatgaaatagaagaagataatccggaagacaatgtacaggtcatttcagaacagccactgcgtaaagtgactatggaggaagcctctgaatatttggaatgtagcaagaaatcagcacctaaaattgcttttgctacttttttatgtgttatatcccctattacattgttgcttttgggtggattaagtgaaacaaaaatcataaaacttaccgaaaattctgctgggggaattggattatgtgtccttttattgctggttgcttcagctacagggattttcatatcctgcagtgcaaaagtgaaatgttatgactttctggaaaaagagccttttgaaacggaatatggggtgactgggatggtaaaggaaaagaaaaatcagtatcatccaacctatgtacgcctgaatcttattggaaccgtattctgtattcttgcagcagtaccgttgtttgctgttatgagcattgcagacaaagatatcttctatatagatgcagtttgtctgcttttacttatggtggcatgtggctgttatgcgtttgtgtatggaggcacacgaaacagtgcaatggaaaagctgctggaagaaggggactatacacgcagcagaaaagcaaagaaaggagtgatcagtgctgtttcggtaagctattggctgatcgtgactgcagtatttctggcagccatactgcctgctaaaagcagctataaaggcagcagctggatcatctggcctattgcaggtgttctttacggagcagtagcatctatcctgaatatttcattcaaacataatgaataaaatggtttggatttcaaaacaatcaagtttgattttggaatattcttttgaaaaatattagaaatcggtcacaggataatcacagtttttctttatgatagcaggtatgtaaagggaggttatcatgactgataaagaatactatgacttggtccagccgtatcatgatgcaatgaagcttttacttaccaggttggaagtgttaaaccatacgatttatccatctgctgccagtaacccggtacataccgttcagtctcgcatcaagaagaaggcaagcattgaggaaaagctgatgcatcgggggctggagcctacagttgataatgccaagaatgttttgcaggatattgcaggtgtgcggatcgtttgttattttactggagacatccacaatctggtgaacatattaaagaaacagccggatctgatcttcataagagagcgggattatattgagaatcctaagcctaatggatacagaagttaccatattatttttggagtaaatgtttgctgtctggatgcagtggaatactttcctgtggagatacagttccgtactatttcaatggacttctgggcagctatggagcacagggtatcttacaaaaaggcatatgctaataaagcgcagagagtggaagaattactcagatattccaatactcttgaagagatggaaaaggaatttgagaaatataatgataatccacggctttaaagacttgcataatcagaaaatcgtggtaaaataagatacggacgaaaggcggattccgaagagttcgccttttcgtttaaatacagattggcactcgatgcgaatgagtgctgataaaataaggcttgattttgcatgattaaggccataaggaggaaacatgtatgattagcatacccatttatgatttactggtattgccagaggttacattttactttaaaaaagatatgtttcccggaaatgaaataaccacggaaaatgttggggaagatatactttttctgatgctgaagacagataaaaagccccatcagatacaaccggaagacatctatccgattggagtgctggggaagattgaggccttaggagaggatgacactgttaagatcactaccatagaaagggtaatgctgagtcagatccaggctacagagattgggattacagccacttccgttccatatccggaagagaaagatattgatccagatgaagaggctgagcagttcaagaacatgaaaaaagaattgatgagctttgcaaaggatctgcagtgggggatctgggcaagaggtgtgatctatcactggcagagctttgatgagatggcctgtgccctttccagctactttgcatcttcctgggaagaaaaatatagttttcttgaacagcagtccagaagtgaacgtatccataaaatcaaagaaactgtatatgaacttctggagatcttccgggtcagccaggaagcagaaagcgcccagaagaattctaatgaacagatgtaccgtgagtctgccctgaaaaaacagattgaatttcttcagagacagctggatgagatgcatcctgagaatatctcggatgtacgcagatttgagaagaaaatccaggagtctggcatgaatccggaggcaaggaaggaagccgaaaaggttctgaaccggatgaaacaggaaggaaaagatggtcatgaatacggacttttgtatgattacctggattttgttaccagtctttcctggaaggaagaagaaatgccttctatagacctggcagaagccgaaaagatactggatgaagaccattatggcctgaaaaaggtaaaagaaaggatcatccagcagattgcggttatggcgcttaataaaaaacaggctggatccatcctgctttttgtaggtgcacctggtacaggcaaaacaagtataggtcagagcatagccagagcacttcatagaaaatatgtaaggatcagtcttggaggtgttcgggatgaagcggagatccgtggacacagacgcacatatgtgggcgctatgccgggacgtatcatggagggaatgcgaagaagcggagcgcagaatccggttatggtgttggatgaagtggacaaactgaccagagattatggcggagacccatccagtgcacttttagaagttctggatccggagcagaattccaactttacagatcattatatgaatgtaccatatgatctgtctaatgtgctgtttgtatgtacagccaattctactgatactataccggaacctcttctgaaccgtatggaagttattcagttccccggatatacacagatcgagaaatatcatattgccagggaacatcttcttccaaaagcaatgaagagtatgggactgcgtaatcagaacctgaaagtgacagacgaagccatattaaagatcattgaagaatatacggcggaggcgggagtaagaggccttaaacgtcaaatcgatgttctttgcagatgcgctgctgtaaaattggtaaagggtgagcagaaaagcattactgtcagcgagaaacgactgccggagttccttgggaagaaaggcatctatcatgaaaagatccaggaggaaatgcagccgggagttgtaaccggactggcctggaccagagcaggcggggaaatcctttttatagaaacttcctttacaaaaggcagcggcaaggtgatcatcaccgggcagctgggagatgtgatgaaggagtctgcacagattgcagtcacttatgtgaagtcacttttcccggaacacgctgagaaatttgaaaagaatgatctccatattcatgttccttctggtgctgtgccaaaagacggtccgtcagcggggattacgctggtaattgcacttgcatccctggtaactggaaaggctgtggatacacagatagccatgaccggagagatttctttgagaggcggtgttatgcctattggaggtcttcccgaaaaactaatggcagcccaaagagccggagttaagaaggtgtttattccatatgacaacattgaggatctggaagatgtggcagaagaagtgaaagaaaagattcaaatctgtccggtaaagaaaatcaaagaagtactggaccagaccctgggcttacaaaaaatgtaaaattattctagattacaaattcagcaaagaatatgctataataaaacaacgaaacagaaaaactgtttaagctgtaactcacacagagtttatggaggaaaagttatgaagaaagcaaaattattaggaacattattatgtgccgcatgccttgttacaggaagcattgctccttccgtaccggttatggcagatggcatgaatgttgttacacttggagcagacctgacacaggatcagaagaacaccatgctgaaatattttaaggtcagtgctgattctgttcagatcatcaatgttactaatcaggatgagagagagcacttaagtgcctatgttcccatcgagcagattggtaccaggacagtcagctgtgcttacgttaagcctaccacttccggaggaatcaaggtacgtactgctaatctgaactgggttacctgtaatatgatcgccaccagcctttctacttccggggtgaagaattgtgaagtagttgctgcgtgtccgttccaggtatccggtacaggagcccttacggggatccagatggcctatgagtcagccagcggtgaacaactggattccactaagaagcagatcgctacagaggagatggttgttacaggtaatctggctgaggatatcggacagaacagtgccactgctgtgatcaatcaggcgaagacccagatcattgcagacggtatccaggatgcggatcagatttataacattgttgtgaatattgcagatcagaacggagttgctctctctgatgatcagcttcagacgatcgtaagcctgcttcaggagattgcacagcaggattatgattacagcgatatggaagagacactggagcgtgtcaatgataatgttaccggccagggagataccacttctgatgatgatccggacagtattgtgaataacgtagatgagagcgtgcttggtgatgatgtgatcgctgattccacagaggatccttcccttgctgagaagactggcgatgacggttttgcacaggataccaatactgatgcttccacagacggcaccacagacaatagtgctgacaccagtacagacaatagtacagatagcagcacagataacggtaccgatgtaaatggtgattccgtaaattcttcagatattcctgacggggatgagatcctgaatatttctgaagtgaatacagatttcctgacagacgataccaaagcactctttgagaaagccaagacttttggcaagggagagtatgaaggtgatacagaggcacttcaggaggctatgggatcagatgctgtatgcacagtgactcttgacagtgatcagggtgagaagctgtataatgccgttcttaccaaatatctggagatccttggtaatggtacaggatcttatgttcctaccggtaatgaagagtatctgactactgagcttaatatgcttcaggaagacctgaaggtgatcttcggtattgatctgacagatgaccagaaggcagaggctggtgataaggcagacatccttggcgataatgtttcttctgacgataagaacaccctgtataaagataccatgaagttctttgaacagctgtatggtgagactagcatggaagagacaactgagaatacagatgcagcagtaccggataatacagatacatcttacgatacagaagggacagacacatccatggataatacagatgatactactatggatgaatctgatatgactcctgctgaaggagacgatatggtttacgatgaaaccatcaatgaataactgtccccttaaaaatagttaaaattgaccattgccaaatccacagtttccaggtaatatgttgccagaccggaaggaactgattcaggttgatccagtcagtccctgtaagggaggcatataaaggaaaaggaaaggcagtgactaatatgaataacaaagagacatcaacaatcatgaaacttgcagagactgcgattcttgcagcactttgctacgtatccttcacatttttacagattaagatccctgttccgggtggcgatgctacatctcttcacatcggaaatgcattctgtgtacttgcagcattgcttcttggaggtgtttacggcggtatggccggtgctgtgggcatgactatcgcagatctgatagatccggtttatattacaggagctccgaaaacatttgttctgaagctatgtattggtttgatcactggactggtggcacataaggttgcaaagatcaatgagagtacagataagtcatacgtatttaaatggagtctgattgcttccgttgctggtctggcatttaatgttgtggcagatccggttgtaggatttttctacaagcagtatatactgggacagccacaggagatggctgccgttcttgccaagcttagtgcagtgaccacctttgtgaatgcagttgtttctgtgatcctggttgtgttcatatacaatgcacttcgtccggcactgatcaagatgaatctgatccagatccatccggtacagaaggataagacagtttctgcaaactaagtattttagtaactattcagtaggaaagaatttatgagggtactgagcagttatgctttgtttactgccacatcttacaggtgtggcagttttttcttatttatgcgaaatactggaaaaaagaaaaagagtgtgataaaatgtttcaataaatatgcgtttggtgtgaaaacaccacaagcatgattacagtaattatttagcagaaagtattttgcgagagtactgaacagttacgaattacacaaaggagaatatatatgggtcttgctgttgtcagtttgaaaaaaggagagggcaggctgttaaaatccggtgggatgtggatttttgacaatgaaattgctacgatcatgggaagttttgtgaatggcgatattgtactgattcatgattttgacggatatcctttagggaagggatttatcaataccaattccaggatcacagtccggctgctgtcaagggatgaacagacggtgatcgatgaagtgttttttgaaaaaagagtacgggatgcctgggaataccgtaagaaagtggtagatacccgcagctgcagagtgatctttggcgaggcagatttcttcccgggacttgtaattgataagttttctgacgtgctggtggttcagtccctggcactgggaattgacagatataaagaaatgatcatagagcttctgaaaaaggttctgaaagaagatggtatccagatccgtggcgtatacgagagaagtgatgccaaggttcgtcgccaggaggggatggaacttgtaaaaggctttattggaccggaattcccaactcttgtggaaattgaagaaaatcaggtaaaatatcaggttgatgtaaaggatggtcagaaaacaggatttttccttgatcagaaatataacaggcttgcaatccagaagctttgcaagaatgccaaagtgctggattgctttactcatacaggttcttttgcattaaatgcagggatcgcaggtgcttccagtgtattaggggtggatgcatcagctcttgccgtggatcaggcagctgcaaatgccaggttgaacggtctggaagatcgggtacagtttctatgcagggatgtgtttgagttactgcctgaattggaggaaaagaaagaaaagtttgatgtggtgatcctagatccacctgcgtttacaaagtccagaagttccataaagaatgcagtgaagggatacagagagatcaacctgcgtgcgttgaagctggtgagggaaggcggttttttggccacctgctcctgttcccattttatggattatgagcttttttcacagacgatcggtcaggcagcacgaagtgctcataagcggctgcgtcaggtagaatacaggacacaagccccggatcatccaattctgtgggcagcagatgagtcctattatcttaagttttacatttttcaggtatgcagtgacagatagacctttacaggctgggatcagggaaagagacagactgaataaggaaagaaggatttcatgaaagacaaattttacagattcatgcagggacgttacggagttgaccagtttgcaaagtttaccatgggtgtggcactggtttctattgtgctggcgatttttgtaaacacaggaagcagcgcaggttctcttttggatatgttaggccttgtagccattgtgtatacatatttcaggattttttccagaaatatttccaaaagagcacaggagaatcagaagtacctgtcagctactgccaagctgcgtcagagactgaacaaagaaaagaatatgatgaaacagagaaaggactaccatatttatacttgtccttcctgcggacagaaagtcaggattccaagaggaaaaggaaagatagagatcagctgtccaaagtgtcatagcaaatttgtgaagaggagctgatatgttcggatatattgtggtaaataagccggaattaaaaattaaagatttcgctttatacaaatccttttattgtgggctttgcagggaactgaaaagaaaatatggggttttcggacagctgtcccttacctatgatatgacctttgtggcacttctacttagcggattatatgagcctgagacaaagaaaggaaccacccattgtatcctgcatcctgttcacaaagagacagtacggaagaaccgttttacagaatacgcagcagatatgaacatcatccttacctattataagtgtgtggatgactggaaagacgatagggatcttttaaagcttgcatatgcaaaggccctgaagggtaagaaccgaaggctttctgtcgaatacgataaaaaggtgcacaggatcatccagctgctggaacagctatcggatcttgaaaagaaagatgagaaggatattgatcaggtatccggtatttttggaaagatcatggctgagatctttgtgtatcaggaagatgtgtgggcagatactcttcggaagatgggtttctattttggaaagtttatttatattctggatgcgtatgatgatgtggaagcagatctgaaaaatggaaattataatcctttttcaaagcgctttaaaataaaagggtttgaggatgaggtacaacagcttctgatcatgatgcttgcagaagcctgtcgtgaatttgaaaaactacctattataatgtatggagatattctgaggaatattctgtattccggggtatgggtaaggtttgaggcgattaccagaaaaaggagagaagaacaggagaaagaacatgtttgatccatatagtgttctgggagtatcacaggatgcctcagacgaggaaatcaaaaaggcatacagacgtttaagccggaaataccatccggatgcgaatattaataaccctgacaaagacaaggctgaagagaaatttaaggaagttcagcaggcttatgaccagatcatgaaagaacgggaatatggaagcagaggggctggcagttatggaggctttggaggtttcgggcagcaatccggcgggtacgaagacgaggagagcatccgcaggcgtgctgcggctaattttatccagagcggacattatcaggaagctgtgaatgtactgcgatccctttcccagagaaacggagaatggtattatctttcatctatggccaatatgggacttggtaataatgtaaatgccagaaacgatatagagcaggcgattcgtctggatcctggcaatgcccagtatcagatgctgaagaaccggatggatgggggcggtacctggtaccgacagcaacaggatccatttggaggcatgcctatggagggcggcgacatgtgcttgaagatgtgtttagccagtacagcttgtaatctgtgctgtccgggaagtggtgtgatctgctgttaaaggcaggattgcaggattttcggaacagacggttataatagagataaagaggagaaaaagtaatgagtgttagaattggtattttaggttatggaaatcttggccgtggagtagaatgtgccatcaaacataatccggacatggagcttgtggcagtattcacgcgccgtaatccgaaggatgtgactattctcacagaaacagctaaagtctattctgttaatgatgcagaaaaaatgaaggatcagatcgatgttttgatcatctgcggaggcagtgctacagatcttcctatacagacaccaaaatatgcacagtggtttaatgtgatcgacagctttgatacacataagaggatcccggagcattttgcggcagtggataaatccgcatcagaaaatggacatgttgggatcatttctgttggctgggatccgggtatgttttcgctgaaccgtatgtatgccaacgcaattcttcctggaggctgcgattatacattctggggcaaaggagtaagccaggggcactctgatgctatccgcaggatcgaaggtgtgaaggatgccagacagtataccatcccggtagaagctgcacttgaatcagtacgaaatggtgagaatcctcagctttccacaagggaaaaacataccagagagtgctttgtggtggctcaggaaggagcagatcttgcacgtattgaacgtgagatcaagaccatgccaaattattttgatgaatatgatacaaccgttcattttatttcagaagaagaattaaagaagaaccacagtggtattcctcacggcggttttgtgatccgtaccggaaagaccggatggaatgatgaaaacagccatgtgatcgaatatagactgaagctggactcaaatccggaatttacttcttccgtattggttgcttatgcacgggctgcgtatcggatgaatcaggaaggacagaaaggatgtaaaacagtttttgatgtggcaccagcctatctttctgctatgagcggagaagaactaaggaagcatcttctgtaaggcttttttgtgatattcattgctttggaaaatgttacaaaaattataatatgaaattgtcacaattgttaaaaaagagcaaagattattatcaatcttgctctttttttgctaagaaaaagaaaatgattattgtgaaaagtttacatacttgtacttttgtattgacgattaaaaaataccgttgtataatctattacataaagctgtaacatttttgtaaaagattaaaggcgatatcatgtttaaataagaaaaggaagattatgtatgcgaaacgtatgtaagaaatttaagatttggggagtgcttttgctgctgattctggctgcggcaggattttctgcccataagtcccaaacagaagttgaagctgctgttaaaaccggatttcggacgtatagcgggaagacatactacattgattcagatggaagcaagcacaagggctggctgaacctgaatggtaagaaatattattttaaccgtaagactggtgttcaggtcaagggctgggcacaggatcgcaagggacgtaaacgttattttacaaaaagaactggcgttatggtcactggctgggtgaaagtatccaagggaaaacgcagatattttaacccacgtactggctacatgcagaccaaatggctgactttgaataataataaatattactttttcgcaaagtcagggatcgcagctacaggatttttaagagactccaagagaaataccagatatttctacaagcctagcggtgctatggctgttggatgggtcagtgcgtcaacaggtactgtgagatatttccagtcttctgagaagtcctctttggatggaatcatggcagttggctttacccagatcaatggtgctacatattattttgcttccggtacaggtaagatggctaccgggtggaaagatattaaggtaggaaagaagactaataagtattattttgatccttcgtccggtgtgatgtatacaggaatacagacagtggacggggtacagcaggaatttggtgaagatggtatttatataggacaggctgtgaacgatcctaatgctacagcttccactggcacaaagaccatcaagaattatctggcaggtgctcttcagcctgtagggcaggctttgtatgtatggggcggcggttggaatgattctacccgtaagggtgtaagtcctaaatggaaacagtggtataataagtggttatccaatccatccggatatgattataacaattaccgtgacctgacagctgtcaacagagcaaagggtcttgactgttccggctttgtgggctggtctgcttatcaggttatgcagtcccagtctaatgtaggatcaggctatacagttgtatctggtgagatcggttcttattataagagcattggatggggtacgattgtgaatcagtcttatctgtcaaagaccgaatggaaaatgaagccgggtgacattggatataatagtggtcatacatggatcgttcttggacagtgcagtgataagagcttagtgatcatacattcgacgcctcaggcaggatgtcagattgcaggtactaccactcctactggtaattctaatagtgaggcagttgtacttgccaacaagtatatggccaaatattctggatttactaaatttaattaccatccatcctgcggcaattacatccgtaatggtaattaccttagatggaagagcagcgtactcagcgatccggatgggtatgggaatatgactgctgaccagattctgttgaatctgtttggatattaagattgaaccggaatgcagaagacattcttgaatacagccacgcaggcgcagggaagaccagcctgtgtggctttttttatatcagctgggagcacctttgataattgttgcactttaatttctatttgttacaaaaaaattaaatttattgaaattaggggttgcaatgatggtaacgatatgttaatatgtataagaattaaaaataatgttgcagaaatattacgtattaaaacaataaagttacgagggtgataatcatgaagaaaagaatcgtatgtctcacacttgcactaatgatgtgtggtacacaggtagtaagcgtaagcgcttccagagaagatgatctgagagaagaacaggcttggacaagccagcagctggatgctacatatgctcgcatgagtgcactctgggatcagaagcagcagctggagggcgagatcgcaacactggatgccaatcttgtagatgtgatggtcaatatacagactttagagacagatatttctaataaagagactgagatcgtgaaaacaaaacaggaccttggcaaagcacagaaagcaaaagaaaaacagtacgatgcaatgaaaaagcgtattcagtatctatacgaaaaaggcggaagtgatgcctggttccagatgatgatgaatgcagacaatcttgcagatcttcttacaagagcagagtatacacagaagatgtatgagcaggacagaaagagcctggaagtgtattctaatactattgagcaggtaaagcagctggaggaaaagtacactggtgagaaggctgaattagaaggcatgaagcaggagtacgaagctgagtcacagaatcttcaggcacagctggatgagaagagagctacttccgcagactgtgagaatgagatcgcatatgcacagcagcaggctactgagtacgcaaatcttcttgcagcacagcaggctgagatcgagcagctggaggcagagcgtatcgcagcagaagaagaggcaagacgccaggcagaagcagcagctgctgcacaggcatctaatgatggtgattatgattctgcccagtatgatgaagaaggaaatgcagtaagcagttctgaatcatcaggatctggagaaactcagtatgatgagtatggtaatgtgatagattctgagaatacagtagatccaagtgaatatcagagttcttctgagtcaagttcttcttccagctccagttcttcatcttctggctctggttcaggatcttctgttgtaaattatgctactcagtttgtaggtaatccatatgtatggggtggcaccagtcttactggtggtgcagactgctccggctttgtacagagtgtgtatgctaactttggcgttagcctgccaagaacttcctatgagcagcagaatgctggaacagaagtttcttatgcagatgcacagccaggagacctgatctgctatggtggtcacgtggcaatctacatgggcaatggacagatcgtacatgcttccaatgcgaaggatggtattaagatcagtaataatgcagcctacagaaccattacctctgtaagacgtcttgtataatagcaaatagtaagatatttagaacatatcccctgagactggagtgcttttatttgtgcattccggaactcagggatttttattacccaaattttagatggcagtttttggggagagcttttttggggggatagaaaaataaacattgacaaatatatagcaaaagggtattatgatatcagtataattccatattgaacatattaagtgctgatcatttctagaagatgacagaagagggaatcaggtgaaagtcctgagcgatccggtcactgtaacagggaagccaatctcaatatcccattgtgctgatgcatgagaaggggagaggaagcgatgatcctgaagtcaggaaacctgcttagtatggcgaggttaaacttccgtgtaaagtgtaacaaccaacttcggggaatccgcagccccttagtgttgtctgctctttaatggtagcagacattttttatggaatgcgcctgttcatgagaattataccgattaaatggcaggcgatactacttcggatgtccgttccctccgcgtatttatgaacggttcattttctaccccgaagtagcatcgctccctcttttttacaagaaaaacaggaggcggatggaatggccggtgaatattgggaaggcaaagaatattcctttttcagtcataaagaatgtgagttttttccgtgccacaaaggtgcagacccacaggattttaattgcctgttttgttattgtccattatatgccctgggagataagtgcggagggaattttaaatatacggaaaaaggcctgaaagattgtacagggtgtttactgcctcataagcgcagaaattatggttacgtaaccggtaagtatcaggaacttgcaaaactgatggatgagatcagaagcgtgaaagctaatgataaaaaggaataataaaggcaagagtaataaaaacaagaataatagtgacaagaataacaaagataagagtaataaagatataaataagaaaagctgttgtacggaaaatctctgaaaggagaatccatacagcagctttttttataggaaattattccgtaatgttccaataaagtaaaaaaatgtaatggaaatacccatctaatgctcctgttatataaaaacctatcttttcataaggaaggaaagcagtctgggaatctggctattaaggatcagatccggtggaaaattacagtcttttgcaaaagcttccccataagtaaaatcaccgatgtgagagatcccatgactgtcactggaaaggagcacaggaacctgatattggagacacagttctaaaatcctgcggcaattaggcctggtatcgccacggtatccataaggagcaagagatgcctcgttgatctccataagaacctggctatgtgcggcagaccggatcacggcttcataatcaagatcatattgagtattatcaatatggccgagaacctttacacagggatgctgcatcacatttaacagtgcaagtgtattgctctgtatgtctgcgggacgaaggttctggacatgcatactggcaatcgcataatcaaggcctgaaaggacatctgctggaaggtcgatccggccttgttcatccaggatattaacctctgcacctaaaagcagctgaatgccaaaacgcttcctgggggctgcggacaggctgcgaaaataagaaacagtacctgcgcctatagtagaaggaccatggtctgtgatccctaaaagagaaagtcctttgcatgaagctgcttttgccatttgggtaatggtacaggaggtgccatggccactggcaatagaatgagtgtgtatatctgataaaaacataattaaacaactcctttgctaccagtatgacacagcgtgaaaagctttgtcaatgaaaaaaacaggtgatttcctgaaaaaacaataaaaacaacataataaaacctttaaaaacaacataaaacaacagatataccttgacttattgtgtggaatgaggtagaatcacaatagaaacaaaatgttactgcgaaaaagggagcaggaaacgctatatatgcttaaggaggataaaaaagcatggtaaacgaatatgagatcaaaaaacagatttgtgaaatcggaaaacgtatctacaaccgtaacatggtagcagcaaacgatggtaacatttccgtaaaactgaatgacaatgaatttctctgcacacctactggtgtatccaaaggatttatgactccggagtatatctgtaaggtagatgctaagggagatgtgatccaggcaaatccgggattccgtccttcttctgagatcaagatgcacatgagagtatatcagaaaagaccggatgtaggatctgttgtacatgcacatcctgtatatgcaacatcttttgcaattgcaggtattcctcttacacagccgattatgccagaggcagttatcgcattaggatgtgttccgattgctgagtatggtactccatctaccaatgagattccggatagacttgagaaatatcttccatattatgatgcagttcttcttgagagccatggcgcacttacctggtcaacagaccttcttgctgcatacatgaagatggaatctgttgagttttatgcacagcttctgtaccagtccaagatgctgggcggaccaaaggaatttgataaagaaactgttcagaagctttatgagatcagaagaaaaatgggccttccgggcaaacatcctgcaaatctgtgcctgaacaaagatggcgtaaactgccataactgcggtggtggatgtggttcttctgaagcgaagaaagacgtagcaggagatgcagatctggtagcacagatcactaaacaggtaatgaaacagctgggaatgtaagaaaagttaggaggacaatctcatgccaatcagcgaaagcatggtacaggatattgtacaggaagtaatggcaaaaatgcagattgcagatgctccgtccggaaaatatggcgtttttaaagatatgaacgaagcgatcgaagctgcaaaaaaagcacagaagatcgttcgtgcaatgtcaatggaccagagagagaagattattacctgcatccgcaggaaaacaaaggaaaatgcagaaattcttgcacgaatgggtgtggatgaaaccggaatgggaaatgtaggagataagatcctgaaacatcatctggttgcagataaaacaccgggtacagaggatatcagcacaactgcatggtccggggacagagggctgacacttattgagatgggaccttttggtgtgatcggtgcgattactccttgtaccaacccaagtgaaacaattctctgcaatacaataggcatgctggcaggtggaaatacagttgtatttaaccctcatccggcagcaatcaaaacatcgatttatgcaatcaatcttttaaatgaggcctctctggaagcaggcgggcctgataatatagctgcaaccgtagaaaaaccaacactggatacaagtgagatcatgatgaagcacaaggacattccgttgatcgcagccactggaggtcctggtgttgtaacagcagttctttcttccggtaaaagagggatcggtgcaggtgccggcaatcctccagcactggtggatgagaccgcagatgtgcgcaaggctgcacaggatattgtgaatggctgtacatttgataacaatcttccctgcattgcagagaaggagattgttgcagtttcttctatcgtagatgaactgatgcattaccttgtgacagagaatgactgttatcttgcttctaaagaagaacaggataaacttacagaggttgtacttgcaggcggcaagctgaatcgtaaatgtgtgggacgtgatgccagaacattactttccatgattggcgtaaatgtacctgcaaacatccggtgtatcgtatttgaaggaccaaaggagcatcctctgatcaccacagagcttatgatgccgattcttggtgtagtaagagcaaaggattttgatgatgcagtagaacaggctgtatggcttgaacatggcaatcgtcactctgctcacattcattctaaaaatattgataacattaccaagtatgcgaaagcaatcgacacagcaattcttgtaaagaatgcaccgtcttatgctgctcttggctttggcggagaaggctattgtacctttaccattgccagccgtacaggcgagggtcttacaagtgcaagcacctttacaaagagaagacgttgtgtaatggcagacagcctttgcattcgctgacaggaggatggtagataatggatatgaataatgtaaatattgaagaaatagtaaaacaggtacttgcaggaatgtcaggaaatgcttctgctccttccaaagcagcacctgcaccttcaacaggcagcattccgaaaacagcaagggttgctatgttgacagcacttgagcattacgatattaaggagttcccgattcctcctgttggagatgatgacatccttgtaaaggtagaaggatgtggtatttgtggtacagatgctcatgagtttaaaagagatccgttcagcctgatcccggttgcactaggacatgaaggaactggtgagatcgttgccatgggtaagaatgtaaagacagatacagccggaaaacctgttaagatcggtgataaggttgttacctgtatgatttttaaagatgatcctgacattacaatgtatgatctgaataagaagaatgtaggcggcgcagatgtttatggactgcttcctgacgatgatattcatctgaatggatggttttctgattatatctatatcagaggcggcagcttcggatctacgttctttaatgtaagcgatctggatttggattcccgtattctgatcgagccaagtgcagttttggtgcacgcagtagaaagagcgaagacaacaggcatccttcggtttaacagcagagttgttgtacagggatgcggccctatcggtctgatctgtatcgcagtacttcgcaccatgggtattgaaaatatctgtgcagtagatggagaacagaaacgtcttgattttgccaagagaatgggcgcaagcatgactgtaaactttaaagaccacaagggtattgaggcacttgcaggtgcagtaaaagatgcattcggtggacatcttgctgattttgctttccagtgtacaggatccccggtagcacattccaatatttataagtttatccgcaacggcggtggcttatgcgagctgggattcttcattaatggaggagatgctaccattaatcctcattttgatatttgctccaaagagatcacaacagttggttcctgggtatatacactgagagattatgcaactacatttgatttcctgaagagggcaaaaggcatcggtattccaatgtcagatctgatcacagacagatttccactggaagagatcaacgaagcgcataagaccaatcttgcaatgacaggtctgaagattgcgatcattaataaataaccggcgggataaaggagagaagagatggcagaagctgtaggaattttagaggtattcggattgacaacggctttcgtggcagccgatgccggttgtaaggcagcaaatgtccatctggaggtttttgataagaacaaacctgccaatgcggacagcctgccagtaccgcttcttgtctgcattaaatatcggggcagcgtatcggatgtgacagcagctgtagaagcaggtatgaaagttgcaaagagcatgaccggtgtggttcagcattatgtgattccaaatccggataccggtacagaaaaaatgttaaagattagtgccctggataggcaatagacattgcagaaataaaaaagatactatacaatacaagacagaagcaacagacgataacaatacagtttacttagataattcaggaggattaaaaaatggcacaggaagctttaggaatggttgagaccagaggacttacagcagcaatcgaagcagcagatgcaatgaccaaagcagcagaggtatctctgatcggaacagagaagattggatccggactggtaacagttatggttcgtggagatgtaggagctgttaaggctgcagtagagagcggaagcgcagcagcatcccgtcttggagaactggttgctacacatgtgattccaagaccgcacaatgatgtagaaaagatccttcctaccatctgaaaagaatcaggtaattaaggagttcgctcatgaataaatcatatggctttatcgaaatcacaggtgttgtggcggctatggatgccctggacattatgtgtaaaaccgcagatgttcagctggcgtcatgggaacgcaagctgggcggacgactggtgacgatcatcgtagaaggcgatgtggcggctgtaacagaggcggtagagactgcggcagcaaaggctatcaagaaaccggtcagttatgcagtgatcgcccgcccccatgaagagattgtcaagatagtggaattaagcgcgagccgatggaaaaaatctgaagtacagggggatgaataatggctgacgagaaaaatacagcgaaaaatgaagccccgaaaaaggctgccgctcccaggagaagaacggcgaaaacaacaatcaaaaaagaacctgtagaaagattacagacagatcataaggaggaaaaaagaatgacacaggaagcattaggaatggttgaaaccagaggacttacagcatcaattgaggcagctgaccagatgtgcaaagcagcaaatgttgcacttgttggaacagagaagatcggatccggacttgtaacagttatggttcgtggcgatgtaggagctgttaaatctgctgttgaggcaggaagcgcagcagcatccagacttggtgaactggttgctacacacgtgatcccaagaccacataacgatgtagaaaagatccttccggttttaaaataatccacaggatagaatacaatcggaaagaaagcgggtgcaatcttggaaaccaataacattgagctgatcacgaaaatggtgatcaatgcaatcaataaaaaagaagaaaaaggcaatggttttatggtgcctatcggagtttctgcaagacacatccacctgacacaggaacatgtagaggcactgtttggttcaggatatcagcttacaaagaaaaaagagctgatgggcggacagtttgcttctaatgaaacagtgacaattgttggattgaagcttcgtgcgattgagaatgtacgtattcttggacctgtgcggaaagcatctcaggtagaggtttctgccacagatgctattaagcttggcatgaaggtgcctgtaagagagtccggtgatgtgaagggcagtgcccctattgctattgttggacctaaaggtgccatctatctgaaagagggatgtattgtggcaatgcgtcatatacatatgtctccaaagaatgctcaggcagcaggagtcagggacggtgacattgtttctgtgaaggcagacaatgaacgtggaacgattttcaatcatgttaagatccgtgtggatgacagctttacattagagatgcacatcgatacagatgaggcgaatgcggcacagatcgctactggtaataccgtaacgattatcaagtaagatctggtaaagaacgcaataatagtttttctcctgcagggactgttccacaggaatccaacaggatacttggacagttcctgcaggtggatttagaacactggaggttcatatgattataggcaaagtagttggcagcgtggtttctacacggaaaagtgaaaaactggtaggcaataaatttatgatcgttgagcctgtccatcatatgaaaggtgacctcagtcagatcgttgccattgatattatcggtgcagggatcggagaatatgtattggtggcacagggaagcgcagcaagaatcggctgcggcgtagaaacagcaccggtggatgcagctattgtaggtattgtagacgatggtgcgggattggagtaacgccatggaaattaaagagttacagaaaattattcaagagaatggtgtagttggtgccggcggtgccggatttcctacatacatgaaactgaccgataaagcggatacgattctcatgaactgtgcagagtgcgagccattactgaaattacacagacagttattagagaagcacgcatatgagatcatgaagaccttccatatggttgcagagactgtgggagcgtcagaagcgattatcgggatcaaaaggtcctatacacagacggtaaatgctttgaagcagcatattgaagaatttccgggaatgaggattcatcttctggacgaagtttatcctatgggagacgaggtagtgctgatttatgaagctaccggcagagtcgtaagacctggcggacttcctattgagcagggtgtggccgtttttaatgtagagactttgtataacgtatacagggctgtagagtcaggaaaacctgtaacagacaaatatgtatctgttgttgcagaggtaaataaaccagtaactgtaagagttcctcttggctgtacactggaagaggtagtggagcaggcaggcggtattacagtaaaggatccggtatattttgttggcggaccgatgatgggacgtattgggcagccttctgatccggtgacaaagacgacaaatgcgatcctgatcctgcctaaggatcatctgatcgtgcagaagaagcagaggacttcttctatagatttgaaaagagcagcatcaatttgctgccagtgtaatacctgtacggatctgtgcccgagaaataatctgggacatccgattgatccggcacgctttatgagagcagcatctaatcatgattttcaggatctgaatccatacataaatgcaagtttctgcagttcctgcggtgtttgtgaaatgtatgcatgtccacagagtctggcaccaaggactttgctggcagacatgaaaggcgggttacgtaatgccgggatcagacctccgcagggggttcagccggtgccggtaaaagaatccagagagtatcgtaaggtgcctgaagaaagattgatggcaaggcttggacttaccagatatgataagaatgcaccactggatgaaactctcgtacctgtaccaaaagttcggatccttttaagccagcatatcggagcccctgcccaggcaattgtaaaggcaggagatcaggttgagaggggtcagatgatcggagcacctgcaaatggtttaagtgtagggatccatgcatcgatcacaggtaaagtaacagaagtaacagaccgttatattgtaattgcaaagatgtagaaaggacggacagaacatgagcaaagcaatcgggatgattgaatttaaaaccacatccacaggtgtaaccgctgcagatgctatggtaaaaacatcggaagtggagatcgtggaggcacagaccgtatgtccgggcaaatatattgcaattataaccggagatctgagcgcagtaaaagctgctgttgagacagcagtaactacttatgaggataaatgtattgacagttttgtccttggcaatcctcatgaatctattttcccggctatttacggtaccacacaggtggaagaaatcagtgccctgggaatacttgaaacttatgacgcagcctccattattgaagctgctgaccaggctgctaagacagctatcgtagatctgatcgaacttcgtattgctaaaggtatgtgcggaaagtcctatatgatgatcacaggagaggtttctgctgtggaagcatctatccagagagcaaaggaacttgttgcggaaaagggaatgtaccttgattcctccgttattgcacatccggacaggagaatgatcgacagtatcttgtaatttacaacaaaaaaaagaaaaaggaggcagattaatgctcgcattagagagacggaacttgattttaacaaaactgcaggaagaaaagcgggttgtagtcagcgaactcagccagctttataacgtctctgaggaaaccatacgccgtgatctggataagcttgaaaaagaagggcttgccattaaaagctacggtggtgcggtaatcaatgagaatgtaagtattgatctgccttttaacatccgtaagaatcagaatgtgatcggcaaacagagaatggcagagattgtagcctccctgatccatgagggagaaacaatctccatggatgccagtactacagatgtattcattgcaaaagcattgaaaagtaaagagaaactcactcttttaactaattccatggaaatcctcctggaattgactgatgtgtcaggctggaacatcctgtctactggtgggacgatgaaagaaggatatctggcatttcttggttcaaagaccgatgaagctttcaggtcttattatgtggatactgctattttttcctgcaaagcactggatcgaaatagagggatcatggaatcccaggaagcattcggctgtgccaagcgtgcaatgatcgcttcgggaagaaagaagattcttgtgctggataatggcaaatttgaccagtcagctttttgcatagcaggttcttttaaagatgtggatattgtggtgacagatgtaagaccagctgatgagtggatgcagctttttgatgaatgggatataaagtgcctgtacccatcctgcgaatcagaagaataaggagcatgtggttatgaaaacatttgaaatgaaaacagtgatccattttggtgataattcactggagcggctgaaggtgattccttataaaagagtgctgatcattacagatccttttattgcaaatggggatatgatcgatctgatcacagcaccactgaaaagcggagggatacagtatgatctttttacagatgtagtaccggatgcaccaatagggaagattgctgaaggagtgaaaaagtttctggagtatcagccggaagcagtgattgctgtgggcggcggatctgccattgattcctccaaagccatccgtgaattcgctttaaagatcaataattatggaaaggtaggcctgattgccattcctaccacaagtgggactggctcagaggtgacttcctttgcggttgtaaatgatacagatgcccaggtaaaatacccgcttgtatctgacagccttacggcagatgaggccatcctggatgcagaactggttcgcagtgtacctgcttctgtaacagcagatacaggaatggatgtatttacccatgcactggagtcttatgtaagcacggatcacaatgaattttcagcagcattggctgagaaggcaattgagatatgtggtgtattcttacttcgtgcttatctggatggcaatgatatgcatgcacgccagaagatgcatgtagcttcctgccttgcagggctttcctttaacacggcaggactggggattacccacagtatggcacatcagctaggtgctatgttccatattccccatggaagggcgaatgcaatgcttcttccccatattgtggagttcaatgcaaatatcaataaacacagcaagagccagaaggaataccttccggctgtgaagcggtattctaatattgcacacgtccttggactaagcaattataataaagtgatgagtgtacgttctcttgtgaactggatccagtttatgcaaaaagagatgaacataccgttgactattcaggaaatgaaaacgatcacaccggatgtttattttgcagcaatcgaccggatggcagaggcagctttggccgatgcatgtacagctactaatccaagagttcctaccaaagaagacatcgtaaagatctatacaaaactctggtctttttaaatgagcaagcagcaggacagttcaataactgtcctgtaaatatatacagttttggacctaattaattagccaggcgggtcacgtatatccgcttaactaatgaacatatacgtttctgttatgcggaatgcagggacgtatcacttaaaaagtctttttatcagaaaaggtagatactatgaaaagatcaaaaagaatagaagctttagacaagcgggcagtaaatctggatggttttattgatgagtggccggagatgggatttgtggcaatgcacagtccttacgatcccaaaccatcggtaaaggtagagaatggaatgattacagaactggacggaaagaaaagaggagattttgattttctggatcagttcattgcagattatgcaattcgggtggatcgggcagaagcgtccatggcggtgccttctcttgagatcgcacggaagatcgtagatatttccgtatccagaaaagaaatcctttcgatcgtatcagggatcacacctgcaaaaatggcagaagtgatcaatcatctgaatgtggtggaaatgatgatgggcatgcagaaaatgcgtgcaagaaaggtgccaggcaatcaggcacatattacaaatctgaaggacgatccggtacagattgcagcagatgctgctgaaggtgcacttcgtggattcagggaagaagaaaccaccatgggtgtggcaagatatgcgccttttaatgccatagcacttctgattggctcacaggctggcaagaaaggagttctgactcagtgctctgcagaagaggctacagagctggagctggggattcgagggttcactacctatgcagagacactgtctgtatatggaactgagaaagtctttattgatggggatgatactccttattcaaaggcatttcttaattcggcttatgcctccagaggccttaaagtcagatttacttcaggtgcaggctccgaagtattgatggggagcagtgaacagaaatccatgctttatctggaatgcagatgcctttatgtaaccaaaggcgctggttcccagggaatccagaatgggtctgtaagctgtattggtgttgcggccggcgttccggctggtatccgtgaggttatgggagaaaatcttgtggcagcacttttgggactggaatgtgcatcttccaatgaccaaagcttttctaactcagacatgagaaggacagcaagaactatgcttcagtttatgcctggaacagattttattttttcaggttacgcagctgagccaaattacgataatatgtttgcaggctccaattttgatgcagaggattttgatgattacaatgtaatgcaaagagatatgcaggtggatggcgggctcaggcctgttactgaggatgaagtgatccgtgtacgccgcactgcaggaaaggcagttcaggcagtatttaaatacctggggcttactgagattaccgatgaacaggtggaagcagttacctatgcacatggaagtaaagatacattgaacagagattctgcagcagatattatggcagcggatgatctgatgaagcgtgggatcacagggattgatgtggtgaaagcattggcagaaagcggatttgaggaactggcacaaagtatcctgaacatgctgaagcaaagagtgattggtgattatatgcacacagctgctatcctggatgaacattttcaggtaatgtccggggttaatacacctaatgattatatgggaccgggaaccggttatcgtgtaactggagagcgttgggaagaaatcaaagccattcctcataggatcaatgtagacgaattttaggaggctgtgttatgaaaatagatgaacaactgatacgtgctgttactgcagcagtagtggaacagttgcagaaaaacgggcagctccacttggatacagtaagagatacaacaaacaacaaagaaggctataaacttgccggaagaacacggatgaagccaaagcattcttataaggacgctgtaaaagcagaacagggcactgatccaaaagagatcgtaatcggtgtgggagctgcttttcagacagagattcgctctacgatctgtgggattcctttagatcaggttttgcagaatgtacaggctgggattgaggaagaaggcatggtttccagagttgtaaaggttctggacacttcagacgttggatttatggcacttcaggctgccaagctttccggttcagggattggtatagggatccagtcaaaaggtaccactgtgatccatcaaaaggatctatatcccttatctaatctggaactatttccgcaggcaccgctgatgtcattggatacttacaggaagattggcagaaatgctgccaaatatgcaaaaggggagaaagtaacacctattgaatgtaccaatgaccctatggtgcgtgccaaatatcaggtaaaggcagctctgatgcatattgtggagacagaacagctggatccggaaaaagggatgatcagttgggagggagtatgatgagtaattatcctcttggacaaaatgaagcagataccataacttctaagacagggaaaaagttgaatgagatcactctggaagaagttaaaaaaggaaatgtaacagctgaagacattaagatttcatctgaaatgctgaaacgtcagggaaaagtagcccaagaagcagataatcctcagatgactgcaaattttgagagagcgtcagaattggtgaatgttccggatgatgtgattttagatatgtacaacaagctgcgacctaatcgttcttcgaaaaaggaactggtgctgatggcacaggagcttctggaaaaataccaggcacctcattgtgcaaagcttgtactggaagcagcagaaatatatgaaaaaaggggaattcttctttgaaactgattgctggtgttgatataggaaattccacaactgaagtatgtattggggcgatagaagacaatggcagattccgctttctttccagtgcttccaggatgaccacgggtaccaagggaacattgcctaatgttcacgggatcaaggcagctcttacagaagcaatggagcggatccatgagcctgtggagcggcttgcccttattcgtttgaatgaggctgcacctgtgatcggggatactgcaatggaaaccattacagagacgatcatcacagagtcttccatgattggacataatccttctacaccagcaggtgcaggagaggcggtcggccgtctgatatttcttgagaatttatggaagggcgaggcaggagcagcctatatagtagctgtgtctaacagattttcatatgaagaagcagccgccaggctgaaccagtttctgccggaactggatatccgaggactgatccttcaggcagatgaggctgtacttgtggaaaatagattgaaccgcaagatgcccattgtggatgaagtgaaacatatcaccaggattccagaaggaaagctggctgctattgaggttgccttgccaggtacatctgtcaggatgctttccaacccttatgggatcgcaacccttctcgggctggatgcacaggaaacaaaagccattactcctattgccaaaagtcttgtgggaaaaagaagtgcagtagtgatccgcacacctcatggaaatatgagagagaatattctgccggcaggggagatccatttaaaaggggagaaagatctgcaggtgaatattgatgcaggtgcagatgtgatcatggaagcagttgcccaggcaggggagatccaggatattacaggacaggataataccaatgtgggaaatatgttgaaacggatcaagaatggtatggctgaggtagctggcagcaaaggagatgagatacggatcacagacatcctggctgtggacaccctggcgcctgtagagatcagcggatctctggctggagaaacctgtatggagaaggcggttggcattgcagctatggtaaagacccagcatctgcctatgcagcagatcgcagacagattagaggaagaactccacgtaaaggcatcagttgccggggtggaggcagtgatggcttcccttggtgcaatgactacacctggtaccaggcttccgctggcaattctggatatgggaggaggatctacagatgcagctgtccttgaaccggatggttctgtaaggactacccatcaggcaggtgccggtgaactggtttccatgctgatacagacagaacttggtcttggcagccgggttacagcagaacagatcaagaagtatcctatgggaaaagtggaaagtctgtttcatatgcgtttggaaaatggagctatgcagttcttcccggaatccatagatccaagatattttggtcatgtggttttgcttgcaccaggcgagatgctgaagattgaagaagacattcctatggaacgtatcctagaggtgcggcaggatgccaagaaaaaggtatttgtgagaaatgcgattcgtgcacttaggacaatagcaccggggaatgaccttaaaaatatacccaatgtggttttagttggcggttcagcagaggattttgagataccagagatgctgatggcggctctttcggaatataggatcgtatgcggacgaggaaatatcagagggacagaaggtccaagaaatgcagtagcaacagggcttttgatgtcctatcttggggagaaacaccaagggtaaagtaagaacaggaaggagaagaggcaatggttgtgaacaggccggagatcatcttgtatacctgcaggccggatgaggattatctgaaggaagtctgtgccgggatcgaagaagaaggcgtattatatcgtatatacagccgtcagggagatctggatacactggcttttgaagcagcagctgtctctatgctaggctgtgggatcgggatcacaggtagcaagcttgccatgcagatgcagcatcttcctaaagggaaaaatgtttttgaattgaattgtcccagattctggcagtgtcgtaatttgggagccaatagcgcaagggctgtaaagaaaatgccctttaaatctgtaataaccggaaaaatggaggaatcactgttatgaatatttatacgaaaggcggagacaaagggacaacaagtcttgtacatacaaaaaatgtgtcaaagtcagatgacaggattcagctggttggcaccattgatgagctgaccagtcacattggtctggtaaaatccatgttaacggatccggacatgatacagaatctggaaaagatccagtctacactgatcactttaatggctgggatcgccgatccttataaacgggattatcggatcagtgatgaggaaaccagttttctggaagcagaaattgatcggctggaaggtttgtttgacagaccaaagaagtttattcttccaggcggcagccgtctgtcagcagagacggatgtggcacgtactgtggccaggcggggagaacgggcgttggctgctgtcagtgtgaaattcggggcagacaatggtgcaaaaaaatatatgaatcgtctggcagattatctttatgtactggctaggtatatagatgccagagaaatgggacattcaaaagatagtgcatcaggaaaagaagaatttgcagataagaaaaatctgcagaacagaggaagtattatgggacagaaggaaatgccagtcagtgaggctgtgatacaggaagttttgaaaagaatgggaatacagggaaagatcactttggacagtgccaaaaggctgatcgaagccatagagcaggaggcacagcgaagaggaaagaaggctgtgatcgccgtctgcggtccggatgggaatcctattgcagttcatgtgatggatggcgcattcctggtaagctttgatgtagctatcaaaaaggcatatacttctgtagctgttaaaatgacaacaatggaactctcagcacttgcccagccaggagggactttctatggactggataaaatggacaatggaaagattgtgatctttggcggtggtgtacccctgaaagtaggggatactattatcggaggattgggtgttagcggcggcaccggagaggaagaccattctctggcagagtatggactgagcattctggatcaggtactatgataaagctgtgatggtgcagttttgggcagccatctttagaactgtgcatcaagcctcacgtgcgttcgacttgaaattttagaaaagacattttattttatgaaggaaacagatctgcgtttttttcatgtaagatgtctttttttgatggaaataaaaatagggtggatataaacatcctgcaaactttcggtgaaatatatctttatgttggaaaaaaagacaggatcagaagggaaaacaggtgcaacctgtcaaaatatggaaaatgagagggttttcttttggttgtattctggcagatgctttgatagaatggaggaaacgaaagagggaaataagtaaaaaacatgtctgctgtcagttctgaacagcgaaaatctcccatctttttatttttttgtctaaaaaccggaagtcaggctgataaacagtgaagacttccggttttgtctataattttttgtattttcctggcgtggtacctttgtatttacggaaggtacggataaaatagcttaaatcattaaagcctgtccgataggcaatctcagtaatggagtcatctgtggtggaaagctggtagcaggcctcctcaatccgctgccggttcaggtagtccatcggggtctgatgggtcatttcggaaaaaaatctgcagaaatattttggggacatggaaacagaggcagaaagctgctgcaaggttagaggactggcataattctgttcaataaattcgaccacctgcttcagctgctgaagtctcttatagtcacgtcttgttttggaaatccggtcaagatataattgtttaccgaaaacaagtccgaaaaaatgataaaattgtccaataactgtcatttcatatcctatgcttttttccaggatagcctgaaagatatcgttcacagtatctacaatatccgggtattttcctgtaaaatgatgatataccattaattcctgatgggcaatcttctggatgtattccccacacagggtgttttgcttgataaatgtattaatgtcaaaaacaatacactcatatacacagtcattgtctggtatgccactgtgaagaataccactgttcacaaaaataacatcacctgcttgtgcagtaaagcttttttcgtctaaagtgacagtaaggcttccgcgcaggattcgcatgatctcgtattccacatgccaatgataagacatttcatagcgtgggtggctgctgtcaatgtgatgaaattcaaaaggaaactgatatgtccctcttggccggtcttcattctgatccaatccgtgcaaaaaatacatctcctttcattaaaatagaaaaagtgaatattatgctattatttgctattataacacaagtaataatgtgcacacaacggtataatgaaaatcagagaaggttgtacatatgtatctgtcaggggatagactaagacagatacacattctaaattttattatgggaggtatttaatattatggcaaagagcagactgatcggtgaatatccagtaatcggtatccgtcctacgattgacggcagacgaggcactctggacgtaagaggttctctggaagaacagaccatgggtatggcaaaggctgctgcaaaattatttgaagagaatctgaaatattccaatggcgagccggtaaaggttgtaatcgcagattctaccatcggacgagttggtgaatcagcagcatgtgctgataaattcagaagagagggcgtagacattacccttactgttactccatgctggtgctacggttctgagacaatggatatggatccacagactattaaggcagtctggggctttaatgcaacagaaagaccgggagctgtatatctggcatctgttcttgctacacatgcacagaaaggacttcctgcatttggtatttacggacatgaggttctggatgcagatgacatggagatgcctgaagatgttaaagaaaaaatgcttagattcggacgtgcagcagttgcagttgcttctatgagaggtaaatcctggctgcagatcggttctatctgtatgggtatcggcggttccattattgactctgatttcatcgagtcctaccttggaatgcgtgtagagtctgtggatgaggtagagatcatccgtcgtatgacagaaggcatttatgatcacgaagagtttgagaaggctctgaaatgggcaaaagaaacatgtaccatcggatttgataagaacccaccggaactgcagatgacagaagaacagaaagaagagcagtttgaatttgttgttaagatggcagttatcgttcaggagctgatgaacggatgtgataagctggatccgaaattctctgaagaagcgattggccataatgcacttggtgctggattccagggacagagacagtggacagacttctaccccaatggagactttgcagaggcagtccttaatacatcttttgactggaatggagcaagagagccatacatccttgctacagagaatgatgttctgaatggtcttggaatgatgtttatgaaacttttgacaggacgtgcacagatgtttgcggatgtacgtactttctggagcccaagcgcgatcaagcgtgtgacaggttatgatgcagaaggcctggttaaagaaaatggcggtctgatccacctgatcaattccggtgcatgctgtctggatgcaagcggagaggcaaaagatgagaacggcacaccagtcatgaaagagtggtggaatgttactgaggaagatcagaaagcaatcatggctgctactacatggaatgcagctgataacggatatttccgtggcggcggattctcctccagatttgttacaaaggcaaccatgcctgcaacaatgatccgcctgaaccttgtaaagggtcttggaccggttcttcagattgcagagggatggactgtagagcttcctgaggatgtatctgatactctttggaaacgtacagattatacatggccatgtacttggttcgtaccaagatgcgatggcaaagagggcgcattcaaatctgcatacgacgttatgaacaactggggtgctaaccatggcgcaatttcctatggacatattggtgcagacctgatcactatgtgctccatgcttcgtattcctgtatgtatgcacaatgtatctgaagatcagatcttccgtccggcagcatggaatgctttcggtatggataaagaaggcgctgattaccgtgcatgcaagaattacggaccattatacaaataatgggatgagtgtgggagtacagataagaagtaatttgcaggtatcgtagactgcatcctgtatcctgactttataaatagtagtattcacctgcctgaccgtctgtatggatggtcaggcgttttttctgcaaaaaatgacaaaaaaaagattgaaactttccatggacatgatagaataaaaaataataggcaattttccaatcgatgtatcttatgaggaaaatgaacagttgcattagcagaaagaaagggaatggaagaaccatatgaagaatattctaaaaggatttttgggagctgtgtttactgttctgtttaccattacagtatgggcagatgcaggtaatacacagagtatagattatcccacagattattatatgatcgtggaaagtaaagaaggcggtattgatatatatgctgagccggatctttctagccagaagctgaatgatcagctgattcctaatgggacagcccttcatatagaaggtgaaaagcaaacagaagataagcgtatatggggttataccaaatatcatggcatgtatggatttgttcctacagatgatctgaagccggttacccgttcacaggctgtacagtctgagtattatttgtatggtggtaaggatgcagattatgaccttacggttgcagcaaaagatggcagcgttgctttgtaccatggtcctggagagaaatatgacacagtgtccggcgcagaccagatacccaatggacaggtgctgcatattacaacagaggtagatacaggcgaggatggcctgtggggaaagacggactatgaaggattggaaggttgggtaaatattcatcaggccaaaggcgaagactccaagggagaggacgcagatgggatagagattattgagactgtaaatccaactgagaaagctacaccaacaaaggagccggaggcagcctctgtaaagaagtcgaaagctgcacctgcaaagaaggcacaggctacaccgactcagaagccggaagtcacaccaacaaaggaaccagaggctacaccaactaagaagccggaagcaacaccgacagagaagccagaggctacaccgactcagaagccggaagcaacacctactaagaagccagaggctacaccaactaagaagccggaagctacaccaacaaaggaaccagaggctacacctactaagaggcctgaagctacgccaacaaaggaaccagagacagtaacacctacagaggaagcagtaacacctaccgaagaggcggtgacacctacagaggaggcagttacaccaacggataaaacttctgctgagaaggatgcgatggcaaaggaagcttcttcccaggaaacaaaggctgaaaaagggattggtaatttggctttatggatacttttggcagctgtagtgataggattgatcatagtagtggttcttatgaaaaagaacaagaagaattaaatcagaacacaaaaagaacggccatatatctttctgatgaaacaggaggatatatggccgttttttatgtactataaaataactttgtaatgaaagattatttgttgattacaacgcctttctgaagcattacgttggcatatacagccttttcacttgttgcaataatgcaataagcagttttggcttcttcataaaatgcaaaccgttcaatattgcccacagcagaagcaccacgggaatcatgcttggtaacaatttctttataagtatcccagataggtgtagccacctgatctcctggcatgacttccatcagattaaccggatgatctacataagtatccagtggaatcatagtaaggatggcatccagaatctccggtacaccatggccatcgcaccgtacgaccactgcatttttacccatagattctacaggaaaattgccgtctgcaattacaagacggtcactgtgacccatttcacataatacctttaataattcaggtgataaaatttcaggaactcccaataacattgtttgctctcccttctgtcctttttttaatagagtacatggagacaggagagattgcaaggcaatattttactgaaaaagatgaaatagttacggaaagtaactgtgaacagctctacggaaaagcggcaaaaaacacaagcagccgtaacattagaaatatccacagcttatttaaagaaactggctgaactcaactttttctttattggggccttcaatggtaaaaaacttcactccattgtcccagaaaggcaggaagtggatctggtcacttaaggtgttaaggtcatgtctgcataccaggttgtatacagcttcaatatctgtaacattaatggcaatatgctctatagcaccgtaagacatagacgtagaatcacactcataggcttcaattacaagatcaccaagttttaaaaagtttacagacttaccggtatcctccattgttgtggaaaaggcaatttcaaatccaagctctgagtagaataaaagggtttctgccatgtcggttgtaggaatgccgatgtgctgaataccggtagcataatctttgatttgcatgttataaatctcctttcgcatttcaattttgtcatatgttacatgccccacatcagatagccaaaatgacgagatattcttagaagagatgtgaggtgatatcttatatatgttttatggatttggtgctggagctgcggccgtatacaacattttgaccggaacggctgtaagcacgtaccctgtaacgataagtgctgccttttacagcttttgtatctgtataggtaagactgcggcttactcccgcctttttccagccttcattttcatagcggtagatcacatagcctgtagcaccgctgcatcgtttccagctgaggcggatcccctgggaaatagacttggggattctcagtgttactctggacagaggagtggcagccgtgatgccggaggtaagataggagccaagcacctgtcggttgcctgtgtttgtaaaagctcttactgtatacgtgtttatttttccgggagcaaccgggaaggagcgtgagcttatatggataaaggaagtggtgttggcatctgtggaacccaataatttccagcgttttccttttttaatgtaaatacggtatccatctgcatcggctacctttttccaggaaatcagattcctgtttgcagaaagagaagatactttttttaaggctggtgcaattgctttagggattcctttctttccctttgaatcatatcggctggttcctgttttggaaacagcacgtactgtgtaggtataagtggttccaggcgttaaataacggtgattgtaaccatttcgtttgatgcctttttgaaggactttccatgatttggcattgccctctttgtaatagagagtataagaagcggcaccaggaatcttgtcccacatgatccgaagggaacgggaactggtagccttcacagtatggatcttcggggtacgcagacgcgaatccactgtaacggtcaaagcagtggtgacctgggagtcccccttcagggttatggtgatcctggcttttccggcacgcttcggggtcaggatcccgctggaggatactctgcacacagaggggctggcgcttgcgaaagtaagggcagatggagagatctgtacatgggaaaagccattgtcaataaaaaactcaacttcttttctttcgctaaggccaagcttcatattgccggttgcataaaatttaaacgggataccggatgaagaaataaagggtatttctgcagaaacagtactgctggtataagcgttcatatcagcgggagtggtaacctgctttccgtaaaggagtacccaatagcttacacctccggcagtgatggctccaacacctgcagccgtgtaatcggcattaaaaatacctgcctgatcatctccgttcatccacactgccaatgcttcagaagcggttccctgtcctgcagaaatgctttcgtaagaagcatccaggcaggctgtaagtccggaaacaccaataggccgtgtatgggaataaagcaccgaaagctcaccggcacgcttcatggctgcatccaacagagctgtgtccatggtaagcggggaaaggcctttggctgaacgctgttgatttacaagggcaaccagctgggacgcactttcataatcataagtaatattaatgggaatcctgctggctgttttcagaagctcatctgcagggttcacccgggtatctggacgaatagatacagaggctgtatcaggaaaagcatggtcgcctactgttacagaggcatggggcagaatcacggaggtgatgcctgtattataaaatgcatatctaccaatagaaatcaggccctccggaagcgtaatctgattaagagaagggcaacccataaatgcctgataccggatctccttcagagaagaaggaaataccacttctttcagggaagcagattgtccgaagcatccgttagggatcaaggtaacaccttccgggatctggatccgttccagggagttgcaatagctgaaactgttgttgccaaattcgcggatccctgtaccgaatattatgctggaaagactgccgcaatattggaagcactgggtaggaatctgggtcaatccgttgccgatggtaacatctgccagctgtccgcagctggaaaaagcactggttcccatttccgttacggtatcagggatcctgatggaggtcaggcggcttttataaaagctggcaagtccaagcctggatacctggttcagatccacagtctgcagattggctgcataaaaagcatacacgccaatggtctttaccgaatcaggtacctggtagctttgcgctgagcgggcaggtgggtaaagacataaagtggtcatgtcttttgtgaaaacaacaccgtccacgctcaggtaagaaggattctccggggaaacaagcagctcctggagccattcgcagccaaaaagcattttgtcagaaagcgtggtcagagaagccggaagagtcagggaagtgatctgggttgcctgaaaagcaaaattaccaatccttgaaactgaatctggcaaagaaacagaagtcagggaggtacattctgcaaaggcaccatcactgatcccttccaatgtatccggaagggatacagaagttactttagaaaatccgtaaaaagcagcggatccaatctgggtgatccctgaagtgatctggatttgtgtagcctggtcacgatagcagtcccaggaaggacgtacattctggctgaagtctcctgtactgcctgtaccggaaagagtcaggatccctgtatctatgtcaaaagcagcctggatactggtacttgctgtcacatcctcattcttaagagatgggtccccatccgaaaaaagtgaaacatcgtctgcatctgcaccgaaaacatctgttcccacggaagattcatgggctatatctatcggtgtatccaggtccgtggagtctgcagaagccacatcctggaagtctgcattttctgattcgtcagaagcatctgtattgtctaaagattcatctgttacatcctgaaacatgttatcggaaatgctattagaaaaattattggaagcttcttcaaaaagactggcatcatctgtataagcttcttctgtaccccagaccggacctgcaggagtgcagaccatggcagcagccagaaggatggcaatgttttttcttttcaaactaatttcctcccttgaaaatgatatttgactattcagattataccacccacagctgaaaataggaatgctttttgtgcaaaattcaggagttccgttgtaataaaggggcgaatatgatactatattagaaaagaattggagagggagatcgtaaaaagtaccggcgggcagaagattggggaatgtataaggtgcttttacaaacaggaaaaataatgtatcgtattttattagtagatgatgagatcttggtaagagatgctatccgggagaatattgattggggagccatggactgccagctggtgggggattgcgagaatggcaggcaggctatggaatttgtaacagagcatccggtggatattgttcttacagatatttgtatgccctatatggatggcatggaattaagtaagtttcttcatgaaaaatatccggatatttttattgtgatttttagcgggtttggagaatttgaatatgcccaaaaggctatccagtatggtgtgagtgaatatcttcttaagcctgttactgctatggaactgcgggaagtgatcggcagagtaaaagaggagattgatgagaagcgtggggccagggagcagatggattcgttgcttcgtacctctgaggattatcgggacaacgcactgatgatccggtccggagctatcgaggggcttgtgtcctgcaccagggatattcaggaaagcctttatcagctggaaaggctggggattcatctggatgcccagtcctacagggtagcgatccttgacctggatgcctattcccagctcttccagattgaagcagaccagagacaggaaagccagctgatgacctttgtgcttttcaatatcagtgatgagatcgtaagccgcgagaatgcaggcattgcataccaggaaggcagcagccgggtctgtgttctttttactggtgaaaagaataaagaatttgaaagccggatccaggcagtatgtaaagaaatccaggagaaagccggagaggccatcggcatgggagtatccgttggcatcggtggctgggtgagaagtctgacagaattgcatttttcccatgagcaggcacagaaagggattgagtgcagatatcttcttggaggtaatcttcttattaatatggaagatgaaaaagaacaggaaagcggactttccattcaggtgtttctggaggatctggcagaaggcatgaaaacaggagaatggaacctggtacaaagcaatctggatcagattgtacaacttattcagaaggcaagggtggggaaaacccgggcatgcggctatttgcagcagatcatacgtaccattggcctttgtcttggatctgttaccggggatcataaaaaagaattaaagcaaagagagtcactgcaggcaaaaataccagaacagcgcaccttccaggaagcggtgacactggtagaagaatatgcaaaaaagtcctttgaggaacttcagatgatgaatagctccagcggacacagacaggcggccctggctatggactacataaagacccgttatatgcagccggatctgaatctgaatcagatatgttcttatctgaatatcagtaccagctatttttccactatttttaaagaattgacaggtgagacatttatcgaagtactgggacggctgcggattgaaaaggcaatggagcttctggagagtacgaccttgaaaaattatgagattgcagaaaaggtaggatttgcagatccccattatttcgggatctgttttaagaaaatgactgggaaaacgcctaccgaatatgcccgggagaaacgcagatgagagagaataagaaaaacagggacgtgctccggcattttaaaagtgtaaggagtgcactttttgctgctatatctgtaatggtgctgtgcgctgtagttattgtggtagcaatttccctgcgctttaccagaacctctgtatttgataatgctgtggtttataccaggacgattgtgcgccagaccaaccagaatatcgattcctatattgattacatggacaatattgcaactatggtgtcaggcagccgggacacacagacatttctgtataataaggatgaagaaacacttcaggtttcggaatgcagacagcgtctggtagagcagtttcgcacgattctgaaaagccgcagcgatattcgtaacattggattgatccaaaaagatgggaaccggctttttaataatggaggtcagcagaagaatgcttatctggatcttgacacacaggcatggtataaaaatgctataaccagtaaccgttccgtacttacttcgtctcatgtgcagcatgtgataaggggagaacgcccctgggtgatcacagtaagtcgtggagtgcgtaatttcacaggaagcggcaacagagaaggggttgtatttattgacctgaattacagtgccatcagcgaattgtgtgaccagaacagtattggttccaagggatacgttttccttcttgaccaggatggaaatgttgtttatcatccccaacagcagcagctttataatgaacttcagaccgaaaatatcgatcttgtcatgaatacagacaaggaaacgctgatggatggaagtggggacaatgccaggatctatacgatttcccggtctgagaaaaccggctggacagtagttggctgtaccaatgtagcagagcttttgaaagacagcaaaaaggccagaagcatttatgtgttggtagcggcaatcctggtggttgtagcattagtcctttccaattttattgcaaggaatattacacggccgcttcagcagcttcgagattctatggcaagggtacaggaaggagatttcggggcagcggaagtagaagtgacatctcggaatgaggtgggcagcctgaccagatccttcaatgtaatgaccagcaggattcaggaattgatgaagcagaatatttatgagcagcaacagaaaagaaaaagtgaactgaaggcattgcagtcccagatcaacccgcattttctgtacaataccctggactctatcatctggatggcagaagggaagaaaaatgaagaagtagtggttatgactgcttcgttggcaaggcttctcagacagagcatcagcaatgaagaggaacaggtgcctattggccaggaagtggaatatgcaagaagctacctgacgatccagaaaatgcgttataaggataagctggagtttcagattcaggttgatgcccagattatgagagtgcccatcattaagctggtgcttcagccgttgattgagaatgcgatctaccatggattgaaatataaagaaggcaaaggccttctcattgtgagaggatacagggaaggggaaaatgcggtgctccagatcaaggacaacggagcaggcatggatgaacagacgctgtctcatatttttgaaaaacacaaagtgaattatcggtcaaatggagtgggagtctataatgtacagaaaagacttcagttgtattacggaatggattacggcattacatacagcagtaagcaaggagaaggaaccactgcttctattgtaattcctatgaatgtgattcctatgaaacaggaggcagatcatgaaaaaatataaaaaatggatcgctatgggtgtgatcggcttcctgatatttcttggcttttttacaggctatatcctgcagaagcagaagagcagcacaccattgtctttgatctatattcccaaaaccgaagacggaaccagtgatttctggtcttctcttatttccggagccaggatggctgccagtgaatatggagttcagctggaagtgatggcaccgaaaaatgaacaggatgttaaaggccaggtcagtcttcttaaaaaagcaatcgaacaaaatccggatgggatccttttttctacatccagtaacagcgcagccaataaagatctgaaaaaagcaaaagaaaaaggcatttgcattacctatattgattcctgtaccacagaggaattgcaggatctgactgtagccacagacaatgtggaagcagggcgcaggcttggggaatatgcaaggacgatcgtaggcaaggatgataagatagcagtgatcagtcatgtgaaaggggtttccacagctgtggaacgtgagcagggattccgcgaaggcctgggagattatgagaagaatattgtggaagtggtgtactgcaattctctttttgacagatcttacaatctggcaaaggaactgatggaaaagtatccggatctgaagatgatcgcaggcatgaatgagtattcttctgtaggtgcagccagggcggtgaaggaggcggaagcaaaggaccggatcgccacagttggcattgacagttcccaggaagcagtgcagctgatggaacagggcgtatttaaagcatttgttgtacagaaagcttttaagatgggatatcttggagtaaaagaaacgattcttcacctggaagggaaaaaggaggaaaagaacattgattccggctgtgaattgatcactccggaaaacatgtacaacagtgagatggaaaagctgttatttccatttaatacaaaaaagaatacataaatatcaaaaaagggagcggagtgatccgttctctttttgctttttgggaaaaaggtaaaaaaattccttaccgtaaatttttaacctttttcaagaatatattccattaaaatccagatggccacaggatataataatcacagttgaagggaaatgaaatgaggaggaacggaaatggaaaatttcaaaaacagcccatttgtaaaaaaggttggatttaacaggattgtattatgtggtgtgcttcttgttatgtacattgcatttgcgatcatcagccctacgtttttaagctattcccgaatcctgagtgcattgaactatgcttactttctaggattcctggcattgggagttacctttgtgattgctaccggcggtattgatttctcaatcggtccggtaatgttctgtgcagcactgatcgcaggaagacttctgacaaaagacggcatacctacaggagcagctcttctggtatgtgttctggtaggccttgtgtttggtatctggaatggattcctggtagcctacatgggacttccgtcatttatctcttccatggcttccatgatgctggcaaagggaatcggttctgtatttacacagacacagaccatcagctggccacagtcaagtgatgcatccggctggtacagaagcctggtaaggatgaagatcggaaatacagatgttcccactggtcttctgatcctgcttgtgatcgcagtgatctgcgcaatcatcctgaataatacaaaagcaggaagatatatcctgtgcctgggcagcaacaaagaagcagtccgcttatccggtgttaatgttaagaaatgggaaatgctggcatatgtgatctgcggaacattggcaggagttgcagcaatcgcctatgttggttcctatacaacagttcagccgggacttggtgatacattcaacaatgatgctatcgcaagctgtgttatgggaggaacttccatggcaggtggcgtggcctctatcggaggaagtattattggtgttctgatcgtatcacttcttcaggaaggtatccttgcaatgggcttccagaaagattatcagtatgtaattaccggtatcatcgttcttctggctgtgtatgcagatgttcggagtaagaagagaaagaactgatgtgtgactacaataaagtagagagaaaggatagagatatgggtgaagtcattttaacaatgaagggtatagataagtctttccccggtgttcatgcactggaccatgttgacctggagatcagaaaaggtgaagttcatgctctgatgggagagaacggagccggtaaatccactctgatgaaagttctgacaggtatttattccaaggattcaggttcgattacatatgaaggaaaagaagtagagtttacaagcccaagggatgcacaggatgcaggtattgtgatcgtgcaccaggagctgaacatgctgaatcatcttacagtggctcagaacatttttatcggccgtgagatcatgaatggcaagctgatcaatgatgcgaagatgaatgaggaagcagcaaagcttttcagacagctgaacattgatattgatccaaaggaaaaaatgggaaatcttactgttggtaagcagcagatgtgtgagatcgccaaagcgatttctcatgaggcaaaggttatcatttttgatgagccttctgcagctcttacagaagcagagatcgaagaactgttcaagatcatccgtgatctgagagataagcagctgggaatcgtttatatttcccatcgtatggatgagatcaaggtgatcacagaccgtgtaacagttatgcgtgatggaagttacgtaggaacactgatcacaaaggattgcacaaaagatgatatcatcaatatgatggttggccgtgtgatctatgaagatccgaagacagaaagcaatgtggcaccagatgcaccggttgttctgaaagtagaacacctgaatgcagggaagatggtacaggatgtaagctttgaacttcacaaaggagagattcttggtttttccggtctgatgggcgcagggcgtacagagactgcaagagcactttttggagcagatcctaaagaaagcggtgatatttacgtaaatggtaaaaaagtagatatcaagagccctatggatgctgtaaaatgtggaatcggttatttgtcagaggacagaaagcgttacggaattgttgtagccaaaagtgtggcagagaattctaccatggcaagcatggagaatttcatgaatggaatcttcattaacaagaaaaaagaaaatgagattgcaaagaaatatgtaaatgacctgaagacaaaaacaccaggcgtagatcagctggtagtaaatctttccggtggaaaccagcagaaagtagttattgctaaatggctggtaagaaactgtgacatcctgatctttgatgagcctaccagaggtattgatgtaggtgctaaaagtgagatctatcacctgatgaatgagctggtggcagaaggaaagtcgatcattatgatttcctctgaaatgacagagattctgagaatgagtgaccgtatcgtggtaatgtgtgaaggcaagaagaccggtgagattgatatctcagaggcaacacaggaaaatatcatgcatgcggctaccagaagagaataagaggaggaaggaaaaatggcagatagagaaaaaaaggggaatgcttttaccaataaccctattgtaaaagctattggaacccagaaaatcgtggttgtgctggtaattattttcctggcgatcatgttttccgtgggaagtccggctttcagacagtattctacattagttagtatttttgattattcatattacatcagcttcatggcaattggtgttaccttctgcctgatcacaggtggtgtagacctttccataggaacaggaatgatctgttacgcattgtttggcggtcatctgatcacaaaggtaggaatgcctgtagtggttggtatgctggcagccattgcactgggagttttgatcggtctgttaaacgcattactggttgcagtgatggatctgcctccctttatcgcaacacttggcactatgatgatcaccagaggtcttggttctcttcttacaggagccatgagtgttacctggcctccggctgcagctgaaaacggctggttccgcagcattttcaagctgaaaatgaacggaaagatgatcccggtaggatttattctggtactgatctgtgtgattctgatgtccatcttcctgaataaaacaagagcaggacgttatattatcgctattggaagcaacaaagaagcaacaagattatcaggtgtaaatgtagtaaaatatcagtctttggcttatctgatctccggctttttcgcaggacttgcaggtatcgcctatgcggctacattccaggcgattccgccaggaaccggagcaggactggagctggatgctatcgccggagcgatcattggtggaacatccatgaatggtggagtagggacagttacaggaactctgttaggtgttttcgtaatgtcactgctgaaaacaggttttccgtacatcggactgcaggcaaactggcagcagatctttacaggtctggtactggtcctggcaatcttcatagatgtactgaaaaataaaaagactgcataaggggtatgcagaaactacaaactatataattcaaatcaaggaggatttaaaaatggcaggaaagaaattaatgagcgttgcattatgtgctgcaatggttggaactatggttggtgcagttacagttcatgctgagtctgattatgcaggactgaagatcgagatcgtatccaaaggcttccagcatcagtattggcaggcagttttaaagggcgctgaggaaaaagcagaagaattaggatgctccatcaactttgtaggaccaaactccgagtctgatattgctgagcaggttcaggagctgaactccgcaatcaaccagaaaccagatgctatcggacttgctgctcttgatacaagcgcatgcctggatgcaatcggacaggctcaggatgcaggtatcccgatcatcggttttgactctggtgttccggatgctccagaaggcgcagtagttgcaaacgcttctacagacaactatgcagcaggtgctcttgcagcagagaaaacatatgaagtattaaaggacagaatcgcaaacgctgatggcaaagtaagaatcggtgttatgggccaggatgctacttccgagtctattgtaaacagaggtcttggatttatcgacaagatgggcgagctgatcatcgcagacggcaaaacagtttctcttgaaggaaatgacagatacgttggagattccaaggttgaagctacagacgacggtgatgttgtaatcgagatccttgttccttcacaggtaacatctgagctgtccgcaatcgactgccagacactgttaaataaagatgatacaatctgcgtatatggctccaaccagcactctgcagaggctatgatcacaggtaatgagaaccttcagaaacttggctctggtgatgatcaggttgttggtgttggatttgactccggcgcaaacatcaaagcagcagttgctgacggcacattcatcggcgctattacacaggctcctgtagctatgggtgcatctgtagttgaacttgcttgcaaagcagcaaaaggtgagactgtagaagacgttgacagtggatgccagtggtacacagctgagaacatgaacgacgaagaaatcgcacagaacctgtacgactaaagcgaatgcagactcgaaatatgaagctttcggctatttgcagacggaaagattcatatgagaggctatatgagcgcagcgaacatggaaagaccgaaggtcttgagatggcatttgcgataatgtactaacgaaacttatcaggaaaaccggaggctaccctccggttttctttttagaaactatgcacagtttgcaaataagaaccttttttatggcaaaccaggttcttatgcattactgatttatgtagtaatatggtatcatcaatatgaaggtattcctacatagattcagataaaatacgaggaatcatacaaatattgaggaggttttaaaaatgacaaagtattatctggcagtagatattggagcatccagcggaagactgatcctgggacatttggaaaatggaaagatggtgctggaagaagtgcaccgttttgaaaatgggatggtaaaaaaggacggagagctttgctgggaatttgacaggcttttcgtaaaaatcaaggacggactgaaaaaatgtaaagagctgggcaagatcccggtaagcatgggagtagatacatggggagttgattatgtccttctggatgaagctggacaggttcttggcaataccgttggctacagagatcatcgcacagagggtatggatgaagaggtatataagatcattccacaggagaagctgtatgagcgtacaggtatccagaaagagatctttaataccatataccagctgatggctgtaaagaaaaaacatccagaatatttggaaaaggcagacactctgcttcatgtaccggattattttcattaccttctcacaggaaagaaaacctgcgagtacactgaagcaaccacaggacagcttgtaagtccgtttacaaaggactgggattatgaactgatcgatatgctgggatatccaagaaaaatgttccagaagctgatcatgccaggcacacctatcggacatcttacaaaagaagtacaggaagaggtaggatttgacctggaagttgtagctccggcgactcatgatacaggctctgctgttctggcagtaccggcaaatgatgatgactttatttatatcagctccggtacctggtctttgatgggactggaaagaaaagaagcagactgttcactgaaaagctgcggtatgaacctgacaaatgaaggaggatacggaggaagattccgttatctgaaaaatattatgggactttggatgatccagtctgtacgccatgaattccaggataaatacggatttggagagatctgccagatggcagaagaggcgaaagatttcccgtcccgggtggatgcaaatgcacagtgcttcctttctccggagaacatgacgaaagaaatccaggattactgcagacggacaggtcagcaggttccggaaaccttaggccagatcgcaactgtgatctatacaagtcttgcagaatgctatgcacgtacagcaaagagcctggaagaaatgacaggcagaacctacagcaggatccacattgtaggtggtggcgcaaatgcaggatatttaaatgaactgacagcaaaagcaacaggaaaagaagttcatgcaggtcctacagaagctacagctattggaaatatcacagcacagatgctggaggctggagagtttggatctgtagaggaagcaagaactgcgatccaccagtcttttgatatcaaaatatataaatgatgtaatcaaaatccattgggaagagattatttaaaggaggaatcaacaatgaccacaaaggaaagatacgaatctgcaaaagccagatatgccaaggttggagtagacacagacaaagccatccagattctgaaaaatgtgcctatttctcttcattgctggcagggggatgatgtaaaaggatttgatcaggacggtccattaacaggtggtatccagacaacaggaaattatcctggaaaagcaatgacaccggaagaactgatggcagatatggaaaaggttatgtcactggctcctggcaagaaaaaaatcaatatacatgcatcctatgcgatttttgaagaaggccagtgggtagacagagatcagctggagccaaagcacttcaaaaaatgggtggattttgcaaaagccaaaggtgtgggcattgatttcaatccaacatttttctcaagcccgaaagtgaaagatggacttaccttaagcagtccggatgaagaaaccagaaaattctggatccgccacggcaaagcatgtatccgtatttctcagtattttgctgaagaaacaggcatcccatgtgttatgaacatatggacaggtgacggatataaggatattcctggagaccgtcttggaccaagaatgcgttataaagaatctatcgaggaaatcctttccgagccatacgatttcaatctggtaaaaccctgtgtagagtctaaagtatttggtatcggtgtggaatcctatacagcaggaagtgcagagtttacactgtcctttgcagcagaacataaggataaatgcctgccgctgatggataacggacactatcatcctacggaagtggtatctgataagatctcgtcattgctttgcttcttccctgagatcgcattgcatgtaacaagacctgtacgctgggattctgaccatgttgtactgtttgatgatgaaacaagagagatcgcaaaagagatcgtccgtaatgatgcacttgaccgtgtatatattgcactggattactttgatgcaagcatcaaccgtatttccgcatggaccacaggacttcgcaatatgtccaagtctttgctgtttgcccttcttcagcctaatgcacagctaaaagaacttcaggataccaataacctgacaaagcttatgactgtacaggaagaaatgaaaactttcccatttggagatgtatgggattatttctgcgaaagctgtggtgtgccggttggattggactggtttactgaagttgagaagtatgaaaaggaagtgctttccagtagaaattaattaagcttctgattttgttttacatatattcacatggaaatagcctggccaaagggtcaggctatttctgtgcgtttttctgcacgaatagaggaagctgcggtgtaatgttcctgttacgtttcttatgtggaggcttttctggcaggaatacggatctgtacctctgttccctttccaggttcactggaatagaaaagtccatagcctggcccataaaggatctgaagtctgcggtgggtattgtagattgcaatatttgtgcccttgcctgaagaggagcctgtcccagtcaggatagtatccagcttttcattggacattcctacaccgtcatctgaaataagcagtaccagatcctgatcctccagccatccggtcagcacaatggtgccggatttggaagtcgtttccaaaataccgtggaggatggcattttccactacaggctgcagagttagctttggaatctggtcattcatcaattcatccggaatgtctgatatgaactgaatactgtcatgataacgcatgttctgcagatgaatgtatatggatacatgctcctcttcctgtgcaatggtgctgatgctttttttctgacttagggtcagcttatagaatctggaaaggttctgtacagcgtttgtcacttcttctgtacgtccctgctgagccatccaattgatcatatccatggtattgtaaagaaaatgaggattgatctgtgcctgcagggaattaaattctgcgattctcagatcttcagcggcttctgcctgatcttccatcaactgtttcatttttcgtgtcatataattgtaggtgtcgatcagatcacctatctcatcatgatatatcgggctgtccatagctaccggaggtccctggcggaccttgcgcatttgcccgatcacagaagagatacgtcctgtaatagaacgggaaagccggccggacaggaccagggcaaagatcagaaacagaaagtagaaaaatgcaaactgcatgatcattttattactctgagcgatcagaggtttggaaggaaggatcgttaccataaaccagcctggctggtggatcctgtaaaagcaggaataaatcttgttgccaaggatttttttttcgatgaaattattggaagacataaaagattgggaaatatcctcatatcccagccagtaaataccggacagagattcatcagaagaagcaaccaggctgtttctttcattgacgatataggaaacacttccctttaatccaaggttttcatttagtacttttatcaggtgactgctggaatagtatacagctacataggcattgataggactaccgtgataataaatgctggcagtatggatgtaagccatatctccacagttggatttttcctgcgttcctaaataaaaaggaggacaaaaaagctctgaggtattagtgctttggaaaattccatgccagtaagtaccgcgaatctcgcttaccgggtaaaagatcttttctttggggcaggaaaataaagcggaattatttggaagatccacataaatacggatattggtaaccagggaattatctgtaagtcccatcacagactgacaaaaagcatctccgcttttggaggctgccagcatggaaaaaggggcatttaccggttgatgaaacagggtctgataaaagggctcttcagacagggcatcataagtatctgtaacctgtaaaagtatatggtcaatctggggcgaggttttggctgaaatatcctgctcccggcgtatcgtataggaaacagtcatttcatatagctttccgtagaaaaatacgccaagaagaatcaatggaactgttacagccagtacaagtgcaatggtaaatttggactgaagcttcatatctccgtagcaatgcttcagcttattaaacaattttttcatgttctttatcaggaaatcctttctcgatattcagaaggagaaaaaccggtatacttcttaaagcttttaccaaaataattcccgtcattatatcctaccttggaggagatatctgaaattcggaatctgggatccgcaagcagctgctttgccttttccattcgatattcggtcagatattggttcaaggttttgccggtttcatttttaaaaaaggtacatacataagaagctgacaaaaacacatgagaactgatatccttcactgaaagggattcatttccgtaattcttgctgatatattccttgatgagaaaaatggtctgattttcctgtacagaatcctgaagctcacggaaaaaatctgtgatccgtacaagcagcttgttatgcagatcctggaatgaaaagctgttttcaagagtgtctactgcattttccctgtcagagggaagggagatctgaagctgcctgtaaatctcatcaagacagcggaacagcttgtaataaagatcctttgcgtgattgggaagtacctgtgtattttgatcgtaaaaatcgtatatttgtccaagaaaggcgttgcagccgtcctggtttttaagggcaagaagatcttgaaattctttctccggaaattccggaagagggggatgagagcgcagatccctgtctttcagaagagaggagcttaaaaaagatccgcttgggaaaaagaagctgctctgctgaaggatcactgccgactcataggactggtaggctttggaaacacctgtaaaggaaccgcctgccgtgatataaaatttgtgataagcctgatactggcagctgatataatcccggatcagatccagagttgcttcctgtggcatggaagagccaaaaataaaataaacaagatattgtgctttcttttctgcataaatacattgaagatgaaaattagacagataatcgcagatattttgataaatatcgtcaatagcaggcgcagagaaatcctgctctgtatcgattttggcgatcagggcggtaaaacaagtatcagatcccatataaagggaaagctcctggcttagttcgctgatcactttttcgctgaagcggtaaggagtagccaatgccagagcaagccgtgaggctgtttccatggaatgaagcgtttccccgcgatgggtacgtagcttctggcgatagacttcagaagcttcctgtacagcttcacggatctctgttggatttaaaggcttttcaatgtagtttacggcttttaatttaatggcagctttcaggtactccttgtctgagtagccactcataaaaatgggaactgtgtccggaaggaactgttccagcttttcaagcatggtgataccatccatacggggcatccgtacatcacagagaatgatctcaggcttatggatcctggcagcttccagtccgttgatcccgtcgtctgcctggagcacttcgtctatgtctaatgatttccagtccatggaggaaataacgccagtccgtgtaagctcctcgtcgtctacaattagtaatttcatataagaagaacctctttctttctatgatttcttagtgattctgttaaaaagattatatcataacacagggaaaatctgtggatttttctttaactgaataatattttaccctgtttccaaatattttccggtttagcctctaaaagacacatgatacaatgaatacagatcaaagagggaggtaatcatacagtgtcggaatatgttcttgagttaaaaggcattaccaagatattccccggggtgaaagcactgaacaatgtacagttccagctaaagcccggagaagttcatgcgctgatgggtgagaatggtgccggtaaatccacatttatcaaggttattaccggagtacataaagcagaagaaggagagatgttcctgaatggtcagaaggtggatttcaaaggaccgaaggatgcacaggcagccgggattgctgctgtatatcagcatcctacatcttatcctcatctgacagttgcagagaatattttcatgggacatgagattattgtccataagatgatccagtggaaaaaaatgaatgaggaagccaacaagctgctgggacagctgaatgcagattttgatgctaccgctgaaatgggaactttaagtgttgcacagcagcagatggttgagattgccaaggcgctttctaccaatgccaagatcgtgatcctggatgagcctactgcagcacttactaaaagagaatcagaggagctgtatcggatcgtagatcatctgagagaagaaggagtttccattatctttatctcgcatcgttttgaggatatgtaccgtctggcatccagagttaccgtttttagagattctcagtatattggcacatacaatgtagacgagatcacaaatgcagatctgatcaaagctatggttggccgtgagatcaaggatctgtttccaaagccagaagtacagcttggtgaagaaatgcttcgggtggaaggcttgtcaagggttggttactttaaaaatgtttcctttgacgtacatgcaggggaaatcataggtcttacagggctggttggcgcaggccgtaccgaagtagtagaaagcatctgcggaattactactcctgatgaaggaaaagtatatctggaaggccaggagatccatatcaaacagccatctgatgcaatgaaaaaaggcatcatcctccttccggaagacagacagaaggaaggcctgatcatgagctggggactgggtcggaatgtgacacttcctaccatcagccagtatgcaaaaaaaggatttaataatgagccgaaagagcgggagctggcaaaacagcttcttgaggaagtagatacaaaggctgtggacattttccagcctgcaagctctctttccggtggtaatcagcagaaggtagttgttgccaaagcactgagccaggaaatgaaagtggttatcatggacgagcctaccaaaggtgtagatgtaggtgcaaaggcagagatttatgcgatcatgggagatctggcaaagaaaggctatgctattgtactgatctcttcagaaatgccggagatcctgggaatgtctgaccgtatcgttgtgatgtgcaatggccggaagacaggtgaattaaataaagatgaggcaactcaggaaagaatccttgagcttgcaatggaaaaaggacagacatcaaaggaggcgggaagatcatgaaacagaaatcaactctaaagaaaataaccggctccagggagtttctccttgcagtgattctgattttgctttttgcaatcgttacagccatcagcccttctttcctgaaacccaagtcactgatggacatgttgaaaaacaatgcagttacaatggtcatggcacttggaatgctgtgcgttatgctggtgggaggaattgatatttccatcatgtcaacattggcactttccggaatgtccattggtatgcttctgaaatacggtcatattaccagcaccattcttgcttttgtgatcgcacttgccattggacttgcctgcggattcctggtaggtctggtgatatccagagccagtgtaccgccgatcattgcaaccatgggatttatgtatgtgttccgtgccctgggatatctggtatctaataatggtgagtgggccggggcagcagcgcttggaagttttaagaattttgcaacatccagtgtgcttgggatcaatgcagttgtgtgggtgatcatcctctgttatgtagttttcttcttctttatgaagtggacaaggacaggaagaaagatttacgcagtaggaagcaattccagtgcggcagaggtttcaggtattaatgttaagaatatcaaactgatggtttatatgatcatgggcgtgcttgctggtcttggaggagcacttcaggtatctgtatacgcttccgcaatgccggatatgcagcaaggcggtgaaatggatgttatcgcagcctgtgtaatcggcggtgtaagcatgagcggtggaagaggtactgttcttggcgctcttttaggatccttgatcctggccaccattgcgaaagcacttccgctggttggcatcggtgctttgtggcagaataccatcaaaggtgtactgatccttgtggtagtaatggtgaacgtgatcctgcagcgtattgctgacagaaatgcattaaaaggaagggagatgtgatcatggccggaaaatctggaagaagtataaacaatgtgccggaaaatccggtgaagcacatgatattcagctgggaagggattatggtcctgctgtttgtcctggtcaacattttctgtgcatggtattcagaattttacaacttaaagagtgtgctcaggcagatgccggtttatctggcagagatctttctcatgttgccaatggcttacatacttgttcttggcgaaattgatatatctgttggatcgattgtatgtctttccgcaacgatcagttgtctggtatccaatataggacttccgtttatcctggtgatcctgatttctcttcttgtaggaacagcctgcggtgcagtgaacggatttatccttaccagattccaggagcttccgccaatgatcgtaacattggctacccagatcattttcagaggtattgcagagatcgtgcttggagagggaggatccgtttccctggttaattccgagggcttcaaggcaatcggtggtaaagtaggaaggattccatacattcttttcctggttctgattcttgccatcgtagcagcgctggttcttggcaagagcacctttggacggagagtatatgctatcggcaccaatcgccttacagcttattattccggtatccatgttcagaagatccgtatgctgatctacacactgatgggaactttttgcggactgtgtgcactgtttatggtatcctcttcttatggagccaataccacaacaggaaacggttttgagatggatgccattgcaatggcagtatttggaggcatttcttccacaggtggtaaaggaaatcttgcaggcggtattatttcagcattcatcatcgtgtgtcttcgtgtaggacttggacagcagaatcttcacccacaggttatccttctgatcctgggactgctgctgatctgcgcagtagcacttcccaacgtggtgggagagatcaaaaaggctttaaaggttaagaaaaacgcctgatctatattgttaaaatggttgttggctgcaaatggggtaacagcagctgcacatataatgtaaactaaaaattctatttccaagggaggaaaaaaacatgaacaaaaaaatcgttagcgtattactttgcggagcaatggtactggcaacagcaacacctgcattagctggagaggctgatggacagaagatcgcactggttggaaaatctgcaggtaatgcattcttcgagatcgcagcagcatcctttaaagaaactgttgaggcagaaggcggcgaagttgaggtggtttatccggaagctgctacagcagacgcacagatcaaagttcttgacaacctgatttcccaggattttgatgcaatctgcatttccgcaaacgacgtaaacgctcttcaggcaaaactggaagaggcaatggacgaaggaatcaaggtttcatcctttgactctgctcctaacgcagacagccgtcaggtattcgtaaatcaggctggtacagtagctgttggacaggctcttcttgatgcagttcttgatattgctggtggtgaaggccagtgggcaatcctttccgctacttctcaggcagcaaaccagaatgcatggatcgatgcaatgaagacaattatggaaagtgatgagaaatacagcaaactggatctggtagaggttgcatatggtgatgacgagccacagaaatccacagaccagacaacagctcttcttgagaaatatccagatctgaaagtaatctgcgctcctacaactgttggtatcgcagcagctgctaaatatcttcaggatgagaaatctacctgcaagctgacaggtcttggacttccatctgagatggttgagtacacaggtgctgatgatgagcattcctgcccatacttctatctgtgggatatgcagggccttggaaaactcagcgcttatgcaacaatctctcttgtaaaaggtgatatcacaggtgctcttgatgaaacattcacagctggagatcttggcgagtacacaatcacagaagctgatgacggtggtacagagatcgttcttggacagcctctggagttcaactctgacaacatcgaagaaatggctaaactgtactaatctatagaaatcggttgctatccataagaaagaatgataatatttaacagcaggctgctgcaaggaatatctcaaaaagatattttgcagcagcctgctgttttataagtgcgcctggtagtgcatatttctgaaaaatgatttcgtaaacaacaataaggagaaaacatgcagaaggaattgctggaacagctgcgaaagatcacagaagaagagaagaagatccttgacggacaggaggtagacaaggatctgtatacttcaggcagggattttattgtagacagcaggaaaatgcttgaagaaggtaaattgatcactgtaaggacccatacaagatttgtgcatttcccgcctcataagcataattatgtggaggtgctgtatgtatgcaagggatctgtgaccaatattattgacggcagggaagtagtacttaaaacaggagagcttcttttcctgaatcagtttactagtcatgagatccttccggcaggagtggatgacattgcgatcaactttatggttctaccccagttttttgatgtggcatattctatggcaggtgcaggaaattttcttgctgactttctggtaaatgtgctgcgtcgtgatgaggaaagaggagaatatcttcattttaaggtggcagaaaatctgcagattcagaatcttctggaaaatatgatatactccattgttaccgggaaaggggaggacaaccggatcaaccagaccaccatgggactgattttcctgtatcttttggattctgtccagtatgtggaaatgcggatcccaaatccttatgaaaatatgatcttcatgactaccctgaattatatagagcaacagtataggacagcgactcttactgagctgtgtgaaatgctgaagcttcccattcatgttttgagcaaaatgatcaagaagaccacaggctttaatttcaaggatctgcttcagagaaagcggctgaataaggcagcagagcttttgtgtgatacagatctgtctgtaagcgatattattgcagtagtgggatatgaaaatggcagctattttcacaaggttttcaaaaatagatattgtatgacaccaaaggaattcagaacaaaaaatcaaaaaaatggctggatacggctgtaaatttggcgaaaattcaaacttgtttttttgtggaaatggttgacattcagaaataaaaaaaataaaataaagttgaaatttaccaaaccacttaaaaaggaggaagattttatgaaaaaaagcatgaaaaaagttgtcagccttcttcttgcagcagtaatggtcatttctatgatcgcctttgcttctgttgtttatgccgctgacgacagcgtagaagtggatccggactttaagatgggtgtgatcctcatcggtgatgagacagaggggtattccgcagctcacatcgccggtatcaaggcagcagccaaagagcttggtcttgatgacagccaggttatctggaagtacaaagtaccggaagaccagacctgttatgattccgcagttgaccttgtagggcagggatgcagcatggtagttgcaaacagctatggacatcagacattcatggcacaggcagcacaggaatatccggacgttacatttgtttccatgacaggtgatttcgcagccatcagcggatgcgagaacttaaaaaatgcattcacaaacatttatgaagcacgttatgtgtctggtgttgttgccggtctgaagctgcagcagcttctggacgacggaacacttacagaagagacacagccggacagctttgatgcagatggcaatgttaagattggttacgtaggcgcattcagctacgcagaggttgtatccggttatacagcattcttcctcggagttcgcagtgtagttcctaatgtggtaatggaagtaaaatacaccaactcctggtttgatattgacaaagagggtgcagcagcagaggcactgatcgcaaatggttctgtgatcatcggacagcatgcagattccacaggtgctccggcggctacccagaagcttcttgacagtggtaagatctgctattctgttggttataacatcgacatgctcgaaactgctcctacagcggctcttacatctgcaaccaataactgggaagcatattacaaatatgcaattgctaccgttatgggtggcggcgatcttgagcaggattggtccaagggatttgcagatgatgctgtaggcatcacagaacttggtgaatcctgtgcagaaggcacggcagagtacgtagaggatgttgagaataagatcaaagatggttctcttcagatatttgatacatctacgtttacagttgacggagaagaagttacaagtgcaccttgtgatctttcattcatggatttctccacagatccggcatctgttatttaccagggagatacagtggaagccatcgaggatggacattttgcagagtctaccttcagaagcgcaccatatttcacacttcgtattgatggaatcacagaggacgcagaagcagtagagtaatttagctggtatacaaaggggttgctgcatagactgcaaggttcatgcggcagccctctttatttgtctggaatgcaaaagtccccgcatacagacattaatacagaagggaggcataggagtttggaatatgcaattcagttgacgaatgttaccaaaacattcggtaaggtaattgccaataaaggcgtaacactgaacgtaaggaagggtgagatcctgtccctgctgggcgagaacggaagcgggaagaccacacttatgaatatgatcgcaggtatttatttcccggattccggagagatccgtgtgaacggaacacctgtggagatacgttctcccaaggatgcctacgatcttggcatcggaatgatccatcagcattttaagctgatcgatgtgttctcagcagttgagaatattgcccttggacttgagaaaaaagaaaaatttgatatgaaagccatcagggccaaggcaaaggccatctgtgagaagtatcactttgacctggatctggaccagaaagtatatgagatgagtgtatctcagaagcagaccctggagatcgtcaaggttctgtacagaggtgcagagatcctgatcctggatgagcctactgcagtacttaccccacaggaaacagaaagattgttcgctgtgatccgcaatatgaagaaggatcacaagtctgtgatcattattacacataagctgcatgaagtgctggctatctcagaccgggtggcgatcctgagaaaaggggaatatgtggatacagttgagacaaaagacgctactgaagggtctcttacagagatgatggtaggaaaaaaggtagagctgaatattgaacgtacccagccgaaggatacagtaaaacgtctttctgtttctaatcttactgtttataaccgggaaggcgtaaaggtattggatgatgtaagctttgatgcttatggcggtgagatccttggcattgccggtatttccgggaatggacagaaagagctgttggagtccattgcaggtcttcaggtcactgccgagggaagcagcataaagttctacgaaaaaggaaaagaagataagccgctgcagctgatcggcaaaacaccaaagaagatccgtgatgcaggagttcatcttgcttttgttccggaggatcgtctgggaatgggactggttggctctatgggcatgaccggaaacatgcttttgaagacctatggtgcaggccgttcattccttacagagatgaaaggacctaagaagatggctgagaaggtccgtgaagagctggaagtagttacaccaagcattaatactccggtatccagactgtccggtggtaatgtgcagaaggttcttgtgggccgtgagattgcagaagagcctacagtccttatgaccgcttatgcagtgcgtggacttgacataaatacttcttatactatttacaatctgttggatgaagaaaaacgtcatggtgtggcagtggtatacgtaggtgaggatctggacgtactgatcgacctgtgtgacaggatccttgttctgtgtgatggaaaagcaaacggaatggtagatgcacgtacgatcacaaaggaagaagtaggtcttcttatgacaaatctgagaaaggctggtgcacaggaatgagcagtgaaactaagaaaataaaagagccttttgtacgtatcatcaagcgagatggtgcttccataggcaataaagtgctgatccgtgcgattgccattgtgcttgcacttgtagcagatgcaatctttatctttgctgttacagggctgaatcctatttccgtatacggggttatgtttaacggaacctttatgacatccattcgtttttcatgggcacttcgtgatctggtaaccctgctttgtattggtattgcactggctcctgcatttaaaatgaaattttggaatatcggtgcagaaggacaggttcttgcaggcggtcttgccacagcactggttatggtaaaatgcggacagagccttccaacgcctgcattgcttctggttatgttccttgcaagcattattgcaggaggtatctggggactgattcctgctgtttttaaggcatattggaatacaaatgagactttgtttactttgatgatgaactatgtggcaaccagtattgttgcctgtatgaccaacattatgcgtggaaaggcatccagccttggaaaactgaatatgtctactcaggcaggctggttcccccagtttttcggacagcgttacaacattaatatcctggttgtgtttatcctgatgattgtaatgtatttttatctgaaatattccaagcagggatatgagatcactgttgttggagagtccgagaacacagccagatatgctggtattaatgttaaacgggtaacgatccgtaccatgctgatatccggtgcgatctgcggacttgcaggtttcctggttgtggcaggaagagatcagacgatttccacatcctctgccggaggacagggatttactgctattattgttgcatggctggccaagtttaataccttttacatggcattgatttccttccttcttgttttcctttccagaggagctgctgagatcgcttctgcttacagcctgaatgattatgcggcaagtattatcgaaggtgttattctgttctttatcctgggaagtgagtttttcattaattacaaaatggtatttcgtggttcaaaacagaaggaggtgcaggaatgagtacgttaattgcatggatcatccgggcgattccttttggaacgatcattatgtttggatctatgggtgagacaatcacagaaaaatcaggaaatcttaacttaggtgtacctgggatcatgtatctgggaggctttgccggatttgcaagttcttattactatgagaaattatcctcagatccaaagggctggatctgtgtgatcattgctctgtttgcagccattgctgcttctgcatttggaggattgattttcagcttcctgaccatcaccctgcgtgccaaccagaatgtgacaggtcttgctcttactacctttggtatgggagttgccaatttttttggcgtatttattttaaatggagccagctatacagctgcacctcttgcctattctgcattttcaaagaagatccccttcctttcttccaagcttgggatcgtaagcaaggtagtatttccttatggattccttgcatatgcagctatcattattgccattgtgcttcattattttctgaataagaccagggtgggactgaatctgcgtgcagttggcgagaatccgggaactgcagatgcagcaggtattaatgtaacaaaatacaaatatctggctacctgtgccggggcaggtttgtctggtatcggcggtctttattatgtgctggattacaaccaggggatctgggcaactaccgggcagatcgaggctcttggatggctggcagtagcacttgttatctttactacatggaagcctttaaatggtatttggggagcttatcttttcggtatgctgtactggctgtatcagttccttcccaatatgctgggagtgaaggtggccggatatgtgacggatcttgtacaaatggtgccttatgtagtgaccatcattgtgctggtggttgtaagcttccggaagaagaaggagaatcagcctccggaaagtcttggactttcttatttccgcgaagaacgataaacgtgaaatctttgtgacttttaaaggggaatgtttacattctccttttttttatgctatagtaaccatacggcagtggtacagtaacaaagaaattgatggatttaggattacatgcttttatgtgtattcaagaaaggaattttgtgaatgattaagcgtaaatatcttgcagcatgccttgtggcagtcctttttgtggccggctgtggcagtaacaatgcagaaaagaaagaaacaacagaaacaaaagaaactacagaagcaacagatgcaccagatcaggagtctgcttctgaagaggatgcacaggatgaaactgcagcagatgatagtggtgaagcagatgatagtacagatgaggacgaacaggatctgacagatacggaggaagatgaggataccggactggaggaggaagatctttctaaggtagttccggcagattatctggtccaggatgcggacaagtatgtgactcttggggagaccaaggatctggaggctgttcagtacacatatgagatcaccgatgatatggtacaggatgagattgattctgaactttccgaggcatctgaggagatctccacagacaagccttctgtagagggagataccgtatactttacaatgacttataaagtagaaggggatgattctcaggatggtgaggaagaggattcttcagtgatccttggtcaggaggattatggcgctgaattcgatgagaagcttacaggcgtatccgcgggggataagctggacttttctgtttcctatgatgaagatatgtggatggaggagtgggccggcaagacggtagatttttccattgaggtttctgatgtggtacaggtagaagtacctgagtacaacctggattatgtaaaagaaaatacagaatatacaactcttgaagagtatgagcagtccattagggaatatctggaggaggaatataccagcagaagctattatgatgtaacagagtccctgctggaggcagcgatggcaaatgctacattcgacggatatccacaggagctgtatgatcagtgcaaagaagagatcctttccagctattccatgtttgtaggagaggataatactattgatgatgtgttggagatgtttggcattactgatgaggatgtacagtcagaaacagagaagcttgtaaacagatatctgtttatcagtgcatactgtaaagccaatgacattactgcagacggagaggaatacaaggattatgtaacaaagaatgcagactattacggagaggatgcggcttcttttgaggtcggttatactagagaatatctggtagagaatctgtatgatgaaaaggtaaaagaattgttatatgattctgcaaagatcactgagaagccctctacagaagccccctctgaagaggctgaagctacagatgaggagatcggtgagggagatgacctgatgctggacgagatccaggatgaagaagaattagctcaggatgaatctgtatcagaatagaagaattggctcagttacttggcttaggacgtagcagcatcagaataggaagaagaattgcttttttgtacatgagatggtatgattgaatcaagaatgttgaaagtattcaaaaacacattgggaggttgtgatgaagaggggcagtatttttgaaacagatgggattccccgtcttacagaagcatttccgcttgctatgcagcatgtagtagctatgatcgtaggctgcgttacgccggcaattattatttccggagcaattcccgggggtctatccagagaagaacaggtaattctgattcagtctgcattggtgatggcagcgttgtctacgctgctgcagctttttccaattggaggaaaagccaggtttgctattggatcaggattgcccatcatcatgggagtaagctttgcttatgttcccagtatgcaggcaatcgcagagtcttatgggattgcagcgattatgggagcagaactggcaggcggttttgtggctgtggtaatgggattgctggtaaagaagatcagggtcttttttccaccattgatcactggaacggttgtatttaccattggtctgtcattatatcccactgccatcaactacatggctggcggggtcagcagtccggactatggctcctggcagaactgggcgattgcattctttacattgatcgtagtaaccgtgctgaatcatttcgggaaagggatctggaagctggcatctattctgatcggcatcattgcaggatacctggtggcgattccttttggaatggttgatttttcaagtataggagaagcaggagtctgtcagcttccgtctctgcttcattttggcattgagtttgagccatcttcctgtattgccatcggtatattgtttgctatcaattccatccaggccattggtgattattcagcaacgaccatcggtgctatgaacagaactccgaaggatgaggaattgcagaaaggaattatcggctacggtatctccaatattgtgggagccttggctggaggtttgcccactgccacatacagtcagaatgtgggaattgttactactacaaaggtaattaaccggtgggtactgggactggcggctgtgatccttggtattgcagggattgttcccaagttttcggccattcttactacgattccccagtgtgttcttggaggtgctacagtttctgtatttgcatccattgctatgacaggtatgaagctggtagcttcagcagaaatggattaccggaattcatccatcgttggtcttgcagcagcactgggaatgggagtgtctcaggcaactgcagcactggctggctttccggcgtgggttaccaccatttttgggaaatccccggtggtgctggcaacgattatagcggtgatcatgaacattatccttccaaagacacgggaagaagagatggaagaggcacaacaaaagattgaaatcaaacataagctggatgaagatcacaaagaattcggtgaataaaagtaaaacctaaatacgaattaagaaagagtgtgctgatacaaaaaatgtgcagcacactctttttgataaaatgaaagccttataaatcgtgaaattgtccgatcatgtctttgatatgctgcatttcattatccatctcgatcatggcatgagcagattctaaaagctctgcactgatctgatcatagccttccatctcttcgatgccctttttgtaacgcagctgatgctccagagtagcccaaaaatccatgccattggtacgaatctggatttccgcccgcataggtgtttttccacgggaaaagaaaacagggacctcaacgatcatatgataactgcgatagccattgggcttgggattctttatataatccttgatcttcagtatcttgatatcatcctggctggccagcagatctgcaaccgtataaatatcgtcaatgaatgcacagaccacccggataccggcaacatcattcaattgttcctgtatattctcggcagaaaattcatagccaagcttttgaagtttccggtaaatactttcaggcttttttactcttgtcttaataaaagaaataggattccttttattttcaatggaaaattcatcattcagtacttccagtttggtctggagttcccggatggtgcagcggtacatcatcataagatcactgaacttagcagcatttttgataaatctttctggatccggtgtatccagaaaagggagattaagtttgttgtccatatgtaaaaccctctttttatgttattgtataatgcgtatcattatttcaattataagggataaaaaggatatagtaaagtaatgaatggctatatcacatttacctaaaatgaaactttaaattccaccgcccgcttatgcggtggaatttactctaacacagtagatattta

SEQ ID NO: 42 - DNA, 45226 bp, Unknown
  gut microbiota DNA sequence
cactgtaaacattcttcatgtcatctgtcagatactcctcatacacattctgaagatcctctgcagctacatcatagctctcctgcacatatgcagtatatgctttgaaaagagcttcataggtctggctctttttcttttcttcctccatctgctgagtgatctgcagagctgtatcgtcagattcctttgcttcaccctgggctttagaaagctcggccccttgactggataaagattcgctgtaattgatcagctgctggttggcttcccgatatattccctgtttgatagcaggtacggccaaaagccagaatgccagtgcaccggccccaataccaagcatcaaagtaaaaaacagggagatccttgaattttcacgatatgcaggcggctgtaccaccatgccttctataccgttatcttcaccctgttcagatttagttctgccaaacagtccctttttctgcttttccagcctggtagtaacgccagtctgctcatccacttccctcagaaaacggagtgtggtagtattggttttatcgatcctggctgcctttcgcaagatccgtcttgcctttccccattcatgattcttcatctggatcagtgcaagcaaatgataccccttgatcagcttggaattctgtgcaaggatctttcgaagctgtattgcagccatatcttcatgcccttccctgcaaagtgctagggcattgttgtatttacggatcgtttcattaatggcatccagcttgttggaattggcctgaagacggttaatgtactcattagccagattcttggtaggcttcagattcttgctgatcacccattcacttaatgcagcaacaacctcgccggtttcaaaataaacaagtccaagaagatttcttgcctgaatatttcttttgtcataagtaagactttgtttcaaacaattaatggctcctgacagatcccggatactggctttttcaagtccctgattatagtagaattttgacagatagtccaccttcttctgtatcagaacattgcacccacaattaggacagtaatccagatccttgtctgccagaaatgcgccgcaattcatgcagttcatcagtatctccttacggttatttcatgcggcggccgctttttgcttcccgcagcatctcctgtaaaatgtccaggatatcagtgagttctctgtcatatatggcactttctgcatctgttacatccagacacggttcaaacttcttcagttcttcttcgtaatcgatcatgcttttctccttgcgattgctgctttaatctctcctacaagatataaagatcctacacagaacagcattccgtcttctccctttgcctttaaggcaagttccagagcctttgccacttctggatcagcctctacagaggcacagccctcccgtgtgaagatctcttttaattcctcttccgggacttcccgataaccacctacctgggtaacaaccacatgtctgaaacggatctgactgcagatggtatggatcatatctttgtaatctttatcatttactgctgaaaacaaaagtgtaagcggatattcctgctgaaaatgcgctgcagtctccacaaacttggctactccgtcttcattatgtgctccatcaacgatcactcctggcaagatcgtctccatcctgccctgccatctggtggcgctcattccttttcgcacatgctcaatagctaccggaatctgatcctgtaaaacctccatagtttttaatgccagcatggcattcataacctgatactttgcaataaaaggaatatgaaattcctgatgatccttaccataatactgatttttcaaagaaaaatcaatccctgaagctgtattggaaagaatctgcgcatcctccttttttacttcgtaaaagggactgtgaagctctctggcatgtgcacggatcacctctgctgctgatgggtcattgccatcaaagatcaccggcactcccgggacaatgatcccagccttttcccctgcgatcttagctactgtatccccaaggtactgcatatgatccagactgatggatgtgatcacacatgctgccggatcttcaatggctgtggtagcatccagcctgcctccaaggccagtctccaaagtcacataatctactccagcctgtgcaaagatcaccatgcccataaggaatagcatctcaaagtaagtaggatgatagctgccctctgccaccagttcatctgccagtgctttcaccttctggaaagcagccagaaacgtgtcgttatcaatatttacttcattaatctgaaaccgttcattaatctctaccaaatgaggagaagtaaataatccacaggaatatccggcttcccggagaatggatgtaagaaatgcacaggtactgccctttccattggtacctgcaacatgaatcactttaaaatgattctgtggatttcccagccttgcaaggcattccttggtatgatccagactgttcttttttgtaaacttaggtgtttcttcaatataggccactgcttgttcgtaattcataaaaaaattcaccacttttatctaatgtattcgcaacccttttggttactctaccattatataatagtggtgaaagatgtccatacccaatcgtaacaatttatccgacaagatgttacgattggataaaacactattcgtagctgttcagtaccctcgcgagatattgccttctgaacagttaacattattcctctttttcaagtttccacggattcttgtcatacaatgcataaaccgcacggtcataactcttgcttaatgcctttcttgtggagctgttgcttcgctgtacaacagaaagccggtcaaagtccttcagctccgtacctgtaatcaccagagtagtaggacttacataaaccgtatcataccattctccatttagttttacctggctggaaggtgtgaaattggttccctggatataataggtataatccgaatctgatacaagacggatggaatccagtgttgcatcatagagtcccatacgcatctttgttctctggaaaggattctctccctggtatgcgtaacgatctccataaagcagatcatattgtagggtttccaaatctacctgataattctttgtatttcttcttgcctgatgataacggaaaatcgttccatcatggatacctacccgatccatcacctctgctgcgatctgataagatgccaggttttcattctttttctgaagccccatattatcccagatcacatattctgtctgaaacagatatttgtttttcaaatcttccactgtcagtcccatggttggaagatgatccccatacattacaagtaccacatcctccggatagtcagccagtgtgtccaccagattttttacaaaattatccatctcatggatctcgtttacatagtattcccacttataattcaattcttctgtaggtgcaccggaaactgtaatctgcggatcctccaatatcggttcatctggataatctccatgtccctgcaccgaaatggtatatacataatccggttcttctgtagaatccagacatttcacgatttcatcggtcagaacactgtcctttacccatcccagaggatttttcagattctcaccagccatatattcttctgaggtaaacgtatcgaacccaaggttggggaaaatagtccttcttccataaaaattggcttcattgttatggacagcatgggtggaatatccaagatttttcagcacatagggcgcactctcgcaagtggtttccttcaggatacttttatatggatactcccctggaccgaaataatgaaggctcatccctgtaattgtctcaaactctgtattggcagtacctgccccaacagacggcaccttgtaatacccggaagaatagtttttcatcagctttcggaacgtaggaataggatcctcagaaatatccagataatttacaagtgtaggatcaaaaaatgattccagttgcaaaaaaaggatattcggttttttatcttcctttgttgccggaaggttctcctctgtcttttcgatccttttgatctcagactcagagtaatctcgcggacttttaatacctgtattaaagattgtagtcgcaagacaatatggatatccataatcctcatatgcaaatgctatatttccaaaataattggaaagtatccttttctcaagggcaagctgtgtaatacctccaaaagcaacaattcctgctaggatcagcggaatcacatatctgtatcgaatcttctttttgtatttcgggcccttgataagcaggatcaacaacccgatcagcacaagtccgatcaggatgcagcccaggatcactccataagcaggcagatacttctgcataatggataatccatcggtaagcatatgcagatccggccctgtaaatggcgtaaccctgttcatcagcaggatcccatttacaagtccaaggaacagccagaatgccgataccaatacacgccagaaaaatcttctgtgaaacagatacacgatcagcattgttgtaaaaataaaagctgtattgtatgcaaaaaccagtggcttgcctgtcatatactgccatgcttctgcaatagaatggcggctgatggcttcaataataaaataaagcaccgcacaccacagtgcctgcaaaacaggcgatatcttattacacacatcacttattttcatctttgcgcaaaatttgcccgttttcatgaaaacgctcctttttatttctttaactgttcaagctgtgtgattactttttctttcatttctttatattttgccagttttgctttttcagcatcaaccttgtcagctggtgctttatttacaaaattaggattgctgagcattccatcacagcgggcgatctctttggtaagacgatcctgctcttttgtaaggcgttcaatttctttttccctgtcgatcagatcttccagtggcagatatacaactgcattggatacgactaccgaaactgcatcctcacctataccatctttattgtcctgtacatggatctgacttgcataggcaagattaataaaggatctgctgctcttttcatacatctggcagatcttctcatccttacccacgatgtacagatgcgtcttacggttctgaggaacattcatgctgtttctggtattacggatacctttcactacttctttgaagctttccacagcaagctctgcttccgggaaattccattcgtctttatataccggccagtctgagatcatgatggattcttcttctggaagaagtgtacagtaaatctcttcagtaataaatggcataaacggatgaagcagcttcaagccctgggtcaatgcggtacgcagggtccacaatgcttcacctgctgccttgggatcttcctgggctttccagaggcgtacctttgcaatttcaatataccagtcacaaagttcatcccacaggaaatcataaactttctgtactgcaattcccagttcatacttatccatattctctgttacatctttgatcactgtattcagcttggagaggatccacttgtcttctgcacaaagaccattcaaatcttctggctcagtaacagtcttgccttccaggttcatcataatgaaacgggaagcattccaaatcttattggcaaaattacggctggattctacacgttcccagtagaaacgcatatcatttccaggtgcatttcctgtgatcagagtaagacgcagggcgtctgcaccgtatttgtcgatcacttccagaggatcgataccattgccaagagatttactcatcttacgtccctgggaatcccttaccagcccatgaatcagcacatgatggaaaggagcctttcccgtctgctcaagagcagaaaataccatacggatcacccagaagaaaataatatcataacctgttacaagtacatctgtaggatagaaatattccagttccggtgttttttccggccatccaagtgtggagaagggccacagtgcagaactgaaccatgtatccagtgtatcctcatcctgatggaaatgagtaccgccacatttaggacagatttttggcatttcccttgctacaaccgtttccttacagtcatcacagtaataagcgggaatcctgtgtccccaccagagctgtctggaaatacaccagtctcggatattctccagccagtggagataagttttgtcaaaacgtgcaggtacaaattccagatctccgtcatccagggctttgatcgcagcctttgccatctcatccatcttaacaaaccactggggtttgatcataggctctacagtagtgccgcaccggtcatgggtaccaacactgtgattatgaggaaccaccttcaccagaagacccagcttatccagatcctcaaccatagcctttcttgcctcataacgatccatgccggcatatttgcctccaagctcattgatggtagcgtcatcattcaggatattgatctcctgaagattgtggcggcgccccacctcaaaatcgttagggtcatgagccggtgtgatcttcacacatcctgtaccaaattctttatctacgtattcatctgcgatcaccgggatctgtctgcctgtaaggggaagctccagcattttcccaaccaggtccttatatctttcgtcttccggattcactgccactgctgtatctcccagaagtgtttccggacgggtagtagcgatctctacaaatcttccttcttctccaacgataggataattgatatgccagaaaaatccatcctgatcctcatgctctacctctgcgtctgaaatagaagtctggcagacaggacaccagttgatgatcctggagcctttgtaaatataccctttctcatacagcttgataaagacttcctgcactgctctggagcagccttcatccatggtaaagcgctcacgctcccaatcagctgaagcgccaagcttctttaactgattaatgatctttccgccgtactcttctttccattcccatgcatatttcaggaattcttcacggccgatcgcatttttgtcaatgccttcttttttcagcttttctgttaccttaacctctgtagcaatagccgcatggtcagtacctggctgccataatgcttcgtaaccttccatcctcttgaaacggatcaggatatcctgcatggtttcatccagggcatgtcccatgtgcagctgtccggttacatttggcggcggcatcacaatagtaaacggcttcttgtccggatttacttttgcgtggaaatatccgttatccatccatttcttatacagacgatcctcaataccttttggatcatatgtttttgcaagctctttgctcatttcattttcctccaaaatttacgccccccacacagatgtgtgaagggcgatgtcatgcagtaccaccttttatcggttgatacggcccttttctttgcctttactatgaaaactactataattgtaaatccatttcttgtcaagatttttataggatattacattgttacgattcacaggcagctgcaagcagggtaaacagtgatctgcgtccttttaagcaacagcccacctttatattcctttttattccacacttttcaaagattccaccatattgatcttcttcagcttgaaatgcatggtaaagtttacaaacagagaaaatccacaggtgataagcccgctgtaaaggaagcttatcggattgatattcctgccaaacatgactgcatctacctccacagtggtaatcacatacctgtgcaggaaaatcccgaaaagtactcccaccagcactcctgccactgtcagcaggatattctctctgaatacatattgagacacctcctgatcatagaatcccagcacctttaaggtagcaagttccctttgcctctctgtaatgttaatattattcagattgtaaagaacaacaaatgcaagcataccggctgaaatgatcaacacaaggatcactgaatccagggacgtaagcattctttccagctgtcctgccagactgcttgtatagctgatacttaaaacaccaggcagtgtaagcagctgctggcctatagcttccagatcatccttatattcttctttcatagtaaaaaacaaatttttgtaatctggtttctgttgaaataccgactcatataaagagggtgaaatatatacataatgagccatataattctctgtgatgatctccactggaacctgatactcctgtccagccattttcaaagtgatggcatctcctgccttcaggcctagcagatccgctgttttctcacagattgctgcacctttatcagaaaacaaatacttctcctttgtgatccggttctgcaaggtcacatccttcttaaagctctccatatcctcaggtacgataacgtaaacactcagattggaagagcctcttggtacattcattttggtaaactgaacagacgtacaatgatctaccttctgattatccttaaggaattgtaccacttcttttctctgttcctcgtctgcatcctcatcctcaatcacattgccctcataatgctgcaggtcccggtactggatcaccgcaatattcataatggaatcccgtaatccaaatcctaccagcatcagacccatacttcctgcaattccaaaaaccgtcataaaaaggcgtttcttatatcggaatagattccgaagtgtggatttccaagtaaagcttaaatgcttccatagaaatgtgatccgctctgccaaaatacgtttgccttccttgggagcaggaggacgcatcaatgaggccggtgtttcccgcagttcccgtacacaggcaaacattgtggctcctactgtacatataatagaagcccctgatgcgatcagtgtatatttcatttcataattaatacacagagtatcagaaacattgtgatacataatcccataagaagtgatcacaacatatggaatgattttttctcctaccagaaagcccaggatacttcctccgatcgtggccaagagtgcataacagatatatttggctgcaacggctgcttttccgtatcctaaagccttcatggtcccgatctgggttctttgctcctctaccatcctggtcatagtagtaaggctgatcaaagctgctaccaagaaaaagatcacagggaacaccttgccgatattccggatacggtctgcattatctccgtaatccgaatattctggcagatcatttctatctgtaactgtccatgtaggaaccttcagatctgccaactcttttttggcatcttccagcttctgctggttgtcggccagttccttttttaccttttcctcagactcctgatactccttttcaccgtctgacagatctttttctccatcctccaactcctgtttggaatctttcagcttctgttcattttcctggagttctttttgtccatctatcagcttctgacggttttcttccagttcctgttctccactttgcagcttttctgtattttgggaaatctggattctggcctgggcaagctttcctgcatttgcatctatctcttgctgtcccttttgtgtctgctcctgtcctttttgaatctgttcttttcctttatccagttctttctgagctttatccagctgtttttttgcatctgccaactttttttcttgctgctttagttcttccctgccctgattgatctgctcctgtcctttttgaatctgttcctgggcatcatttaactggccttctttttcgtccagctgcgcaagacctccgtttatctgtcccacagagctttccagctgtgtcctggttgcagccagctgctgtccttgtcctgtcaattctgtttctgactgctgaatctgtgcagtaaggccctggatctgtgcagtaaaacctgcgatctgtgcctgtagcccagccagttcctcctgggatacctctcctgaagcaatgcctgcatcatagcttgcctgaagggaatctctttccgtgatcagtgctgtcagctgcccatttgccagatccagtgcagcctttccctgggcaagctgctgctctcctgtttctacttgagaaagcccttcctggcactgcaaaagttgttcctgcaactgctgtctttgctgttggatctgttcttttccctggcttacctgtcctgcccttgcgtccagatcactttggctttgttccaatttttgtctggcttctgtaagttttaacacaccggcttcatattcctgtctggaagcctgtaatttttccagtccatcctccagtttctgctggttcttttcaatctctttattgccattatccagctgctgctgtgcctgggaaagctgctgctcgccctgttgtacctgctgggttgcctgggaaagctgttgtctggcatcttccagcttttctgttccttcttccagctgcttctgtccatcctttaactgtccctttgcatcttcaatagcttttacaccatcttcatattctttctgtccatctgttagctttttcctgccatcgatcagctgctgcctggcatctgccagtttttcttctgcttctcgcctgccatctgccagttcctgctcaccgtcagtgatttctttttgtgcatctgcagttacctgctgataacgtgcttcacatcttacatcctgtatcccttccaccttgcttttgatcttacggatcaggatatcataagcatctgtatagctgaccacatctttggcaccgtgtaccagaagatagatctgcgtatatacttcctggtcaaaatcctcaggcaatataaatgcaaatccgttcacctctcctgtaccaagagttgtattaccacggttaaaagaaatataaaggggacttttccctatagctgtcacagtatagctgtgccttccaagaaacgaactgtcttcctgctcccgaagaacaatctgatctcctggcttatacccatgagcattggcataagtatcatcaagaaacagttctccagatttctgcggcagtcttccctctgtaactgtcagctggttcacccgtttggtcaatgactcaatatgtaataccgtctgtttttcattctcgccacaggtaacatctgtaaaataagcaccttccgcatcctcaatgccattgatctcccttaatgcatcttcatcctcactggtaagcccaagtgtgcttactaccttcaggtccatcaggctgttttcatcataatatgcatctcctgaatatcgcatgtccggtgaggaagcctgtatcccggaaaagaaagctaccccaagggctacaatgaaaaagatggaaagaaacctggctttgcttctgcggatctccatccagaactctttatgtattgctttcatctttttcacctaccactcaatttcttccactggcgtggggtgtgcattctgtgtcattttggatacttttccattcttaatcctgatcacccggtctgccatgggagtaagtgcagagttatgcgtgatcacgatcaccgtcatatttttttccctgcacatgtcctgaagcagtttcaggatcgccttaccggtctgataatccaaagcaccggtgggctcatcacacagcatcatctttggattctttgccatggcccttgcaatggaaacacgttgctgttctcctcctgaaagctgggctggaaaattgccaagcctgtccccaaggccaacttcttccaatacctgagccgcatccaacggattcttacatatctgcgctgccagctccacattttccagtgctgtaagatttggcaccagattgtaaaactgaaatacaaaaccaatatcatcccttctgtatgcggtcagctggcggctgttatatcctgcaatattcctgccatccacccatacttccccatctgttgcatgatccatgcccccaagtatgttcagcactgtggttttccccgcaccactagggccaacaatcactacaaattctcctttttcgatctggaaactgatctcatctacagcctttattggtacctcttttgttccgtaaatcctggatactttatccagcttaatataattttctgtattcttctgcaatccatcactcccaagctgtcttattttatgttgcccttttccatatccgcagatgtaaaaccaaggggtaaaagctgccccagtgtataacttttgtaatcattctctgttcttggcaggattaccagaaaagttgcagggtcacaaaactcactcataacctgcctgcagatcccacaaggtgcacagtactccaagctttgtgcctcctttctcccacctgcaatggcaatggctgtaaattccctgtatccttcagaaactgctttgaaaaaagcagtccgttcagcacaattggtcgctccataagaagcattttcaatgttgcatccagtaaatattctgccgtctttgcacaaaagtgctgctcccaccataaaacctgaataaggtgcataagctttctgtcttacttccaatgccttacgaatcagttcctggaactccataggctcctcctgtatcccatcagtctacataatatatccagttttcttttcttggatgggtttcctgtacttcttcctttggataacccaggatacaatggccaatgccttcataatccccctggatcccaagagatttcagaagttcctttccttcctggctttcaaattcctcttttgccctgtggatccagcaactgccaatccccagtgcatgagctgcgttcataagatttcccataacaagacttccgtcatatacgtatgtacctacagatttgtctgcaaggaccaccagaactacaggtgctccataaaatggatctccctttgcgcccatgatctgtgcattcatcctggacagctgatctcttactttcttatctgttatggcaagaataatgggagactgtctgttcataccagttggcacccatgtaccagcctccacgatttcctggatcacttctttaggaagcatatccggcttataacttttcacacttcttcttgactttaaacattcaatcgtactgtttgttccactcatggttaattgcctccttttatcttttatcttttatctttcatcttatatttttcatttttatttgtttttattttcagatatatttatgataccatcctgtttttacaaaaacaagtggctgtcgcttcataataaaagcaaagatacagaaaaataatcattggcaaatttataataatttccgttgcgttgtagaaaagattttggttatatatcatgcgaggctttcgtagatttcgactgcgctagcttctctgttatttgccgtgtctgaacgccgtaggcgtgagtttggcaaatgacagagataataagcgcgcgggagaaatccgaaaacgaagccctgatatataaacatatcttttctacaacgcaacatgaacaaaataattttcaagtcgagcagccaaatgatattttactgtatccaaaaacaaaacagccaatatctattttcatttcttttttctggccatcagccctccgattcttccggtttcttttgctgtcagtgttttccagccgcctcccagaaccttgtcaagcaatcccaattcctgggcgatctcatactttgctttttcctcttctggcagttttccttttaaataggcttctatttctttttctctattcaatatcctatactcctttttcgtaaaagtatgaacccaaaattcggaatttatacacctgccatcaaaccttctgactgtttctttctccatcctattcccaaaatcaaacagattggttataataatgcacataattgtatttttgatatctggaggatatgtgttttatgaatgatgatctaaaatatctgcccgaagagtttttaaaccgcatgaacaacatgcttggagatgatttccagacttttcttaatagctatcagcagcctcgcacatttggccttcgagtcaatactgccaagatttcctgtgaagaatttgaaaaaatcgtcccctttcccataagtcccatcccctggatcccaggcggatatttttatcctgaaaatgtccgtccgtccaaatgtgcattctatcaggccggactttattatcttcaggagccaagtgccatgactcctgtttccagacttctgccaaagcctggcgaatacatactggatatgtgtgctgcccctggtggaaaggctacagcacttggtgctgcccttaaaggacatgggcttcttgtagccaatgacatcagtacttccagggcacgggcactgctccgtaatattgaacttttcggcatcccaaacagctttgttaccagcacagcgcctaaagatctggttccctgctttcctgaatttttccataagatcattctggatgccccatgctccggggaaggtatgttccgaaaggatgaagctcttgccaaagactggagtcctgccaaatcccaagagctttccctcatccagcgtgaactgatccttcaggcagcagatatgcttcgtccaggaggatatctgctttactccacctgcacttttgcacctcaagaggatgagggcacagtttcttatcttcttgaaaaccgcccggatatggaactggtggaaatgcccggatatgaaggcttttcagatggtgttcctgcctggggaaagggacagccccagcttacacgctgtgtccgtatttttcctcataaaatgaacggggaaggccattttatggctctgcttcataagcctggccagaccatttcagagatctcccctgtatttacaaagccaaaccgtactgcctttgaatatatcgacgcttttttccgtgaaatcggactgaaatccttaggtggacagccctttgactggaacagagtagagataaaaggagataaggtttattatcttcctcctgtttcctgcagtatccgtaggatcaattttttaaggaatggcctttacatgggtgatctgaaaaagaaccgttttgagccttcacaaccactggctcttacccttcacaaaggcgaggtttcttcagtgatcaccttgcctgttcaggatcagaggctggaacgctacctaaaaggagaaactcttctcataaacccagaagaagccgcctcgcccaaaggctggcagcttctatgtgtagaaggttatcctcttggttttggaaaactggtgggacagaccctgaaaaacaaatatccttccggctggcggctttgaccgccggcctttttacatgtcttctatctgttcattaacatctttcagaccaggatttctttatggacagcaaaagaataaatgatcttttctcttacttttttccctgtcatccgttccagggcatctgcataatcttccagctgtaccttatacagatctacaagacgtgattcttctccaaaacgtatatggtctgttttataatctacaagcaccaggtccttttcctcttcaaaatatgcatcaatgattccctggatcaaaacaggttcccttttccctgcccatgtcttatccagttcttctgcagaccttgcgatcacaaatggctgttctctgtaaagccttttctctaaccaggctgccttcatcctcacacctaatggtgagtttaagaaagcaagcacctcctgtattttgatacaatcagcctcttcctggctcattttctcctgctgcaccagcatctgaagctgttttagcaactcttctttactgtccgttttatcatacattatgcattccataaaccgatgataagcagtacctctggctgctcctgtgtattcttcctccgtcaccatgcaaaactttggaatcaagggaacaatatccggttcaaaaaagactgcctcttctttttcatattcatcaggataatttctttttttcagttctgacacgctgactttcaccggcagttccttcagatatttaaaaggataccgataatcaaatctttccttcagttcttcccggagtttctcatcaaaaactcgattcttatcccagctgcgaagaatctcttcctccatctgtccctgtgcctgatggatcacttcctctccggtaagatcctttaccgttatcttttttataaggaagggtatcttagtacggtaaagtaaagtattacacccggcaggcattccatattcttcaaataaaggatccattgcaggatgttgggccaatgcaggcagtatataagaccaacaggttttccctttcattcttacatccactggaagaaagggagtcccactgtcccgaaacctgtacagtacatgcatcagcttttccattttccctacacagcctgtaataaacagcttttccttagctcttgtaagagcaacatacagaatacgtaattcttctcccaggctttccttctgaagctctctgcggataatctgcttatgcagtgtggaagcaatgatccttttttccggaataattgcatctgccccaagtccaagctccggatggatcaaaagtcttgcattcagatcctgaaaattaaatgcttttcccatacctgatgcaaatactatcggaaactccagacccttgcttttatggatggtcatgatttgtacagcaccctctcctgcatctgccaggttcacctctccatagtctatctcatatttctgaagatgctcaatataacgaataaaattaaacaaacctctgtagcttgtcttttcgtaatccatagccttttcaaccaacattgcaagattggcatttctctgtgccccatccggcagcgccctggcataatccccgtacccggttttctttagtgcagcactgatcagtttatgaaccggtgtataaactgccatatcacgaagatcttccaacagcttatagaaatcctgaagtttttcctgaaactgtttgtctattttcttttcttccaaacttttttcactatccattatacaggacagtacgctttcaaaaagttttccttttggataaccacatcgaagagatgccagttcctgtgaggagcatcctatgataggtgaatgaagaaccccacataagggtatatcctgataaggattatcgcacaccttcagtaaattcaatacagtaacgacttctgtagctgaaaaataaccggttttggatgcagcatacgaagggatcccctgtgcagaaaatacctgtgaaaaggattctgcccagccggatgcagatcttaaaagcactacaatgtcattatatccagcaggcctgtactcttcctttttccggtcatatatctgttcttttcccacgatctgccggatcctatgtgccactgccagtgcttccagttctcttaccttctgggaactgccttccatcaagtcctctacttcttctccgtccttttcaacaagcaatacctctgtggtataaaactctttgttcccgcctttcggaaactctgctcctggataaagggcggcacgatcatcataccctacgcctcccagatccggcttcatgatctgatggaacagataattcacactgtccagtacctgatgcctgcttcggaaattcttatgaagatcgatcctttgctctttactctcttccagcgtataggtttccatcttatccataaaaagatccggtcttgcaagacggaacctgtaaatactctgttttacatcccctaccataaagatatttttccgtcctgacacttcgccggaaacacaataggtgatcatctcctgtacaaggttgctgtcctgatactcatctaccagcacctcctcatacttctcacttaattctcttgccacgtcagaaggcttcccgtcctttacaaggatagccagcgccagatgctccatatctgtaaaatccagaatatttttttctctttttttcacagtaaactgcttcttaaattccagggtcaactttacaagtgtttccataggttcttttccgtattgaagggcttccaggatttcagctgtgctgttctgaaaatatctgcttcccagatccttcagacttgtcttcatatcatcccgcagactttttacctgttcttttttttcttcatcaacaggtacttccggctttttcccagacagacgctgatatgaaaagtccataagaagactgcggacctgctcataatcctgcttacccagggcttttcgcacagcttctataccagcctggtctgagatcagcgcttcctcataaagataaggtcctcccggaatcctgctgatctgtcttgcctgacggatcagttcctctgcccctgtcaattcctcatctgctgtctgccacaatttctgcagccatctggagtcatacagttcttcttctgttgtaatatggtagatcttaagacaatgctccagccattcttccggatccggatggctcatagccgcctgataaagtccgatgatcaagtctttcagattgtcatctgttttccctggagcataacattccacaaattttacaaaggcagggtccttttccctgtagcactcctctgtaagctcttttaacacatcttccctgaaaagctttaactcaccttcatcagctaccctgtatcctggatccagattgatcgtatggaaataatttcggatcacataggcacaaaagccatcaatggtggtgatctgcgcagtatggatccgtgtcatctgtttctgcagatgctcattttccggattctcacacagtgcattctccaaagctctggaaatcctttccttcatttctccggctgctgcccttgtaaatgtcatgatcaggagtctgtcaatatcaatcgggtgatccggatccatgatcttattcaagatcctctccacaagtactgctgtttttccggatcctgccgctgcactgaccagaagatttctattacgcagacgaatcacttcctgctgttcctttgtccagctcattcccattttaccgttcctcctctcctgtcaggatctggtcatccatactctctcccaggcttttccacaattcttcatccgaaaagcttttcagtctgcggaaaccatatcccggaattttccggtcaaagccacacacagaaatataaggacaataagtgcaggcattttttgttcccagctcatatggagaaatctgcgcatcccctttcaggatatccttccggatctgtttgattttctttttcacatactgatcaagaatccaaaactgctggttgtcagccactgaagaaccttttttaattccaccatcctttttgtaggacacaggaatagacaccagacttttatcgatcttctgggcgatctcagggtctttctgaaccaatccgttcattttcaggcttttcagtatttcctcattaactgattccatatctgtttctattttctcctggatcataggatctttcacattgtaataaaagattcctgctggaacgatctccttgtccggatacttccgtctttctactgataaggctgcatccatatatacaagcagctgaagctgcagaccatggtacaaagccaccaggtcaaaggtagtatttcctgtcttatagtcaatcaccttcacatataccttgtcctgctcttccaaaatatctactctatcaatcctgccgccctggaaaacaacctcaaacccctccggaacaaattctccgttcttcagctggttctgcagtgcccataatgttctgtgtaaaagccttctggtacgctggatcatatactcatttcttgcactgctttttaaaatagtatttccataatctgctgttactttttccaggcattgatctgcaatctgcctttgctgttcctggctaagatcagcccacaaaagcccctgccttcttaactcttttgaaaattcctccaaagctttatggatcacatttcccatatccatagccttaaattcgtactctgcccgctctgaaagacgcagcccatactgaagaaaatgtgcaaaagcacaggcggcaaaccgttccaaccgtgttgcactgtaaggagacacctctccatacagcactttcgccacacttgcgccgatcatatccttaggacagatacttaaaaaggcttccacaagcttctgtgtcatcgccttatatccggggcttcttaaaagccagccaaacacttcaccaaaaaggggatcttctgccgtatatgcaccttccgaaagacctttcaaaaaagcatccacaccatctcccgggatctccagatcctcaagagtataattaccgtcctctatacggctgatctttaacgccggaaacaatcctgtcactgtatggatcaggtaagcagggctaatagcctcacctttgctattagaactgctaaaggaaagacacagcagcttttctggctttgtaagattcaggtacaaatagaatctttgcatgttcataagctcttttggacctggtgccagttccaccccttcctctgcaaaaaaatcccggtccatttcattcaggattcctccggtatctgctgctttaggaatatttccctcattcactcccacgaaaaacaatgccttgatctttttcaatctggttctttccatatctcctacaagaacctgatccatacttggcggaatcaaggccacctttgccttagacagaccggtttccagaagctgacgaaattcctggactgtaaccagttcatccccaaggatctcaaccatacgatccaaaagatccataacaataccgtaaatctgtccgtattctttttccatggcagcatctcccacagacttaaaatacaattcctgctttttaagtttttcctggatctgaccttttacaataaaatcatacaaaccgcggcaatactgctctatcttttttctgccctttccaaagatttctgcaaagtcatatacttcctccacaaatctggcacggctttcattaatcttcagaatatcttcagcatccattcccctgtaaatcctggtccagtgctcctgccatctgtttaatccacgtatccccagggcgatcacataattctccaaataatctgtctcttctcttgtaagtctggacataccgcatcttaaatatcgaaaaactccttcgtaagaaaatccagtaaacaccatctccactgctgcccggatatattcaacaaaaggattcatcagcactgtatgtttttcatctacaaaatatgggattccagcccgctcaaacacctgagatgcaatattaccgtattcttccagatttcctgtaattactgcgatctctccatatttcatcccctgtgtacgcacaagtctgcggatccttctggctgcctcttccagttctttttccggaatacctgccgtatagatctgtatttcttcctgtggatcctcatatttctttctgctgtaacggaatatatgtttttccaggaatttgagggccggtgcctgtgaaaaccgggatttttcatcagtagtaagacataccggctcctccagatccctggtaagtgctgacaagatatggatcatctgacggctcatataaaaaagctggtgaggttttcccttggcaaatacatccccgcttccatccatagtcactgtaaccatcactttttgacacactgcaagcagttcccggatcaccttgacctgaatcggagtaaaacctgtaaatccatccaggactatcacactgtctttcagcttttcagacagtggaactgcaggcagtaatgcatccaggatctcttcccctgtaatataatgtccttccagatattccttaaagcctttataaagtacctgtatatcctgaagtttcatatgaagaaggggctgttgctccgctctattcaccatatcctccagatcactgtccccaatatcgtacagtaaaaattcagagatcaaggacttcacctcatcaagacatcctggtcttttcatctgaccgcccaaataaggaagctgtcctttatgcatttgtactaccttctgcagaaccatgcttttcccggtatcctccaaaagctttcccatatttccaccggtttcctgaatgatcctgtatgcaagtctctgaaagctaagtacatctatatttaagattccccgtcccggatgcatttccaccagtgttttctgggtctgcatggtaaactgctccggcacgatcacatagtattgccgttttggatatttcatagattcccgaatcacatgatcatatgcataacaggattttccggctcctgaactgccgattacaaattgaagggacatatggactcctttcctataaacaatcttaagatcgtaccccgcactgggacaggcacggtaaagaactgatttttaaacactgtatcattattgaggactttttccccaacatcatttcataatcatatcataaatccaaaggtttgataataggatatagaaaaacagaccgggaggcgcatgccatgagttccaaaacaaagatcattgtcttacatatgaaagaagtggtttataccattctttttctgatccttgccattcttttcggtgttctgctcttctttatgtttggctccggaaaaaaccaggctcaatccggaaaagcttccaaatatactcctggaatctatcgctcttccatttcactgaacggaaatacctttgacatggaagtaagcctggatgctgacaggattgcttccattgatctggtaaacttaagcgaaagcacaaaagccgcatttcctctgatgaagcctgccctggaatccctggccgcgcagatctatcagtctcaatccctggagaatattacctatccggatgatcagaaatataccagtcagttgcttctatcatccataaaaagtgccatagaaaaagggactgtgtactaagcagtccctaatccaatattctattcttccagctctgccatccatatggcggcacttgcatcacttggcatacgcaaatcccctcttggagacaaggcaacgcttcccacctttggtccatccggcaggcaggaacgtttaaactgctgtgcaaaaaatctccgataaaagatcttcagccacttcataatggtttccttgtcataaatgccatcaaaggttctgcatgcgatccggtagatcttatccggctgatatccggcacgcagcatgtaatataagaaaaagtcatgaagctcataaggtcctaccaggtcttctgtcttttgtgcgatcttcccgtcttttggaggcaaaagctccgggcttaccggtgtatccaatatatccagaagtactttggaaagctcttcatcctcacatgtatctgcataatatcttaccagatgacgtacaagggtctttggtacagaggtattcaccccatacatggacatatgatctccattataggtggcccacccaagggccagttctgaaaggtcacctgtaccaaccagaatcgcaccctcctgattggccatatccatcagaatctgtgtacgctcccttgcctgagagttctcataagttacatcatgtacctcaggatcgtgtccaatatccctgaaatgaatatttaccgcatcccgtatattaatctccgtcagcgaagcacctatacgcttgctgagtgtacatgcattctggtatgtcctgtctgtagtcccaaaacatggcatagtcacacaatgtatctgctctcttggtgccttcatcctgtcaaatgccctggccattaccaaaagggcaagtgtggaatccagtcctccggacagcccaaccattgcacgctggctgtgtacatgatccagtctttttttcaatcccatagcctgtatattcagaatttcttcacaccgcaaatccctttcttctttttttccaggaacaaagggagttgccgggaatacacgggtcagctttgtcttttctttcttaacatggaaaggaatcctctcataaccactgccatctgttcccgggaaggtggacatccttcttctctcgtctgccagacggtacacatcgatctctccgaaaaccacagaattatggaatcttctgccctctgccagcagtactccgttctcagcgatcatattctgtccaccgaaaaccagatcctgagaggattccccctcacctgcagtagcataaacgtatccgcagatcagccttgcagactgtccggttacaagggatcttctgtaagcatccttccctaccatctcatcactggcagaaaggttcacgatcacatgagcacctgcctgtgcatgagatacacttggtggctgtggaacccaaaggtcctcacaaatctctgctgctactgtcagttcttcacactcatcacacacaaacagcaggtctgtaccaaatggaatctcaacgccgtctacctcatgagtgtccatacagtcactgcctgaagtgaaatggcgctgctcgtagaattcattataattaggtatacaggtttttgggataaagcccaggatctcaccatgattcagcacagctgccacattatacagcttgcctgcatgacgcataggcagcccgagaaaaataagcgcatccacttgctgagtagccactgccagctttttcaaagtataccatgcactgtccaaaagctgacgctgtaaaaacagatcctgacaggtgtagcctgtaatacaaagctccggaagcaccatgatctttgcatgttctttctccatcttgtgaatcactttcaggatggcatttctgttggcttcgcagtcagccactgtgatctctggtgtaccggctgctgcttttataaatccatgcttcacttcttacacctccgaaggatctcctttaattcttccacatgaaacacatagttggtattacagaaatggcagttcagttctacatcctttccttcctggatcatttcatttaattcttttctgccaatactgatcaacgccttctccaccctgcttttactgcagttacaataaaatctggttggaagggtatcgttgatctcaatatcaaatccatcaagaaccacattcaacaaactttccggtgtatgcccttcctccagaaggcttgtgacggatgagatcttgctgatgttctcttccagctttgcaataacactttcctctgcaaaaggcattagctgtacaataaatccgcctgcctggcggacagtattgttcttattcatcagaacacccagtcctactgctgatggcacctgttcgctggttgcaaaataataggtcaggtcttctgcaatctcacctgtctgtagagtaacctgtcccacatacggctctttcaggcccatatccttgatcacgctgatatatcctgctcctacggcaccagatacatccagcttgcctttactgttagccggaaggatcacatccggattgcccacatagccttttacattgccctgggaatctgcagtgactgtaattccctggatcggaccgtctcccttcacctgaagagtcaggatatccttttcccctttcatcatggctcccatcatagctccgcctgtaagaagccttcccagtgcagcggttgccaccggactggtattatggtcttttcttgctgtttccacagtatctgttgtaactgctgcaaaggcacggatctgtctgttagctgcaacagctctgataatataatcgctcattcttctctcctgtttatccgtttaatcataaaataagtgttttcaccacattattttatttcccatattcttttgcaataaaggtaagacgtccgctgtcagccctgggtgcatctctggtataagcatcataaactgccagcagtttaagaccagagctttgcagaagagtcttgatctgttccagcggataggctctctgataatgaacctcctccactttctcatacctgccgtctgcatccggcaggaaaagtgtgagtgcatactcattgatcccgctttcctcatcgtaagtattctcccatatgaaactgccttcctcacgattctccgcaatggtggaatccccgatcatctcctgatacttatacactgtattcatatcaaaaataaaaagtccgcctggatccagataattatttaccagttcaaaaacatgctccagatcctgctcctcagtaagataattcaggctgtcacatacgctgatcacagcccgcactgtaccataaagttcaaactcctgcatgtcctgcaaaagatacaggatatcatggcctgaagtttctcttttctgcatggcctctgccagcatctcctctgaattatccacaccgatcatatcataaccagaggcagctaacagctctgtcatagtacctgtaccacagcccagctccagtatcaggccgtcactgatcccatattctctaagtgtgtccttaagataaccggcccagctatcataatccacattatcctgaaaaatatcatataccctggcaaactcgccatatgcttccattgtatccattcttttccccacgtataacaaacagcagacaaccggctgtaagtcggctgtctgcctttggtttcttcctgaagtattaccggaaatcctttattctaccggcatataatatacatctgcaccttcgccgtgccagtaataatccacatcattctgatcataaacatcctcattattggcaaaacggtaagtattgccctgggaatctacccagttaccgctgccgtccggggtgatcacaagcggatgtccatcagagttacggtagatggttcttgtctgattggtatcggtgagctgctcctgtgtaaatcctccggaattaccggtagtggagctggcctgtccgtctgtacctgtagcagaatcaccggatgctgtaccatctgttgtctgtgtaccgtctgcagtgccgtcagcagtagtatctgcaacagcaagtgtactggatgcgccaatgatctggaaagaatcaacagccgtctggatccctgtcagggacgcatcattcactaccgagcctgtaatgctgtagtactcactctcattggcatatactttcttcacagcataagcatatccgccgctcttctctgtattcagatacttcacagtgtaagaataaatgcctactccattcacatttgtgctgttgtaattctggatctcaaaatctgtaccctgctccaggtcagaagcctgctcaagtgcagctgccagatcctgggtattggggatcatagctgaagacatatcctcttcccctgctccatgaagaacaaggatcttaccctgctcaggtgactcaaagctgatcatatcctctgcatctgacttattcgcccaggtagcgtccggaagcttgatcgtcactgctccatcactggaagtataagtagtatcctgtacatctggtgcaatcgtaggctctggtgtaggctcctgggtgggctccggtgtaggagtctcatccacgatcacctgctctgccggatcatctccgccaaagcatcctgtggccagtcctgaaagtgctgctgttatagttaagagaactaaaaatcttttattcttcataattgcctccttatttatcttacaaaaatccctcattcgatattttacaattgtattacaaatatgtcaatatttttcacagtgcagattcttaaattcctgtaaacttttgaaaaacacagtgtaactattcagtgccctcacagttggaaatcaaaatgctttccagaagcagttataacactgtacatatataactcatgaagagcccttgtagccgcaatatatctcccctgttttgcaagcgcactttggtctttttcaggaaatactacaaatacctggtcgaattccagtccctttgccagataaaaggtggtaactgtaattccctttttaaatctggaactgttcctgtgcagataattgaaccgattctttgtatcaaaacctgtttcttccaacatctttttaagcaaagctgctcccaggtctgcttccttctctgtgcggaagatcaccgctgctgtttcaaactcatcctcgcccagcttgatatagtccagtatttctttcactgctgcctgtatatcctcaaactgctgttcctgtacaggctttccatgacgctgaagtagttccatatccgaaatccctgccagcttattagcataagccgcaatctccactgtatttcgatagcttttattcatctggatcctgcggatatcccttccaaagatcccaggcaggaaagtaaacacatcctgttgtttttcttccattgtttgtgccttgtctccaagaatggtcatcctgcaggaaaacatatttttcaggatcagatactgcattcttgaatagtcctgcatctcatctaccaccagatgcttgatcgtactattttcctgctgcccccataaacggtatttcagataaagcacaggatatacatcttcatataaaagctttctcttttcaagaggaaccctggtaagagccggatatccgctgctttccaagaaacgactgtacaatacatacagatcccttgtttcatacagggaataaaaatcctccctgatcagctccctctcttcatctggcagatccctgtcccttaatgtttccacttcatcaataaaataatcacacactgcatccattctggcaagcaatggaatatccataaatttgaagtaaaacagatcaatgatctctgcttctgtctttgtatagcctttataacggatatccctgaaatccatcagctcatcttccagttctgtaataaaccgttccagctggttcagaaatccttcagactgcttctcctggtaaaatgtaacagcctttggatggttcaggcttctctcgatctggtcataacggtcttcacagtcagctgctgtatcctgaagctgccgataagcaaacaggtcaaaactcatttcttttatattttcttcccctagttccggcaaaatatgagaaatataatctgagaaaaccccattaggcgacaataccaggatattggatgatttcagattctgcctgtcatgataaagaagataagcaatcctgtgaagcgcaatggatgttttacctgatcctgctgccccctggatcaccataatccggtctttcgtgttacggataatcgcattctgctccttctgaatcgtacttacaatattcttcagtgctacagagccattacttcctaactctgccatcagaatctcatcatccaccttgatgtcactttcaaactgatagaccatcttccccctgcggatcttgtactgccatttggaaaggatctcaccctggatcctgccaagcggtgcttcataaaaagccggtcctttatcataatcataaaaaagtccgcatacaggtgcacgccagtcatagaccaggggcacacctccagccttttctgcaaaattgccaataccaacataaaagctttccggctcatcttctccctcaaaaatgaaatctactcttccaaaaaagggagaatccagcattttccgaaaccggttttttagatggagttgctgctcattggcactgatttgatgaaacaacgcctgctgattgtcaaaattttcatatccatactggtccatttctgtgtaattttcccagtaatattcatgcatcccgtctatttctttctggccttctgcaatgctttgggatatctctgcaatcctctgacgcagcttatccaatacataggccagatattggatcccatctttattgtctgtcattctaaaagctccctttttgtcatccccttccagagaggttcttattattataccctatagcctttaaaaagtacacaaaaagaagcagtacaccccaaacaaactgagatgaaaactgcttctaaaaaatgcttatctgtaactgtaccctgattatttatgctgtctgcgttttttcaaactggctgttataaagctgtgcgtaaaatcctccctttgccagcagttcctcatgagatccctgttcaataatatctccatccttcataacaaggatcatatctgcatccttgatcgtagaaagacgatgggcgatcacaaagcttgttcttcccttcatcagattgtccattgccttctggatctgcatctctgttctggtatcaacagacgaggtagcctcgtccaggatcaggatcttgttgtctgccagaatagctctggcaatagttaaaagctgcttttggccctgggaaatattacttgtctcctcgtccagcaccatattatagccgccaggctgctgcataatgaagtgatggatatgagctgcctttgctgctgcgatcacctcttcgtctgttgcatccagccgtccgtaccggatattctccatgatcgttccggaaaacagccaggtatcctgtagaaccataccaaacatttctcttaactgacttctgttaaaatcccggatatcatgtccatctacacagatggaacctttatttacatcatagaaccgcatcagcagcttcaccatagtggtcttacctgcacctgtaggtcctacaattgcgatcttctgcccatttttcacatctgctgaaaaatcatggacaatgatcttatccggattgtagccaaactcaacatgctggaactgcacattgccggaaagtcctgtaatatccacagcgttctctttgccctgctcttcctcaggctcatccagaaattcaaaaactctttcagacgcagcagcagaagactgaagcagatttgttacctgtgcgatctgctggataggctgtgtaaaattacggatatactggaagaaggactggatatctccaacctcaatacttcctttgatcacaaacacaccgcctaacaaagcaaccattacatatcccaaatttccgataaactgcataataggcatcatcatgcctgagaaaaactgggatttccatgcagactcgtaaagcttctggttatctttttcaaaaacattcagtacatcctgttccttattaaacaccttcaccacattgtgtccaccgtagttttcctcaatctgaccatttacttcacccagatatttctgctgatcacggaaatatttctgcgaccgcttcattaccccattaatgatcagcatggacactggcaggatcaaaagggctgccagcgtcatcggcacattaatggaaagcatcattataaatactccgatcaatgtggtaatagaggtgatcagctgggtaatactttggttcagactcatctgcagggtatccacatcatttgttaccctggagagaatctctccgtttgtccgactttcaaaataatttaaaggcagacgattgatctttttggaaatgtccttacgcagactatacgtaacgtcattggaaatccctgtcattacaaacccctgaataagggaaaagcatgcacttgccacatataaggccagcgtgaataaaagaatctgaccaatttttgaaaaatcaatgccaccagatccgtttacctttcttaccagtccattgaaaagctctgtggtcgcttttccaaggatctttggcccaacaatattaaatatagttcctgcaatagcaaacagaaacatcagtccaaaacggaatttatatttacccatgtactggaacagacgactcatggctcctttaaagtccttggccttctcaacagaacgcataccatgcccgcctcccataggtcttctgcttctctcactcatgctaattcctcctctgacaactgagacattgcgatctgacggtaaacctcacagttcttcatcagttccttatgtgttccgataccggccatatgtccttcatccagtacaatgatctgatccgcgttcaagatagtactgattcgctgtgcaacaataatagttgttgcatctttggtactctcctttaaggcttttctcagattactgtccgttttaaagtccagtgcagaaaagctgtcatcaaaaataaaaatctccggcttcttggcaatcgctcttgcaatggacaaacgctgtttctggcctccagatacgttggtaccgccctgtgcgatcggtgagttgtacttttcgggttttgtatcaataaactctgtggcctgggcgatctgtgctgcctgctgtacttcttcagaagaaatgtcttcttttccgtagcggatattggaatcaatagttcctgagaacaggactcctttctgaggtacgtatccaaggcattcccttaactggtgctgtgtcattttacgcacatccacaccatccacctttacagttccctgcgttgcatcataaaatcttggaatcagattgaccagtgtactcttgccgcttcctgtacttccgatcacagccactgtctggcctttcttagcagtaaagctgatatcattcaacacattttctcctgcttccggatacgcaaagcttacatggtcaaattcaactgttccacgtaaactatcctgtggggcttccggagataccggatcttcaatacttccttctgtttccagaacctgattgatccttacagcagccacattggcacggggaatcataatggacatggcagtgatcaacaggaaggacataatgatctgcatagcatactggataaatgccattacatttcctacctgcatacttccgttatctacagcatgtgctccgaaataaatgatcataacggatacaccgttcatgatcagcatcattacaggcatcataaaagtcatacacctgttgacaaacaggtttgttttcgtcagttcttcattggcagtctcaaaacggtcttcctcgattttttccctgctgaatgcccggatcacaggaataccggtaaggatctccctagtaaccagattcaaacggtcgatcagagtctgcagctttgtaaattttggcattgcgatcttaaacagcaccaggatcacaagaaggatcagtgcaacagcaacacccaggatccaggtcatggatgcatcagtattcagtaccttgatcacacctccgatccccagtataggggcatacagaagaatacggaaggtcatagtcataacctgctgtacctgttgcacatcattggtacttctggtgatcaaggatgcagttgaaaacttatgatattcgttgctggaaaatcctataaccttactgtaaatatctccccgcagatcatggcccatccttgctgctacttttgaagaaagaaatgtcactgtcactgctgccagcatgatcaccagagccattaacaccatctgtgctcctgaacggatgatataatccatctgaagcttatccagatcttctcctaactctgtgtattctttcttaactgcaagtacagcactttggcttacgatagactccggcatattctccagtttttcattcatctcctgaagaatctgagttttcatctcctctggcatagctcccagcgcctgcaccggatctgtcccttcctgaagacccatgttctctgtcatcgctttgctttcatcactgccggaacacattccataatacagcatcatcggcttttccagaagatgatccaggttttctctttcatctttggaaatgccatccttcaacacataaatgtctttgtcttcttcataatacttttccacctgtttcatatcatcatcatccataaacacagatagtgctttcatggtagatgtacgcatcttctgtggaacattgtcttcaatgcctccctgctggatccctacattaatgatcctggatgtgtaatccggaagtgataaatcacagtatgcctgcagaaacaaaagtcccatgatcaggactatataccctgctgactttttcagatatctcatcagtttaaccattgcgtgtctcctttatatctttatttgtcactgttctgtaacctcacaaaactacctgttgaatagttacctttactttacaactacatgcttctccgacaaaggacatccttcttcaactattcccggcattgtattaatattttccagcagctgattaaaaaaacgcctcatcaggcacagctctgtctcagaaaaatttctgaacagatatttctctgtctcatgcatggtggcaagtcctttctggatcacttcattgcccttgtctgtcagacggatcctggtaatacgcttgtcatgttcatcctgcttcctgcataccattcccatcttttccagcctttgaatgctgaccgtcactgtaggcggcttcacgcccaaaatctgagcaacctctttctggctatattcttcatttttccccagaatggcaagaatggggatctgacttggatgaatctccagttccttcatcttgctgaaacactttcccatatatctcctgtttatttccaaaaacaaagcctgcatacttttttgccggtcctgtttttcttctccctccaacacctattcacctcctgtttcgtttcataaaatcaacctctcaaaagtatctcctgctgttttgctttattttccagccatcaccattattattcatttagtcggctaagtatataaaatatacttatgttttcgagaatgcaagtatttttttcagttttataaaaatttaacatttgttcgactaactattttctcatgaattatagaaatactacaacgtaattttctgttgcatatacataaaaaaagaggatgcctgatcagagcgtatcaaatactacctctgaagcatcctctttcttatgcctgataatgatcagataaactgattggtgtctgaatcataatgataatcaatctgatccagctggctgatcagatcctttttcttgatccccctgcaggtgcacaatgcctccagggactcataataatcccgcaactgggtattcacataacttagcaatattaccggatcctttggtatcatgcatggaatctccttttctgcctgttacagcatcattttctgtcatcaggagcgccctgcactctgacaacaaactctccattctccacatccagcacaagggtatcacctgtatgcacatctccagaaaggatcttctttgcagccagcgtctccacataattctgcagataacgcttcagcggtcttgcaccgtatacaggatcataaccattttcgatcacattttcctttgctgcctcagtcagagtcagggaaagttcctggtcagaaagacgtttatcaaggtcttttaccatcaggtctactatgttaccaatgtttgcttttgtcaagggcttaaacataattatttcatccagacggttcagaaactccggatggaaatgtgcccgcaggtcatccataacctgtttctgagcctctggtctgatctgaccattctcatcaataccatccagcagataaggagaaccgatattcgatgtcatgatcaggatcgtattcttgaagtccactgttcttccttgagaatctgtgatacgcccatcatccagcacctggagcagtacattaaatacatccggatgtgctttttctatctcatcaaacagtacaacactatatggttttcttctcacagcctctgtaagctggcccccctcttcataaccaacatatcccggaggcgctccgatcagtctggatacagaatacttctccatatattcactcatatcaatacgaaccatattctgctcatcatcaaacagcgtctgagcaagtgttttggcaagttctgtcttacctacaccggtaggtccgaggaaaaggaaggaaccaataggctttgtaggatccttgatccctgccttagacctgagaatggcatcggttactcggcgcactccttcgtcctggcccaccacacgtttgtgcagttcatcttccagggtaagaagcttagcacgctctccttctgtcaatcttgcaaccggtatccctgtccatctggaaataatccttgcaatctcatcatctgtaacagcttcatgaacaagacgtctgtctccttctttaacgtcacgttcctcgatttccagctgctgctgaagtcttggaagctctccatactgaagctgtgcagccttttccaagtcataactctgttttgctttctggatctgtttattcacatcttcaatctgctcacgcagcttctgaagcttttccacagactttttctcattatcccactgagctttctgggtattaaatacatccctcagatctgcaagctctttctgcaggtcagcaagacgctcctggcttaagttatccgtctcttttttcagggctgactcctcaatttccaattgcataatctttctgcgctgctcatccagctcagtaggcatagaatccaattccgtcttaataagtgcacaggcttcatctaccaggtcgatagccttatctggaagaaaacgatccgtaatatatctatgtgaaagagttgccgctgctaccagggcgctatctgtaatcttaactccatggaaaacctcataccgttccttcagtccacgaagaatagaaatggtatcttctactgtaggttcatctaccataactggctggaaacgacgttccagtgcagcatccttctcaatatactggcgatattcatccaaagtggtagcgccgatgcaatgaagttctcctcttgccagcataggctttaacatattactggcatccatggctccatctgtcttacctgctccaacgatcaggtgcaattcatcaataaacaggatgatcctgccttcgcttttccttacttcttcaagaacagctttcagtctttcctcaaattcgcctctgtacttggctcctgctaccaaagcacccatatccagggaaaaaatcttcttttccttcagaccttccggtacatcccctgcaacgatcctctgtgcaagtccctctacaactgcagttttacctacaccaggctcaccaataagaaccgggttgttcttagtcttacgggacaggatccgtaccacattacggatctctccatcacggccgatcaccggatccagtttttgatttctggccttttccaccagatcctcgccatatttggcaagtgtatcataagtagcctccggattgtcgctgaccactctttgatttcctcttacagtagataaagcctgcaaaaacctttctcgtgtaattccaaattccttccagatctttgtcatgcttggacttggatactttaacagggataaaaacagatgttccacagatacatactcatcccccatggacttggcttcatcctctgcatttaccagtgctttgttcagatactgtccaaaacgcagttcgccgccggatacttttactttctcgtccagtgctttttcaactgtattaataaaataatctttattgatatccatcttctcgatcagtttcagaatcaggctgtcttcctgcttcagaagggaatacagcagatgctcctgttcaatctcctgattgccgtaagaataggcaaccttttccagattctgcactgcctcaatggacttctgtgtgaatttactgatgttcatatacgttcctcctctccgaatccttttatatggaaaaactgccggcagacagcctccttctggaagctgtccatcggcatttcataatacgatcatccttcaatggaaatataacgtttctcttccacttccggcttagcctgtttctttggaagtgtaagctttaagatcccatgcttgaattcagctttgatctgctcattctcaatatcctcaccaatatagaagcttctctggcaggcaccagtataacgttctctgtggatataacgcccgctttctttctccctggaatcctgctccagagcctttgaagcactgactgtcagatatccgtttttctcttctactttgatctcatcctttgtaaatcccggaagatcgatctctaattcaaaactgtcatttttctctttaatatctgtcttcatcagattagctgcgtgatgtccatacagctttctctctgccctgtggtctgccttatcatcataaaatggaaatccaaaaacatcatccagtaaactgtctgtaaaaatacttggtcttaacataagtcatatctcctttcaatggacttcttactttatttattaaaattcttgttatctttataatccatttcctttgttctgtacgtaatataacacgcattgttagcactgtcaagaggtgagtgctaattcttttgtgaagattgtgtgaacgctacgagccatgcaaaatctctgtaccctgtataaatttcccaacataccatacctattcatataatgcatatcacctcttctttttttcatacttcagtatccccctgggaggcttgttttccccctctgttttgttaaaataaacataacacaaacaactgtgttatctaccaaataaagtgcattacctccgcatattgatgcacatttaattcaacccataaaaaaagtacttccgattccgcgggaagtactttttttatatcatatttagctcatggtcttcattcataagtgcaaacctggttcccagtagttctgccagatgccggttatgtgtaattgtgatcaatgtcttgccagccttgtgaaagctctgtagaaactctatcaacatgtcctgggtcttttcatccaatcctgccaaaggttcatccagaatcagcacctcaggattcaaagaaataatacatgcaagagagactttacgtttttctcccccactcagatgataaggcggtctttctcttaatttctctattccaaataacttcaggcaatcttctgtgcgctcatgaacttctgcatctgacagtcccatctgaactggtccaaatgcgatttcttcttctacacttccacaaaataattgggtatctgcattttgaaacacatatcccatctgctgatgaaaccattttgcaaactttctgtccttcagtgctttctctgtaattacatgtcccttataaagatactctccctccgaaggaaaaataatcccattcaacagcttgataagagtagattttccacatccgtttggtccctgaacaattacagaatctcctttttcaatatgaaggtcaatatatctaagggctatctcattctcatatgcaaaacacactttttccagatcgatcagactgtatttctgcttatgtcttatttcatacttgcccgtaaatccccgacagcacatagctgcatacatttcttctgccatttcacttgctttaagaaatgtaattccaagcacacctgaaaaagcgcttgtcttatccggattttcacctacagatctcaagcagactgaccgcagaacatccatacatatctctcccaaaacagaaatatatttcaatgttatatccagggtaaaaatgaatatcgtataaaacaatttaagagaaggagcagcagaaaatctgctgtccttcccttcattaaatctttattttgcaagtacagacaatacagatttcgtgcttttggtcagaaagaagtgtcaacaccccacctccggggataagaaagcattccaatctgttatatatgcctgttattttttcataggtggtcgctgctgtcccatgaatatcctatttctttcgctattttttcggctatatcaatatctaatatgtctcccacaagtcccagagtcatatccaacgcagcaatcgttgtactgcaggaataatatttcccatcggaaacccatttttcaccatctatatgatcaattcctactgtaaacattcgtttccagttttcatcataagcataatccgcaacctgtctgtgaaacaaaagtcctgtccttgcaagcattgctgatgcattttgaaccatcatgcaaaaagaagcttcttccacagcctgttttaacatctgctgccccttctccccttctgtatgaaggaagctcttaacaccttttcctcccggaatcaggaatatgtcctcgatttccagtggattcaaaggttctgtccatactttcattccttgttttcctgtgatcaggccgccacgcaatgaaataaaacgtatgtaaaaatgctccggcacatgcccaaaaacctccgtgggaccaaatgcgtccatcacctcaaactcatcaaacagaaaaacattgactatcataattcctgccctccaaaaattatttgctgcttattatagcttttccctgtaaaattgactcgattagtttctttgtatcatcccactgctgtaatctctttcttccctgatacagctgtaaattgtaattgtttttttacattacttattatactttatcttatttgaaaaggaaaccgtttttattgtttcatcctccctcttccttgttttgatggtgtataaataaagtagacagcctattctcaaagatttcatagtataagcaagaggataatgaggtgtccaattatatcacaaagtcaacgtaaatacaatcaagtacaaattgcaggcggttaagcttgcaaaagaaatcggcggttttaaagccactaaggattaagtatttcagaaggaaccattcatattcatacctggctttcaacagtcagaatcgacaaattgaatattggtgcaagattccatacccccgaatcagttataaatcttgcagaggaacttacgatgctccgtaaacatataaaagaccaggataagaaaattcgccgcctcaaagaagaaaacaagtttcttgaggaagccagtgcttttttcgcagcaaaccgttgaaagagattttacaaatatctgtcagtaaaagaccgtctgtggaaatagcttctgtcaaattaacataaagcacaaggcatggatttttcatttcatccatgccttttgaatctttaatcatcccgattaccattattaatatacaaaataatttactttccccaggacagtgcagatttaatctctattttttcagcaaatacagtctaggattttttataatcgcagaaccatcttttacataaaaagaaatattctttcctttgggcgcataagcacgtacattcaatgcagtattatttagataaagtgtaacaactgttccgtcaacaacaacttgtaataaatattctctttctgcttccaagaataatggtctgtcagatccctgagccatatatctaaaccacggtaaattaggtgtgcaattgaaatctacttttctatttttaatttcaatattaaatctatatgcatctccagtttctttttcttcaaaaagattcacaccaaaagcatgtgtgcctgctttaaaagaaactactgtttcaaacaaaaatgtttcttcatcacattcttcaacgataatttcattaattccgctatctatttcaattactttttctccaaaatgatttttagatggctgctctacaaatgcattatgtacactatctggcatctttactttcaagtcaccattttcctcttgtacaagctcatgtactactagtgttcctccccaaatccaattgttaatatccatatcttgatcttttgaagctacccagccgaacaaataacgatgctcactatcaccacaagatctagctgcataatatgctctaccatcaaaagcatcatcatcaggcatctgccatggtccgaaaatcgaacgacttttcctgtatattgttttattattttcactatactcggttgtaagtaaataccaccaatctcctatacgaaacaaatctggcatttcgtgcatactaaacatatttggtgcccaaaaatcccctttgaactcccaatgttctaaatcttttgatgtaaaatatactgtacaacctgttttaatttgtttatgattctgcttatgtgctcctaaaattaaaatatattcttttgaatcctcgtcccatgtaacatatggatctctccaatcattaggatcatatccaatttgaggaggaagttttaatttatcggctgattttgtccaatgcagcaaatcatcactagttgcatgcattaatacctgtgcagccttaccttcagctgcaaagtctcgattataccctgtataaaaagcatgatattgtccttctccttcaaatacacttcctgcaaaaatgaattgatcttgttctatatctttacctcgtagaaggacctcacccttatcttcataatgtacaaaatcctccgttatcgccagcgcccatccaaatggttccccaaatggtcctggatttcttgtatcccgctgatgatataaatagaattttccatctttgtaaaatggcatgcaatctccaaatgcatatccctctggctgataataaatattctgcataattcttctctccttaattataataatttatcctttaactgcccccatagtcattcctttaacaattcttttttgaatgaaaaaggatattataatgattggcagactaaacaagactgccccagctgccattggccctaattgaatattatattctgtcaaaaattcagacaatccaactggaactgttttggtaccagacattgttattaacaaagcaaataaaaagtcattcaaccctgtcaagaatgtaaaaatagcagttgttgccattccattcatagctactggtactattactcgaaaaaaagcactaaggttactacaaccatctactaatgcagcttcatccaattctcttggtatgccattaaaaaatcccatcatcatccaaattacaaatggtactcctatacatgcataaaccaatattaatgcaatatgtgtatctctaaggccaattttattaattaccgaataaatgggtacactaatacaaacaagtggtatcatacgtatcataagagtaagatacataaaaaaagatgataagcgagagcgaaacctagaaagcccatatgctgcaagagatcccacagttagacttatcaccgtgctgacaagtgctgcaattaaactgtttgctaaatattttccaaacgtcaaatactcaaacatatctttataattctgtatggaaatagggtttggaaaaaatcgaggttgtgtagatattacatccgatggttgtttcaatgatgttgatacagtaaataaaaaaggaaataaaaacataaacacaaatatcaaacaaattaaaaacggaaccagtcttttcaagctttttttcaccattatgcctccttcactcaactataattctgtgaaaccttcagtctagtaaaattcatagattttagattccatatctttaaaatttctctcttttcgtcaagaatctttcggtatatcgttcgatatttatggtaaagtcgattgaatataattcatattatcaactggaaattgattttacattagctgttgattgtggcgtcatactggctaataaaaattataatgtagcaatcttcgtaaatattctttatattgctcactctacctggaacattattgactgtttttgaaagcttaacatttcttactctactaaaattctccgtggcattaaattcggcaagaccccagatgccactttttgtgattaactgagccatcttttggattcaaacgataaggatttgattttttatatacatccctttaagccttcagtcatacaactcacttacaaatgtactaaaactagatctgtttaactgttcttatagaaacttgatattccttcattctccatttcggaacagtcttatgatttcctgtttgactcttagaactaagtaatttctctggattcaaagaaattgctattcttaatcctcatttggattccatactttcttaataaatattgatgccagcactaaaagtgcaagcataaatattactgccatagcacttgcttctcctacctgtccgaagcgaacattagctttatagatatatgtactaattacttctgacgaaaaattaggacctccttgtgtcatagcccaaattgtatcaaacgaacgcaaagcatccataacacgtataattattgcaattacaatattaggtttcagcaatggtagggtaatatgataaaacaatttaagtgtacccgccccatcaattcgtgctgcttcgtaataggtaggatctatcccttgcaatcctgctaatagcacaagcatcataaagggggtgcataaccaaatatctgctataatacaagaatataaagaaatctttggattcgataaccacataattgaatgtacattattaatgattccaagcttatacaatccccaatttataattccaaattgatcacttaataaatatttccaaactagccctgccactagtggagccatcattaatggcgttaacattaaagtacgcattatttgactccccttaaaacctacattcaacattaatgctagtaacaatcccaaaataaactctatcgtcaccgcaataacaacatattttacagtattagcaacgcatagtacaaattttggggaagtaaatacagcaagaaagttttttaacccaacgaaacttttaccatccatatttgaaatatcatatttgaaaaagctatccactactaatttgaccgcggggattaagaaaaacataagcatcattaccaccgccggcaaacaaaagataatgagcattttcttatcttttctcacctgaactttcctccctattccacaaatatttattcgggactgtcgcactagcaaatattttttgct

SEQ ID NO: 43 - DNA, 21471 bp, Unknown
  gut microbiota DNA sequence
cacaagcttcaaaaaatgcgtcagaaatacatggatatgtacaccgatgacctcattacacgtgaggaactgaatgaaaaaatcggcggcacaaaacaggaaatcgagcgtctggagaatgagttgaaaatggttgcttatcacctgacaaaaggtgaacaactggaaacaatcttgaatcgcacgtttaaagagattgaagatatttccgatgttcaccagatgaccaatgcacagcttaaacggattatccagaaaattgaagtagacaaggatggtaacgtagatatttacttacgaatcttcggtgatttaggcttagatgaaaccgttctaattagtgacaaccaaacataaagatgtgacagatcggctggcggtgattcgcccatctttggcagaacagacacggaaggtattggaggtgaacaagcaggaacgacatatccgtggcggactggctacaagggagaagtacctgcatcttcatgaaaaatatccagggcaggatgacggataaacatgtagcagccccgattccggggctgtagtatcgtgctgagatatagggcaagggttgaatttgctgggaagctattgtataatctgggtaattatttggtgagtaagaaggagaaaacagagataaattggaggtgcagcatatgcggctgacacaggtacaggatgcattacagaaaaagaagattaaatatgaatatacagaagtagacaattgcggaagtctggatttcttattccggggtctgaaatttcatgtgtgggaatatgaagataaggtctggggagcagaaaccaatgtttttgaagctggcagaagtcaggatatagaaggggattatgaagaagtgatttcaaaagaaatcctcagctggccggacatgctggcctgaacaggatgtgtgatgcgaaatgcaagggaaaacagcagagtaactgctgtactcttcctacatatgtgcttttttaaggaagtgtataatttggtaatatttagaaaagagaaaaaaggtatccgacgatttggattgattttaatctgcatgataatgatagggtgtacaggctgtggtaacagtgaagaaaaggcacagcaggcagagacagtagggccgtcaaagccttccggtgcgccagagactgcacaggaaatgccggaagaagttactgtagtaagaccaagtataactccatctttaagtcctgagccaacggctgcccctgcatctgtaactgcggtcagtgccactccagagataagcagtatgacagaaatcagtactactcctgttgtaagtatcacgcctccgccggaaatgagtccagtgcccaccataacccaggcgcctaccataactccggcgaagcgaaagtctgagcagtcttcggaagaaggcactttaagcagacctgaccatccggatacggtgacgaatgataagctgatctttgtgggagattccaggacagaagggatccgggacgcagtaggagatgacagtgtctggtcctgcctttcaggaaaaggatatgattggatggtgcagactggagtaccgcagatcgaagatgagatcgagaaaaacacggccattatttttttgatgggagtaaatgaccctttcaatgtaaataattatatcaattacattaatgaaaaggcctacgaatgggcggcaataggagcccagacatattttgtgtctgtaggaccggttgagaaggatccctatataaccaatgcgcagattgaaagctttaacacatctatggagaataatctttccggagtgaaatacattgatgtttatacccatcttgtggaaaatgggtatgctactgtggatggtctgcattatccggcaaatgtatccatagaaatatacaattacattttggaaaatctggaggaagtaagaagcggtatctggggatagaacaggcaggataatcagttttttgtgtctgtaacagggatttctttttggaagtctttggtataatgcatttcataatcgtctgtgataaacactgcctgaacattgtccagggattctgcataagtaagcccatcttctaatccaagggcaaaacaactggtacttaaagcatcgcccatcacggactgatcacagacaatagtaacggaaatcaagccgttctggtatggatagcctgttttaggattcaggatatgatggtaagatttgccattgtattggaaacagcgttcataaataccggaagatactacagacttattcgtgatatccataatggcttctgtttcattgcgatctgcaaaaggcttttggatgcctattttgaaaggagttccgtcaggcttttttcctatgcaaagaacatttccacccaggttaatgatcccgctttctacaccttgggatacaagatactctttaatacggtcagcaatgtatccctttgctacagcacccagatcaatctggatatcaggagaatcaaaggtaatgatccgatcccgcagatttatatgctgatagccacaggaagaaagggcagtgtgaatggcactgtattcaggtggaatcggattttcagctgtaaaattccaaagagatgtgagaggtgcaatggcaatgtcaaaggcaccttgggtagcttctgaataggaaaggccggtggcaatcagatcggcaaggggctgggatatctggtaggaattttccctgccatccacatgggaaagcttacggtgattcaattgataaagctcacttgtttcaagtgtacggctgaatattttttcatatttgtcacaaagtgccatggaatgatccagaaggatctgatcctgtgaatcataaattgtaatggtaacaaccgtgttcagcttcagggaggtttcctgaaggggctgggaggtatcttgggaattttgcagggagctgtctgtatttttacatccggataaaaagacagtgcacaacagcaaaagaataatataagaaaaatgtctgttcatatgaaatcgtttctttcctgcaggatattttggcgtaccttcctgcataaggaaagtataccagaaaaagaaggccaggcacagcaggaaataaaataagttttaaggggagattacgatggaaaaaggaactaattgtgagtattgtgtaaattattcttatgatgaggattatgagtgctatacatgtgaagtgaatctggatgaagatgagatggcacattttattacaggaaatttcagacaatgtccttattttaaaatgggggacgaatatcgggtagtgcgaaaacagatgtaaaagtatccggataaggtacagaagtgttactgttcacacaccactatcccgcgaggtgttttggcatgaatatgccaaaatcccgagacatacaagccaaaattccattgccgcaggcaatctggaatgaattttggctacgttactgtgaacggagtgaacagtaacacagaagtaacgggagatgcaaaaatttttaattaaggtattgacatatctggaaaaagatgatattgttctttagaacgctgccgaagacagtaggtgccgtatggcataaggtttaaaacgcctaccgaggaataagtattcttataagagattactggaaccttactgtcatgcagtaaggtttttatattgcaggaaagcatgtgctttctggtaataaaaaccctccgggtagagtctcattgtgacggcggtatatcaaaatctataaggaggtgtaccatttcatggcaaaagtagaactgaaacaaccaatcgtaaatgaaatttctgacagcattaaagacgcacaggcagtagttctggttaactacagtggtcttactgttgagcaggatacagttttacgtaaagagttaagagagtctggtgtacagtacaaggtttacaagaacactatgatgcatcgtgcatttgaaggtactgcatgcgaggatctgattcagcatttacatggaacaaatgctctggctatctctgatacagatgcaactgctcctgcaagaattcttgcaaaatatgcaaaacagtatccggctcttgagttagtagctggtattgttgaaggcaactacaatgatcaggcaggaattcaggcactgtcccaggttccttccagagacgaacttcttggaaaacttcttggaagcatccagtctccgatcacaaacttcgctcgtgtgcttaagcagattgcagaagcaggcggagagagcgcagcacctgctgcagaagaagcagctgaggctgaggcaccggcagcagaataatctggccggttatatcatgatcccctatagagggaaaaattcattattaataaaattataaaatggaggtaattgaaatggcaaagttaacaactgaagaatttattgcggcaatcaaagaattatccgtattagagttaaatgatttagtaaaagcttgtgaagaagagttcggcgtatccgcagcagcaggtgttgttgttgcagcagcaggacaggcagaggcagctgaggagaaagatgagtttgacgtagagctgacagaagttggcccgaacaaagttaaagttatcaaagttgttcgtgaagtaacaggtttaggcctgaaagaggctaaggctgttgttgatggcgctccgaaagcagttaaagagggtgcttctaaagcagaggctgaggatatcaaggctaaacttgaggcagaaggcgctaaagttactcttaaataatttttgccttttatgccccccgcaaatgcttgcttcgcaggtgtttgcgggggttctttttttgcctgcaaacagggaatagactgggtaaagctggaaataatataaaaaacgaaaaaaattgagaaaattggttgacagccttttttcgttgtgatatagtgaagaatgctatattatggcatgatatgcctactctgccctcgaaatctggtcagaaactcatatacagatttctgataggaggataggcaaagaaggcttagattgtaataaaaaataaaaacaggggtgaaacgtcaatggaaaaaaacagaattcgttctgtaaaaactggaaaaagcatgcgaatgagctaccagagacaaaaagaagtcctggaaatgccaaacctgattgaagtccagaaagattcttaccagtggtttctcgacgaaggattgaaggaagtctttgatgacatttctccgatcgcagattacggcggaaagctcagccttgagttcatcgattttacatttgatgagaaggatgcgaaatattccatcgaacagtgtaaagaacgtgatgtgacttatgccgcacctttgaaggttcgagtgagactgattaacaaagaaacagaagaaatcaacgaacacgagattttcatgggagatttaccgttgatgacagctacaggcacctttgtaatcaacggagccgagcgagttatcgtaagccagttagtacgttcccctggaatctattatgcaattgctcacgataaagttggtaaaaggctgttttcatcaaccgttattcctaaccgaggcgcatggctggaatatgagactgattccaacgatgtgttctatgttcgtgttgacaggaccagaaaggtaccgatcacagtcctgatccgtgcattaggtgttggtacaaatgcagagattgtagaactgtttggtgaggaacctaagatactggccagctttacaaaagatacttccaccaattaccaggaaggtctgcttgaattatataagaagatccgtccaggtgagcctctggcagtagagagcgcagagagcctgatcggggcaatgttctttgacccgagaagatatgatttggcaaaggttggacgttataaattcaacaaaaagcttcatttcaataagagaattgtaggacataagctggcagatgatgtggtagaagagtctaccggagagatcattgcagaagctggtactgttgttacaagagaactggcagatgagatccagaacgcagcagttccttatgtgtggatacttggggaagatgaccgcaggatcaaagtcctttccagcttgatggtggatatccgccattatctgcctgagattcaggatccaaaggaagaactgggtgttacagagttagtatattaccctgtgcttcagaaaattctggaagaaaatgacactcttgaggaaataaaggcagcgatccacagggatatccatgatctgattccaaaacatatcacaagagaagatatttttgcttctattaactataacatgcatcttgagtacggtctgggtaatgatgatgatatcgatcatctgggcaaccgccgtatccgtgcagtaggcgaacttcttcagaatcagtaccgtatcggtctttccagactggagagagtggttcgtgagagaatgaccacgcaggatacagagagtatttctccccagtctctgatcaacatcaagcctgtaactgcagctgttaaagaattctttggatcttcccagctgtcccagtttatggatcagaataaccctcttggtgagctgactcataaaagacgtctttctgcgttgggaccaggtggtctgtcacgagacagagccgggtttgaggtgcgagatgtacattattcccattacggaagaatgtgccctatcgagactccagagggtccgaacattggtctgatcaactcccttgcatcttatgcaaggatcaatcagtacggctttgttgaagctccgtaccgtaagattgataagacagatcctaagaatccgcgggttacagatgaagttgtttatatgaccgcagatgaagaagataattatcatgtggcacaggcgaatgaggctttggatgcggatggacattttgttcgtaagaatgtttcaggtcgtttccgtgaagaaactcaggagtatgagcgccagatgtttgactatatggatgtatccccgaagatggtattttctgtggctacagccctgattccgttccttcagaatgatgatgccaaccgtgcgctgatgggatccaacatgcagcgtcaggccgtaccgcttcttactacagaagcaccggttgttggtactggtatggagaccaagacagctgtagactccggtgtatgtattcttgctaagaaagcaggtactgttcttcgctctacatctacagatattacaattaagaatgatgacggaacaaaagatgattatcatcttacaaaattccagagaagtaaccagagcaactgctacaatcagcgcccaatcgtaaatcagggcgagcacgtggaggcaggtgatgtgatcgctgatggtccatccacatccaatggtgagcttgctcttggtaagaacccgctgatcggatttatgacctgggaaggttataactatgaggatgccgttcttttaagcgaaaagcttgtacagaatgatgtttatacatctgttcatattgaggaatacgaagcagaagcacgtgataccaagttaggaccggaagagatcacaagagatgttcctggtgttggtgatgatgctcttaaagatctggatgagcgtggtatcatccgtatcggagcagaagtacgtgctggtgatattctggtaggcaaggtaactcctaagggagaaactgaacttacagcagaagagagacttctccgcgccatctttggtgagaaggcaagagaggttcgtgatacatcccttaaggtgccgcacggtgagtatggtatcgtagtggatgcaaaggtatttacaagagagaatggcgatgagctgtctccaggtgttaatgaagctgtccgtatttatattgcccagaagagaaagatttctgttggtgataagatggccggacgtcatggtaacaagggtgttgtttccagggttcttccagtggaggacatgccattccttcctaacggacgtcctctggacatcgtgttaaatcctctgggtgtgccttcccgtatgaatatcggacaggtccttgagattcaccttagccttgctgcaaaggctcttggatttaatattgcaacaccggtatttgatggtgcaaacgagaatgatatccaggatacactggaacttgcaaatgattatgtaaatacagaggattttgaggagttccgagagaaatacaaagatatacttgctccggatgttatgcagtatctggatgagaataaagagcacagagctctttggaagggtgttcctatttccagagatggtaaggtacagcttcgtgacggacgtacaggagaaccgtttgacggtccgactaccattggccacatgcattatctgaagctgcatcatttggttgatgataagatccatgcacgttctactggtccatactccttagttacacagcagccgttgggtggtaaagctcagttcggtggacagcgtttcggagagatggaggtatgggcactggaggcatacggcgcatcttacacactgcaggagatccttacagtgaagtctgatgatgttgtaggccgtgtgaagacctatgaagctattattaagggggataatatccctgagccgggtattccggaatccttcaaggtacttcttaaagagcttcagtccctggcactggatgtgcgggttcttcgtgatgaccagactgaagtggagatcatggagagtgtagattacggagaaacagatcttcgtgctgttattgaaggagattcccgtggacatcgggatcatgaatcatttgcaaaacatggctacaccaaacaggaattcgacggtgatgagcttgttgatgtagatgaggacgaggaagaagattacgaagaattagaagaaaccttcgataatgacgaagaatagaaaggggaaagaatacatggcagaagcaactaataccaatgaaacatatcagccaatgactttcgatgccattaagataggactggcgtcccctgagaaaatcagagagtggtcaagaggcgaggttttaaaacctgagaccatcaactatagaacactgaagcctgaaaaagacggacttttctgcgaaaggattttcggacccagcaaagactgggagtgccattgtggaaaatacaagaaaatccgttataaaggtgttgtgtgcgaccgttgtggtgtagaagtaacaaaagcctctgtccgcagggagcgtatgggacacattgaactggcagcgccggtttcccatatctggtattttaaagggattccgtcccgcatgggactgatcctggatctttcaccaagaacattggagaaagttctttactttgcaaactatattgtactggatccggctgagtccggactccagtacaagcaaatccttacagagagagagtatcaggaagcaagggaaagctatggaagtggcttccgtgtaggtatgggtgccgagtccatcaaagaacttcttgaagctattgatcttgagaaggattctgcagaattaaaggctgaactggtggatgcgactggtcagaagagagcacgtatcatcaaacgtctggaggttgttgagtccttcagagagtccggcaatcgtccggagtggatgatcctgaccgtggtcccggttattccgccggatcttcgtcctatggtacagctggacggaggacgatttgctacttccgacctgaatgatctgtacagacgtattattaaccgtaataaccgtctgaaaagactgctggagcttggcgctccggatattatcgtccgcaatgagaagcgtatgctccaggaagctgtagatgcgctgattgataacggacgtagaggccgtccggtaacaggacctggcaacagagccctgaaatctctttccgatatgctgaaaggtaaatccggacgtttccgtcagaaccttcttggtaaacgtgttgactattccggacgttccgttatcgttgtaggaccggaactgaagatttatcagtgtggtctgcctaaggagatggcaatcgagttgtttaaaccattcgtaatgaaagaacttgttgccaacggaacctctcataacattaaaaatgctaagaagatggtagagaagcttgagccagctgtttgggatgtgcttgaggacgttatcaaagaacatccggttatgctgaaccgcgcacctacactgcatcgtctgggtatccaggcgtttgagccgatccttgttgaaggtaaggcaatcaagcttcatccgctggtttgtactgcattcaatgcggacttcgatggtgaccagatggctgtccatcttccgctttcccaggaagctcaggctgagtgccgtttcctgctgctttcaccaaacaaccttctgaaaccgtctgatggaggccctgtagcagtaccttctcaggatatggttcttggtatttactatctgacacaggaaagaccgggaagtattggtgaaggtaaattcttcaagagcgttaacgaagcaatccttgcttatgagaataaagcaatcaagctgcagaccaagatcagtgtacgctgcagcaaagaaatgccggatggtacagtgatcagcagtaatgtagaatccacgttaggacgtttcctctttaatgagatccttccacaggatctgggatttgttgatcgaagcattcctggcaatgagcttgttcttgaggtagacttccttgttggtaaaaagcagctgaagcagattcttgaaaaagttatcaatacacatggagcaacaaaaacagcagaggtacttgattccattaaggctatgggttacaagttctctacaagagcagccatgacagtatctatttcagatatgactgtgccgcctcagaaacctgagatgatcaaacaggctcaggataccgtggatctgatcacaaagaactataagcgtggtttgatcacagaagaagagcgttacaaagaagttgtagacacctggaagaagacagatgatgagctgactcatgcactgctgacaggacttgataaatacaacaatatcttcatgatggctgactccggagcccgtggttccgataaacagatcaaacagcttgccggcatgcgaggcctgatggcagatacaaccggtcatactatcgagcttcctatcaagtccaacttccgtgaaggtcttgacgtactggagtacttcatgtctgcacatggagcacgtaaaggtctgtctgatacagccctccgtaccgccgattccggatacctgaccagacgtctggtagatgtttcacaggatctgatcgttcgtgagatggactgctgcgagaatcgaccagagatttccggtatgtatgtgaaaggctttatggatggcaaagaagagatcgaaagccttcaggatcgtatcacaggacgtttttcctgcgagacgattaagaataaagacggtgaggttctggttaaagcgaaccatatgatcacaccgagacgtgcggcacgtatcatgaaggaaggcgtggataatattactggcggagctgttgagcaggttaagattcgtactatccttacatgtaaatgtaaagttggtgtatgtgccaagtgttatggtgccaacatggctacaggcgagcctgtacaggttggtgagtctattggtattattgctgctcagtccattggtgagcctggtacacagcttaccatgcgtacattccataccggtggtgttgccggtggtgatatcacacagggtcttcctcgtgtggaggagctttttgaggcgagaaagccaaagggtcttgctgttatcactgagatcaagggtattgccactattaatgataccaagaagaaacgagagattatcgtaacagatccggagaacggtgattccaaaacttatctgattccgtatggatcacgcatcaagatcgtggacggacaggttatggaggccggtgatgaacttacagaaggtagcgtgaatccacatgatatccttcgtatcaagggtgttcgtgctgttcaggattatatgcttcgtgaggttcagcgtgtatatcgtctccagggtgttgagatcaacgataagcatattgaggttattgttcatcagatgctgaagaaaatccgtatcgaagataatggtgacagtgaattcctgccaggtacattggttgactatttggaatacgaagaagtcaatgagaagcttgaggcagaaggacttcgtccggctaccggaaagcagggcatgcttggtattaccaaggcttctcttgctacagattccttcctgtcagctgcatccttccaggagactaccaaagttcttactgaggctgccatcaaaggtaaggttgaccatttgatcggtcttaaagagaacgtaatcatcggtaagctgattcctgccggaaccggtatgaagtgctatagtgatgtagaacttgatacaggcatgccagaggaaacagaagaggattttgccattgatgaggatgaggatgatcttccgattctggatgacatggaagaagttgagatcgacgacgagccggaggatgcttctgaggatctgggggaagatgaaattcctgaagaggatacagaagaataaatttcagcaaagagtgaaatccataagataactaaaggctgcggttcggagcaaatccggactgtggccttttcgtatctgtatgctgactgcagcttttaataggaaaatacagggaatgctatcttttgtgatatgattctagtataatactgtaaagaaaaagattcggaaaggaggaaatccatggataaggaattgccagcttctgtatggccagaatggaagattatcgaaaaaatcggggaaggatccttcggcagagtttacaaagcagaaagaacagaacagggaaggactttctattctgcaatcaagatcattactatacctggaagcccagatgaactgaacagtatccgggaagaaatatctggcgatgattcagtacgggaatactttcagaatcttgtggatgaatgtattcaggaagtaagcaccatggaatgtttccgggggaattcccatattgtttccgttgaagattataaagttgtggaatatcttgatgagatcggttgggatatttatattagaatggaatatctgatcagcttcactgagtattgtgcaggtaaggctcttacccagaatgaagtattgaagctggggtgcgatctggcaaaagctttacattactgcaggcagttgaatattatacatcgggatattaagccagagaatatatttgtatcgtattttggcgattttaagctgggtgattttggcattgccagggagctggagcgttctatgagcaacatgtccaagaagggtacctattcctacatggctcctgagatgtacagaggcgagccgtatgaccggcgagtagatatttattctttgggaattgtactgtataagctgatgaatgatggcagactgccatttctaagcagggagaagcagctgatcacgtacagggacaaagaaaatgccctggcgaagcggatgtcaggagaagaattgattccgccagttcatgctgaccaggctttttccactattattctgaaggcctgtgcatatcgcccggaagaacggtatcagacacctgaggagttttattatgcaatggatgatctgctgcatggacgtatggagacagattcggaaaagaaaccaaaagaaaagccggcagtggaaagcgaacggtccaagcctgtgaaaaagcattctaaactatttgataagatcaaatcagggccagacgaagtgaaacgaagacccgctttgtggagtgtattggctgccgggattgcactggtagcttgtataataacgattttatatgtaagaagcatgcttgaagagaatcttcctttacgcaaatccagccaggtagtaagcatcctggaggaaaacgatacacatacagcgcaggttgatgatttttccactgctattgagactataaaacagcaggcttccgaaatcgtcaatgagcttccggactgccaggaagtaggggaaaaaggcgaaagattaagatattatgatcagaacaacaagctggtaaagactttgatctatccagagatgtccgatgatggtgtttatgaagaatattattactgggatgaacgtctgttttttgcatatatttggacagatagcaagcaggaattatactattatgacagaagaggcaagctgattcgctggattgatgctgatgggatcgttcatgacaaagaaaccgacagtacagagtacaataagcggggagaaaaatactggaaaaattctctggagcagtttgacgaatagaataaaagaaggattgtaactgttcagtatccttacagttacgaaggactatagaatgaattacgatattgagtatgcttatgcttgtcacagaggaaaggtacgcagcaataatgaggacaatttctggtgctgtgggcacatgcttcctgaaataaatgatggatccggagaaatatccgaagaaaggtgttccagccggacatttcctgtattggctctttttgatggcatgggtggtgaaagctgcggagaagtagcagcaaagctggcagcagaaaggctgggcagttactatcaaaggaacagagcaaagctgaaacatcgggcagaagagtttgtacaggaagcatgcagggaaatgaaccgggctgtgtgcagttatgctgcaaagaaccgtatcagtacgatgggaacaactttggcaatggctgtttttgccggacagaagctgtatatgtgtaatgtaggtgacagccggatctatcaggaaagaaatggagcctttttcaggatgtctaccgaccatgttcaggggaacgggcttttcggaaaagctcctcttactcagtatcttgggattcctgaggaccatatggtgatccagccttctgtggcagagattgattgtcagccggataccaggatcatgctgtgctcggacggaatctcggatatgcttacagaagtggagatccaggcaatcctgaacaggagaaagaatgcatcagatacagtccatgatctgatgaagcttgcacttgaaaagggcggcagagataatgcaactgtgattctctgtcaggttcatgaaagaaaggcaaaagaacccataagggaaagattaaagaaagtattgcagctgtagggaaatgtcagggagcatttaaataaagaaggtgtttgatcatgaataatcggatgaaggatttggattttgaacagaccgttgtatttgatacagttaaggattttgaatttacaaggaaggcagcccagaggtttcgtcaggtggttgaattggatagttttgaagaaaaggatacggaggtaatctttcattatctttataaagagatggaattggtatcctttggagatcatctgaaaagatatatttatgagcgggcagggctggaagagccttttgcacaggttccacaggaggtttacagggagattgcattagaatcatttaaagaaacctgtacacctaagtcaatgaaccccacatcaacaaagctgccggctcttataaataactggctgacacaggcatctgtgaaacgtgatactgtattccttttaggattcggcctgcggatgagtgcaggagatgtgtcggatttccttacccgtgtgctgcgggagcaggattttgatttttcaaatccggaagaggtgatctactggtattgctatactcatcattacctgtatgcaaaggcacaggaatataaagaaaaatacaaagaactggtaccggctgcaatacaaaatgatacagctgcttgtgggggcggcctgatgatcgatacagaggaaaaactgatggaatatctggccggactgaaagctggctgggtagaccccagatctgagaagagccaggcatttcaggaatttatgaggctcctggagcaggcaaagcaggtcattgctgatctgtatcagaaggatgaagatgaaaaaggcaggcacagaagatggacagcagagaatattacaccttcagatctggaaaaggtgatctgtaatgggattcctatcaacaaaatggggaatctgaaaaaaatgtctgcctccattttggcaaagcatttcagccaaaagcgtttcagcaggcagaggatcacaaacatcctgaatcacaaatttccggtaaaaagatttgatcttctaactttggagtttttcataatttctcagaaaatgcaagatgaagatccttataagcgctatcatcattttattgaagaaggtcagaagcttctggaaaaatgcggtatgagtgatatatacatagtcaatccttatgaatgttttcttttaatgtgtatgctgacagattgtcctctggcagtcttctctgagatatgggagaaatcctacgaggggacagatgagagtagtatggaatcattatcgtgaaaataaaaaggttgaaaataaaaacaagaaaacatgtgaggtgcctgtaaaaaacaagaaaaaacatgtaaaatgccttgacagtctaatctttacaggatataatcaaaaagcgtgcgaaataaagcatattttttttgcatgtcaaaagataatagcaaccgcaaggccccatgttaagcatggagaaataaatcgggaggtgaaatggaatgccaacattcaaccagttagtaagaaaaggtcgtcagaccactgtaaagaaatctacagcaccggctctgcagaagacattcaactctttaagaaagaaagcagttgagcagtctgcaccgcagaaacgtggcgtttgtacagctgttaagacagctactcctaagaagcctaactcagctcttagaaagatcgccagagttcgtctttccaacggtatcgaagtaacaagctatattccaggagagggacataaccttcaggagcatagtgttgtactgatccgtggtggaagggttaaggacttacctggtaccagataccacatcatcagaggtacactggatacagcaggtgtcgctaacagaaaacaggctcgttccaaatacggagctaagagacctaaggttaaaaaataattcatccgtataattgcggaaactatagatatttgtacggtattccatataccctgtcggttgcgggttaaatataggaccattaccagtgcgaacatgcaatagtttactgcgtgagtaccgatgagataatctattgattaaggagggaagtaacgtgccacgtaaaggacatactcagaaaagagacgttctggctgatccggtatacaataacaaagtggtaacaaagcttatcaataacattatgttagatggtaagaaaggtgttgctcagaagatcgtatacggcgcattcaccagaatcgaagaaaaagctggcaaaccagcaattgaagtatttgaggaggctatgaacaatatcatgccccttctggaagtaaaagcaagacgtatcggtggtgctacttatcaggtgccgatcgaggtaagagctgacagacgtcaggctctggctcttcgctggctgaccacatattcccgcaagagaggcgagaagacaatggaggaaagactggctaacgagcttttagatgcaatgaacaacacaggcgcatctgttaagaagaaagaagacatgcacaagatggctgaggcaaataaagcatttgctcactatcgcttctaatcgaggaggaaaatccattggctggaaaagaaggtagagaatatccgcttgagagaaccagaaacattggtatcatggctcatatcgatgcgggtaaaacaaccctgactgaacgtattctttattatacaggtgtcaactacaagatcggtgatactcatgaaggtactgctaccatggactggatggagcaggagcaggaaagaggtatcacgatcacatcagctgcaacaacatgtcactggacacttgaggagaactgcaagccgaagccaggagcacttgagcatcgtatcaacatcattgatacacctggtcacgtagacttcacagtagaggttgagcgttccctgcgtgtacttgatggcgctgttggtgtattctgtgcgaagggcggtgttgagccacagtccgagaacgtatggcgtcaggctgacacttacaatgtaccacgtatggcattcatcaataagatggatatcctgggtgcgaatttctatggcgcagtagagcagatcaagacccgtcttggtaaaaacgctatctgcctgcagctgccaatcggaaaagaagatgattttaagggaatcattgacttattcgagatgaaagcttacatctacaatgatgagaagggtgacgatatttctatcgttgatatcccggacgacatgaaagaagatgctgagctttatcatacagaactgatcgagaagatctgtgagctggatgacgaattaatgatggaatatctggaaggtgaggagccgactgttgatagactgaaagctgttctgagaaaagctacctgtgaatgtacagctgttccggtatgctgtggttccgcttacagaaacaaaggtgttcagaagcttctggacgctatcctggagtatatgcctgctccaacagatatcccgccaatcgatggtgttgatatggatggaaacccgacagtaagacattcttctgatgaagagccgttctctgctctggctttcaagatcatgacagacccattcgttggaaaacttgcatacttccgtgtatattcaggaacaatgaattccggatcttatgtatacaactcaacaaaaggcaaaaaagagcgtgttggccgtatccttcagatgcatgccaacaagcgtatggagctggacaaggtttactccggtgatatcgctgcagcgatcggattcaaattcaccacaaccggtgatacgatctgtgacgagcagcatcctgtaatccttgaatccatggaattcccggagccggttatcgagctggctatcgagcctaagacaaaagctggccagggtaaacttggtgaggctcttgcaaagcttgctgaagaggatcctacattccgtgctcatacaaaccaggaaactggacagacaatcattgctggtatgggtgagcttcatctggagatcatcgttgaccgtctgcttcgtgagttccacgtagaagcaaacgtaggtgctcctcaggttgcttacaaagagacaatcaccaaggcagttgatgtagacagcaagtatgcaaagcagtctggtggtcgtggacagtatggtcactgtaaagttaaattcgagcctatggatgccaacggagaagaactgtacaagttcgagtccacagttgttggtggtgctattccgaaggaatacattcctgcagttggcgaaggtatcgaagatgctatgaaggctggtatccttggtggatatccggtagtcggcgttcatgcaaacgtatatgacggttcttaccatgaagtcgattcttctgagatggcattccacattgccggatctcttgcattcaaagatgcaatgcataaggctgcaccgatccttcttgagcctatcatgaaggtagaggtaacaacacctgaggattacatgggtgatgttatcggtgatatcaactcccgtcgtggacgtatcgagggtatggaagatatcggcggtggcaagatgatccgtggatatgttccgctgtctgagatgttcggatatgcaacagacctgcgttcaagaactcagggacgtggtaactactccatgttctttgagaaatacgagccggttccaaagagcgtacaggaaaagatccttgctcagaaagactgactcaggactggttactgtaaacagtaacttgtatttgataaaataaataatgcttgcaaatatccttgatttgcaatataatcaaggatagcaagtttaaaatcgaaattggagctctgtatagaaagagccaatattcaaggaggacgttttaaaatggcaaaagctaagtttgagagaacaaaaccgcattgcaacattggtaccatcggacacgttgaccatggtaaaactactttaacagcagctattacaaaagttctgtcagagagagttgctggtaacacagctacagattttgagaacattgataaagctccagaggaaagagagcgtggtatcacaatttctacagcacacgttgagtatgagacagagcatagacactatgcacacgttgactgcccaggccatgctgactacgttaagaacatgatcactggtgcagctcagatggatggtgctatcctcgttgttgctgctacagatggtgttatggctcagacaaaagagcacatccttctttcccgtcaggtaggtgttccttacatcgttgtattcatgaacaaatgtgatatggtagacgatgaggagcttcttgagctggtagagatggagatccgtgagcttctttccgagtatgacttcccaggagatgacatcccggttatcagaggatctgctcttaaagcacttgaggatccgagcagcgagtggggcgataagatcatggagcttatggatgctgttgacagctacattccagatccacagcgtgacacagataagccattcgttatgcctgtagaggacgtattctctatcacaggacgtggtacagttgctactggtagagtagaggctggtgttcttcacgtatctgaggaagttgagatcgttggtattaaagaagagacacgtaaagttgttgtaactggtatcgagatgttccgtaaattactggatgaggctcaggctggtgataacatcggtgcacttcttcgtggtgttcagagaaatgagatcgagcgtggacaggttcttgctaaaccaggaacaattacatgccatacaaaattcacagctcaggtttacgttctgacaaaagacgagggtggccgtcatacaccattcttcaacaactatcgtccacagttctacttcagaacaacagacgttacaggcgttatcaaccttccagaaggaacagagatgtgcatgcctggagataacatcgagatgactatcgagctgatccacccaatcgctatgagccagggtcttactttcgctatccgtgaaggtggacgtactgtaggatcaggacgtgttgctacaatcatcgagtaattttagcataacatcttaattatatatattgagtaccgtaaggtacattgtgtccaaacgtaagataccccggaaccgcaaggtttccggggtttttctgttgagtggaaagtaaaatcacctatgagtt

SEQ ID NO: 44 - DNA, 24941 bp, Unknown
  gut microbiota DNA sequence
acctatatccttcatattccctgtattttctgcaatgcccacagccagcaaacctgacagcaaggaaagacacagccgggtgctttttctccttaaccactttctcaccttttgtacctcctgtttctttcccttaagtattccctgttttttcctgtttattctgccctggaaaatccacatggatctgctctccttccacacggatcaccggcagcttctgtagttcttttcctgtataaaaatcataataaatgtcccgcaaagtgatcccatcaggtcttctgtcccactggttattttccatgatcccctgtacccattctccgagagagctttctgtaccggacctccagcttacagccctctggccgctttccgcctgaaatacgtaaatattttcccctacataaagctcctgcctcagataatctgccaagtgcctccagttttccctttccagcatggaattaccaagcaccaggatctgcagatgtcccagatccagatattttccctgtgacctgcgatagacctgctctatttcagaaaagctgctgcccgagacagtcagactgcccacgccttcctctcctgccttatcctgcccggtagcccgcatcatatccggcattccatatgtgaaaacataattctttttttcatccagatctacgcctaatgccaacggataaattcttttttcaggctcaacacctccgcatccccctgcaaataaacacatactcaaaaccattcccgcagctgccagaccttttttcttccattttcctcggttccgcaccatcaggaatatctgcagaagcaatagcccgggaaggaaaacatactccagatagggctcaaaaatctgcccgataccaagcccctttactttcgtcagggaaacagcatacgcagcacctgccagccagtatctaccggttccaagcctggcatttttcaggatctgatcaccgtaatgaagaagacttcctatagaaaataaaagcccaaacaccaggattcccatccagatcacatcaaatctcgccagcacattgcccggcagattggcacctgccaaaagaggcagcaccggatattcctcctgcaaaaccctgttccatccaaaaacagcgggcagaagcagctccattcccacaagtatcccgcccagagtcaatatcccacaggccaggacttttccgctgctgccctgcttttccacgcaaggcagggaaaaaggcaaaagcccgatccctgaaaaagcacacaactgaatataaaatccatctttaaactccagacctgctgcaacagaatcctctatcatctgtacaagataatccttccttccctgaaatgcggtcagtaccataagaagaataactgctgccaaatacaagccgccgcttgctcctgccatacgcccccgtctttgcatccctttatgggtgcccatagcacacaccagcactgcaagaaaagcgatccattttccgctgatctggtttgtcaggctctccggtacaatcactgcaagcatatgcagcagatatccgcaggttaagatcacatatactgacaaaaacaaggcgatcacaatgcctccccctgtccctgcatattttttcagatttgtgcaaaaaggtgccagccggatgagaaataccagataaaggaacaacaggatcaccgctgctaccgtacccaggatcccccagattcctgcaggtcttccttttccaaaaagtcccagaagtaacggggatgtaaacgtaagcaggatctggaagtaaagctgtttgtgagaaatcctgttattttctttcattttcattactgttttctccttttcagccggattctttcttttctgctggcaaacacaggcctgtacctgcgaagccgaaatggtatccggaaaatgccgtcccctactccctgggctttgttcttcctggtaaacgcaccaaggtaaggaaatccaaagcttaaaagccccgccagatgagagattaccatgtagatccccagcaccatcccgtaaatacccagatagccgccaagaaacaggaaaaaatatttaataagccgaaaagcagacgtaaattcttcatttggaattgccagtgaaccaagcgcagtaatcgctacgatcattaccacgatgggacttaccagattggcctccactgctgcagatcctatgatcaggccgcctacgatccccatggcatttcccagtgttcccggtatgtgtacccctgcctcccggatcagttcaaaccccagttccagaaacaaaagctctgccacactggaaaaaggcacgccttcccttgcctgtgcaaaagacaggatcagattggccggcagaacctgagtatggaaccggatcacagccagataaagtcctggaagcagtgtggcggccagcattgccagataccgcatgatccgcagaaatgaagccatctcaaaccggttataccagtcctcgctgctttccataaagcctgaaaaagttcccggaaagattaaagcaaaaggggaattgtcacaaagcagtactacttttccgtttaaaatctcctgtgccgcccgatccggccgctctgtagtctgatattggggaaatggtgaaatccaggaatcttctgttagctgctccagcatgccgctgtccaggatcccatccacctgaaaggcttccatccgctcccgtatctcatccagaagttcttcccgtaccagatcttccataaaaagcatatggatcagggtattggaacgaacacccatataatgctcttccaccttcattctggtatcccgcagcctttttcttaccagtgcagaattgatctttacactatcagaaaatccttccttggatcctcttagtaccttttccgtttccgtttcagacacgcccataccaggatagccggtgcttgagatcttcattgcctgatcaaatccatccaggaaaaacaccgcattccctgccagcagtgccgcaaaaacttcctgcattgtagatagtttccctgctgatgcaatgccaaggctgttgttcttcacaaattcccggatctgttccggaggaatttcccagaagtgattgatcatttttccaagtgccgaatcctccagcatcatattggcggttgccacttccagataaaccatcaggcagtctgctttccgctcttttcccagccgcataggacgtatcacaatatctccgcagttttcacaccgtttccttatataagcctcgttttccctcagacttaccgaaacctttttctcctcttccgttttgctgttattcttatccaccgccattcctccataaaacataaaaaaagagagacttttacatctctcttagaatttccagatatttgggttttatgcaggaacagcagcagatctatatctttaataaagcagatccacctgtactaatacggtgaaaacaactgcagatcactcttctgtctgaatggaagaaatgatccccttgcgctgattctccagatgctggtaggaaagctccctggcctgtcccacattacgttcccggatcgcctgtgtgatctcctcatgctcttttacaagaagattcctcgtttcttcttccttcagatattctacccggtagcggtagatctgttcccgaagattgttcagtacctggatcagccttttattgtcagaggcctgataaatgatctcatgaaaagccacgtcagcctctgccatcttcaccagattcccctctgccgtagtctgctcaaaagccttggcagccgcccacagcttctcaatatcctcttctgtcatacgggcgcatgccttctcaatggccatattctcaagaacgatgcgcacctccagcacatcattcagatccttctctgtaatgttagcaacctgtgcacctcttcttgggatcatgactacaagcccctccagctccagcttacgcatagcctccctgataggagtccgactgactcccagcctctctgccagggcgatctccatcaatctctcccctggcttcagctcacctttcaggattgcctgcctaagggtattaaaaacaacttcccgcagaggaaggtactcattcatatctgccgaaaaatcacttgtcattggtagttcctccattccggttgtatacttctgtagcaaatactacttttgccagatggctgtcccgcaaagctgctgctgccttttccatctgggctgcatcctgaaaaatgccgaatacagtaggaccactgccgctcatcatagctttcatggccccatactcttccatcagtctgcggatatccccgatcacaggataccgcttctggatacctggctcaaatacattccccatcctggatactatcccggtgagatccccagcccggatatcacggatcataccatcaatatccggatgtaccgaaacggaagtcaggtccaaactttcatatgccatcttggtagatacacttaccgagggcttgccaataagaacatagcatctgggaagagcaggtaatgaagtcaatcgttccccgatcccttctgccagggctgtgcccctcatgatacaatagggcacatctgcaccaatctgtacacttcgctccatcagctctcggtctgtaagccccagctgaaacagccggttcactcctatcatggctgctgctgcatcagaactgcccccggccatccctgctgccacaggaataaatttctccagcttaatggaaagcccttcctgaacttcgaactcatccatcagcagcttagctgctttatatgcaagattccgctcatctgtaggcacatagggcacattggatgtaaggctgatgcctgatgttttctttttctttatttccagcagatcatacatctgaatggtctgcatgatcatttttacttcatgatatccatcagaccgcttccccagaatatctaatccaagattaatcttcgcatatgcacgtaatcgcataaaatcccccacatcttttgtactttgtatacaatccattttaaatgagttttgtatttatttcaatacatattttcatggggaattatactttttttaccaacaataatggctgccccggtgttaccagatcatctgccagttcattcatcctgatgatttcctcttttgtggtataaaattttttagcaatatcccacatactttcccctggttttaccatatacacggtgattcccgccatactttgtatttttgccatgtcgagaggcttttcctggatcctgtcaatgatcagttcttccactggctgctgcaccagaacattcaggccaagaactgcacggatctccaattcgttgctgtctgccatcatagtagagagctgctccagctctgtctgcagataataggaacatccctcacggattccctgagcttcgatcacatgggtaaatgggatcattccctccatagaatacagcggcatttcatcatttcctaccacatacagcactttcaaaagcaggaccccttctgcctggataccattttccacaatctttgttttgtcgatttttatcgtgccctgactgctgcacagctgcaggatcttaccttgggtctcctttacctggatccggtctgttaccctgcacttagaaaagtttcgtaccagaagcccttccagtgtttctgttttcccttgagaaatacactccttaagaggggaatatacatcctgtaccaattggtgttcctcttccctgtaaagcttcagatccagttccagtaccacatctgcaaccaggatccgctcttccccgtctgcatctggctttacctccagtgactgatgcatcacccaggtttcaatattcggaatcatttcctcctggcatccgctgcattctacttccctttcaaaaggaagggcatattctacccactgcagggtatttccttcatcatctccggtatacagggcaaacaccgccagttcccctctggcccgaaggagatggttttccggccgcaaatccagacctcttaccgaaatggtatgccacaacagatttcctatattgggcttattggaagaaatggtcatttcatcctttatccgcaaagtatctttcttatgtaccatcaggctcatcagatgaatctttttcttttttacagaaacattctcttcgcaaacgtctacaggaatcagaatccctttcatttcatccacaactgcccgtaaggtaacaatggcttttatattcagcttcctggaatggatcacatgtatgctcagatcttcaatctcccacttcaggcagattttatccccactgacgattccctccaggttcaaagtctcctcaaaggacagtttagctgtcagactgtgcacttttccggcttcttcccccacatacagcatatctgccagcagatttccttttataaatgctttcccctcacccaggcgcacctcatccatggaaacctcacctttactttggatcatcctgccaatatccggttttacatccggcacattataatccacatcaaaagtcacctgactggtggccttgcttttgatccgcagcatctgaacactttcttttcttaattccactttcccctctccttcctgcttccctttacaaaaatctttttacaaaaactccactggatcctttcggttttgcatcttaaccacaatgtaagggcaggatggaactcctgacgccttttccagatcctccggtcccagcagcctggttttaaaaaacactccgttggaggaacagctcaattctttcacctgaatgctgtacccgccgctaagctgctgtccgtagccttttaccagatacatctccccgcctctttgataagtcatttgcatttttccggttttacgctcccggataatcgctgccagctcttcgggtatctgatcctgaccgacgatttcatattccagaggctgcctttcttcctcccggatcttgacgaatctgcagcctgaaagcaaaaccagcattaacagcagcagactgatcagcagttttctccttcccatggcaaacctccactggtctttcactattcattttatgcggtactctgccgtttatgaacacagtattgactttccatttttcccttgctagaatgaaattcaggaaaactaaggagccaaaattatgattcgatttatactttgtgtaacctatgtagtggtatttcttatcctttccattccccttcttatcgctgaatggatcatcgggaaattttcaccatctgccaaggatatcagttcccttagaatcatccaggctgtatttaagggtgttctatggatctccggagttaaggtcacagtgatcggcgaggagaatgttcccaaggacgcaccggtcctttacatcggcaatcatcgcagctttttcgacattccgcttacatatcccagatgtcctatccgcacaggctatgtagccaaaaaggagcttgagaaggtacctcttctttccagctggatgaagtatctgcactgtcttttccttgaccgtacagatattaaacagggactgaaaaccattcttactgctattgagaaggtaaaatccgggatttccatctgtattttccctgagggtacacgtaataagaatgaaaaggagacagatcttctgccattccatgagggaagcttcaagattgccacccgtgccaaatgccctattatcccaatggcgatttccggttcagtgaatttgtgggaagctcattttccaaagatcaagccttgccatgtagttattgaatacggcaaacctatttatgtggatcagctggataaagagactcagaagcatatcggagcatacacacagaacatccttctggaaatgctgaagaaaaatgaatatctgatataactgtttggcaggcagttcccgacagtgagcatctgatttcaccggtacacatccggtaatatatgaaaaggagcacattccataccctttactgtatgagatgtgctcctttttatgatcaatccagtttcaggatcagttccaggatcctctttgcacaatgctccagatccttcctgtccaattctcccagatccatggctcgcttcactctttccgggaagccgtttgccattttcaagtcgtttcctgctttaatctctttgtaatgttctcccctggtccaccaatccgtagtaaccattcctttgaaggcccactctccacgcaaaatgtcttccagcaattccttacattccgaagccctgtgtccattgataatattataagaggacattattgcccatggatcagcctcttcaacaataatctggaaagctttcaggtagatttcacgaagtgcacgctcagatacccgtgaatcgctgtgctttctgttagtttctttattattagccgcaaaatgctttacagtagctgcaatatgcctggactggatcccacgtaccatggctgctcccattttacctgctaccagcggatcctctgaataatactcaaaattcctgccgcaaagaggatttctgtggatatttactgctggagtaagccatacgccgatattattttcctttacctctttggctccggcctcacctatcatttctaccagatccgtattccaggtacatgcaagaagtgtagcgcagggccatgctgtagtgcagatcccgcactccggtgcgatcctgagaccggccggaccatctgcagtcataatattaggtactccgtatccgggaagattaccgaatccaaaggtattcgccactcctgtattaggctgtccacctagaagctccaacaggtcttcttctgtgagctggtttataaactcatccatcgtcagtgttccttctgccacctgtataaactgctttggttcttcttttctcactccccaaagctttctccgttcccatgcacggataaccggtgtaagcccttcctcgcttccaggatgcattttttcaaaaacacatgcattcggatcattggcttccattaatggcaaagcctcataagtaccgtcagacagcatccttctcttcagattggacggcaccagctttgccataagctgctttgtaactttatcttctttttgctcccagctatatgttgttttttctgtgtttcttacagaagttcccacataaaattcataggttcctttttccaggatccaggcagatttacggatcttacccagatcatcataagaagccatctcatctgctttgaaggaaagcttcagaatctggctttcccctgcctgtaaaagccttgtcttctcaaacgtgatcagctgacggaatggctttttaagcagtccctggggtgcctgaaagtacacctgcaccacttcttttcctgcccgcttccctgtatttgtgacccttacataaataaagatcctgccttctctttcttctgtttgttctgtctgtacttcaaagtccgtataggaaagcccatatccaaagggatatattacttttgcagcagcaccggaaatggtctcaaagtaccgatatcctacatagatatcctccgtatagtccacatagtagaaagactcatgaaaggtttccatagagggatagtcttcagctctccttgcaaaggtgtctgtcagctttccggatggatttatctttccacaaaggatctctgccatggcaagaccgccttccatgcctccctgccagccaagaagtgcactgctgatctgatcattttctttgatccatgtagtgtccacgatcccgccaacatttaaaactactgcaatcttgtcaaatgttgtttccacctgacggatcatcttcttctcattttctgtaagataaaaatccccatccgggaatacctgctgggagatcttgggcatggtcagttcgccctgcggcagttcatcatcttcatccctgcattctataccagaacggtcccatccttctccagaaaaacggctgatcacgatcacggcagtatctgcaaaagcctttgctccttttaacagcccttctggaagcagcggctctacagtcatcccaggagcagttccctgttcatactggtggtgcacattttccctgtaataatctgccaaaggttcatatatgtctactataccggtctgcattttcagaccttcatataaattacgaatataggaaacagttacgtctccgctgccgcctccacctttcacataatcaaaggtaccctttccgaaaagtgccagtctggttccttttgccaggggaagcagatttttttcatttttcaaaagcaccattccttctgttgcagcttcttttgataaccggatgtgttcttcgcatgctgttacccgatggttttcttccaatggaagatttggctgatacagtgcccgtgcccattttttcacttgtattcctccttcgtattcattggtgttcatcaattgacatttatttctcatcacctgtaatgatgagtgctatattttgcaatcattataccagtgaacaattcatacctcaatgattttatgattacagtgattgtgggagtgcaaagcacggaacaatccgtgtaatcatcaaaaaaggtatcataagatggggcagatacataatgattttcatcttgatatctgtctgctttcttatgataccctataggttcttcagaccaaaatcctgtttattttataagctatctataatctcactgacctgaagtgcgcagtctcccaacggaatccatgcttttgacaatcggatcagacatgcttcatctggtgtttcctccggatgtgccaggaaatcctgggcaagcttaaatatctcccgctcgtccgctgttgcagggcgactgtctctggctccctgcaggcaatttgcctccattgcctcttcatcgatcagtttctgaaaaatcccggccatttcatctgtagaaggtctttgccatgcagcaaggaaaatgcattttgcaatctcctttgtgagaaaaggctcacattgtaccatctcaaataattccataaaccgttgtctgtgtaatgccgaaaaaaagcagtgatgtttagatatttcatctacacaggaatctctccaatccattttctattcctcctttgcagctctgatctgcccaacttctccgacagaaatcttcacttctgcattctccccgtcaccctcaaggctctttgaatacacagcataataccatagaaaatgaatttttgcatttacaaatttctatataaaagccaaatctttttggttgtttttcctaaatttcagctatcatttttgttcaaatagctcaatttttgttctttaatttcttcatttgcttctatcagctcctgccagacaatttgggcaggcatttcaaaccgttgaacggtaatgcaaaatcacagtgctatttttttgttctatttttcggacaacggtttttcaatgtctgactatttagttttcatcaccgtattgtacactgtgcagttgggttattgttgttgcacggaaataatacgtattggatgaatttgttttgtcaagcaggttatttctaatccggtaccataccattattttcctgtgaaatttacattacatctttaatacgaaagattttctcaaaaatcacttaaaatctgcaatttttttattgttttttagattttttctgtccctgcctcttcttcgttcagatccgggcattcattccctgggacattgtctacgatcacattagtctcatcactaaataagtatgtaatggtttttacaacataattcctgtttgtttcgcttatcatgcttgcagccaacacgccaagaaaacatacaatggcaaatcctgtggtctttactctcctatgctgctgcaccactttgttatacctgttctttcctgcatgggttttttcctttgattcatcctcatcttccctgtataccccttctgctttcaggcgctctaccagttgcccataaaaagcatggatttcctcatctgtatataatctctgatctgataaatcatcctcatccactaatcgtctactcatttttttctcccggacattcatctgtccttgacaattcttccacaggggttcatatttatcttaatacatctgccagccgattatttattccggctggactttctaagaatttccaggaggcccctatgaaacatattgtactcaccggtggcggaaccgccggccacgtaactccaaatattgctcttattcccaagctccaggaaaaaggattccagatatcttatatcggttcttataatggtatcgagaaaagcctgatccaggaacttggaattccttattatggtatttcctcaggaaaattaagacggtactttgacatcaaaaatttctctgatcctttccgggtactgaaaggatatagtcaggctaaaaaactgatgaaacagttaaagcctgatgtagtattctcaaaaggtggtttcgtcacagttcctgtagttctggctgcaaaaaagcgtaaaatacctgccatcatacatgaatccgatatgaccccggggctggcaaataaattgtgtctttcttcagcaaccaaaatctgctgtaattttccggaaactgtttccacacttccagcagataaagcagtccttacaggaactcctatccgtcaggaactccttcacggtgataaagaagctgcccgtaacttctgcggtttttcctctgacaaaccggttcttctggtcattggcggcagtcttggtgctgcctcagtaaatgagaatgtacgcaagatccttcctgagcttctgaaagaatttcaggtgatccatctttgcggcaaaggcaaaaccgacagttctcttgaacacaccgcaggatatgtacaatatgaatatataaaagaagaacttcccgatctgtttgctttagccgatatcgtaatctccagagccggtgcaaatgccatctgcgaacttaacgcactggccaagccaaaccttctgatccctctgtctgccaatgcaagccgtggtgaccagattctgaatgcccgttcatttgagcgtcagggctatagtatggttcttgaagaagaggaaatcacagaatctgtgttaatggattccatccgtaaattatatgagaaccgcaattgctacattgaagctatgcaaagcagcaagcagttagattctatcaaccagatcgtttccatcatcgaaagctgtattgcctgatcagccgaaactatcataaatcctggtatattcttccatcaaccattgttttgtcctgtaaatacggttgtttacattattttttgaaatcttgtataccaaggcaaccctttcaggaggaatatccaggatttttattgcaacataaatctcataattctttttatttttctttctgaggttttcaagtgccttgaacatgtacttctttttctccacatcaaggaattgctcctccacagactccaggcatttctcctgtccaatctgatccatctgaaagatttcccgttttgtgtaatttttcctcagataatctcttgctttatttacagcagctttggctaccaatccttgcagcctaagttcactgctgcaatccagagcatctttgatcttgtataaattgaaaaatgtttcctggctgatatcttccgcaacaacatgactctttacaatcttatttgctatccttgttgagaattcatagtatttttcgtaaaattcctggaattccgcattattcatatacttgtcctgttctgatcagccatcccatagatgtgctctatcaacctctgatttttgccagtatttcttcttttacttcatcagtcaaagttcccggcgtccatgttactcccgcatgatcatctttatatcttggaatcaaatgcatgtggaaatgaaaaacagtctgacctgcagcttctccattgttctgtacaatattaaatccgtcacagtcaagagcgtctgtcagtttacctgccattttttttgccaggagcattgcttttgcagcaagttcatccggtatctcataaatattagccacatgactcttgggaatgatcagagaatgtcctttacttgcaggtcccaggtccaggatcacacgaaaatcctcatcctcatacaatgttgcagccggtatctcgccatttgcgatcttacaaaaaatacacgtttccatctttcattcctcctgttattttctttatgtataatgaaatgcattccagactatatagcctctctatgcatacattagctatgccgtgaccccaactctgtagataatgagaaacaaatcagtatctttgtcaggaatcattcgtaaatgtcggattatctcgatatttttactacgatattgcttgctgtcagagtattaccatgatacacttccaattgaggtgataatatgacaaataccactaccgaacagttaaaaaaccattttcggcttacactgtcaaaattttctcacgaaatacgaaatcccatttctctgatcaacagcgaactgcttctgatggtatccactcatccggaacttgcagattatcaggaatgggaagagattatggaaaatatggaatatataagagagcttctgaatgatctgtcctgctacagcaatgccgggcatatcaaactggaacttacagacctgagttcttatctgtcttccattatttcctcggtaaaacctactttcgattatcttggcattaactttgcagcggattgccctgacagccttcccatacttccagttgaccgaatcaagctcagacaggcgattctgaatcttttgcgtaatgcacaggaagcagttccttcctctggaggcaagattaccttccgtgtccatgccagtgcacaagctgtctgtatttctgtcatggacaacggatgtggtatccctcctgaagtacaaaaagatattttttcacccttcatcaccttcaagtccacaggcagcgggcttggacttgctgttacaaaagaaattgtggaagcccacggaggcaggatcgatctcgaaagttctcctgatcagggctcggtcttccgtatcatccttactgtccctttccctggatgatataacagcaaagctgccaagaagccacaaatcaaaccgcccacatgagcagtattgtccacccctgtacttgtaaagccgaaatatagagaaaaggccgccatgatcatcatctttttaatggaaagatcagccacccttcccttattacgcagaattacataaatcatggctcccatcactccgaatacagctcctgaagcccctgcagaaactgcataattactgctttgcatttccaatcccaaagaaatcacattccctccaaagccagacaggagataaataagcagataccttactcctccaactgcaggctccaggcgctgtccaaggacaaacaaaaccagcatattattagccagatgtgaaattccaaaatgaaggaacatagaggtaaacaccctataccattcccctgcacctgttattaatggaccataaccggctccacaggcgatcatatgaactgtgttctctgtaccgcctgtaaaatctgtgatcaaaaatacgatcagattcaccaatatcaggcacgctgttacaggcatttttttcaattcatctttcatctaatttccctacttaagcattatagcatatcttcaaacctgcggatacaaaaaattctctaaattcgcacataaaatgcaaaaaaaatatcagtcagtaaaattgtatcgctacaatattatctctcaagaaagaagctctcttaccatatccctgtcaaagattactgactttacatggtctacttcgatctgatacagtgcattcgccgcaatatgctctgcagcctgctcaagatcacggataccggttgtatctgcatacttctcaacaactgcctctaatccggcctcactgatcacacattcctgttctttcaatcccatacgcttcaatacttttggaagcgcaaaccgtgaaaagatcactttcttttcttccggagtataatcaggaagctcgatcactgcaaagcgggacatcagcggtgcactgatctgatctttatcatttgcagttgcaataggatatacgcccaccgtaggaaccatacactccatataattatccgtaaagcccagattgtccagcaaagttaaaagcacatctgcaggattgccatttcctttcccggcagaagccttatccagttcattgatgataaatacaagatttgattctcctgccgccgaaaaggcctccataataatccccggcttcgcatttgcataaatacgtgaacttcctgtcagctgctccggatcattaatggaactcatatccagagttgtccagggaagcttcaaaatacgtgctactgcatatgcaatctgggatttgccggttcctgcaggccctaccagtaaaagtccatatgcgggaagtgtatgagtccggttgatctgtatgatcgtctcaataattctctgctttaccctttccataccatacaattcttcatccaggatctttcttgcctcatcaggatcaatgggagcaaaataattactcttccactgaatattcatcataatagacaatgcgcgttgtgcatgcctgcgttcttcctgtgatacttcatgggaacgtgccactgccaaatttctccttgcccacaaccgtatattatcaggcagtgttttccctgcacagttcataaaatctgtaatactctgaatactggtaagcttcatctcatcgccatcttcaactacatcctcatcttcctgttcctgtgcaggtgcgttgctggccagaagtcttccgatcataaattgaagaaaaccatcctctgccgacagctttgttccgcctccaaacgcgatctcacgaatcctgtaaactgcatatccatcttcctgattctctccggaaagccttacattaatatgattttctcccagccattttaaaaggcttacaaatcttgcatctattttcagaatatctgtgcagaaaacaccctcatcttctttaaattcaaaagaagtccttttccccggatttgtaaaatatccacaggaatgatgcttccactgcctctctttattatctaaaaccagcatgggcatttcaggtgtagcctctgtcgtatctgaataaaaaaccgtatacgtacactcactttgaaccatttctgtctgttcagacgtattattaaaatcaaaaaccggcatggtgatcctcctttgatatgaattatatgtaaccattccgcatccactgtactagatagttgcaattatagctatgtttctctgccgcgtcaaatagctctttgctttttatccgattttaataaaaatatatcttgcctgtgcaaaatccacctcgtcctgatcctgcaaaagataatcctcctctggtttcagcatctgcccatttacagccgtcccatttctggaattcaggtctgtcagataatactccccttctctttttctgatcttggcatgcattctgctgacagtaggaagattgatcactgcatctgcagcattttccagtttcccgattactgtcagatcctcattcaggtagatggttgccagttcccctggctctttactcaccaaagtagacgggccatatacatttccggaagacaaaaccacagtttctccaagtaattcattatcttctttagctcccacactgccaacctgtgaaaaactgtcttctgatttctgcataggtgttgatctttggttatatacaatttcaacatttctggtttcttttcgctccaaaagtacggcggctaatgttccgatccccataaagctcaccatcacgctaagaagcagccaaaacggaatctgcggcagatatccccagattctggcagccaggataagaaggcctacgccagcccctgtcatgcagccccctatttctttccatggtatttcccgtttttctgtgtcttttattctgttttccacacttttcctattttgattccttttatttgtcctgctttgtgctaacagagtttccgcctgcattcctgcagatccatcttccatccacagatctttcccctccggaatctttgcacttttcggatcttctttccataccccactgtcctttacttcctgctttataacgacgtcttcatcactgcgtttacggaacaattcttctttgatatgctccaggtgaaaactatcctccagtgccctgcgataaataccatatccaagcattactgcctgtgaatcctcatgatccaatctgggaagaatatactcagtaagacactgaaactgaatccttatatctttttcatatccaggcaaatagcagaaaaataattctcttttttccagatccacatacatgtattccggctgcagcaccagtcttcccggattcagaagatattctgacatttcctccattacctggataaaacctccaaaaaccagccgcaggtcttcatgattcagcttcttatcctcaaacaaagacgccagcggctgcctggatgtaatatcataataaaccatcaattgtccgtccactccctgcatccggcacttcagcacagatggaatcacattcccaaccagcattctcacctgataggaggcagtgtccaccggctcctcctgataaagaatcagataattatgattcatatctcttttatattctgctttcatcatccatccgtggctcctttcaccatctccgatacggcttttgctttccgtatccatgacacaggctttataacagcagccttgccttctgcccgaatatgccagtcaaatcctccaaaacctttatccgtatccagatcatagactacctggatattcttttgtccactaacctgtccgttcagattttccgctgtaaaaaaacctgtatttcccagctcttcacattttttcctggccacttccacaggctttccatttttctttattccttccatgcttccgtctatggctgcttcataagccgccgcagtaagccatgcccggttatggacaaagaaaaaaagatacacacagctcatgatcaccagtaaaaccagaaacatcaaacacgctgcttcaattgtcacacttccctttttgatcttcttcacagtaaaagccctcccacatatcccaacaggacaaaaggtacaaatggcagttccgttgttttcttttttctcaggattcccaataaaatcactgcccacagaccacagccaatcaatgccagacatatagttctcaggtattcttccgtttccagcactgtacccagggcaatcaacagaaggccatctcctgctccgatctgatttcctgacactgcactgattcccaggaaacctcctcccacaagaggcggaataaaatactgtgctgtcacgtttcgattatagaaggctgtcataattccaagaaaagcaaagatgccggttattatcagggaaatctcttttttacgtatatccttccagctgttccatccaaggaacagtattacccctgctgttttaagcattttacatctatcctttcagccacatctgctgcaggcatgaatacctttaatttcagattccttcacaagtcgtaccgctctcttcaatccactacaggtctccagattatggtaccgattgcctttttccgttatgtaaacccgtccggctgctttcttgcctttactgcagctttcacatggataatatttttccccataagcatttcgcctggatgacaccgagcttcctgctacctgagtaatggacaggtccaaataactgcagctcatttttttatgataaacctgaccgttttctgtcatatagaccatttttccggattcactttcagatccatctccaattcctgtccgatgttccatacctgtccaggtgtgaacttttacagttgtacaggtccacactgccggcaggggaaggatacccccaattggttgaaaggaatatatgtccggcaatatcagttcactggtaccgttttcacccatggcataagtatacattcctatttcttttgccttttggcacaaggagaccagatgctgggtctgtaccttgtaaatgtccataaaagagatcatgacagttactgctgccagaaacagtggcagtaccaacgcacattccacagtcaaacttgcttttttcagccttctgaaaggacggcacagggacactttttcaggacgacagactttgcttttcgggggaaacaaatctgcccggtatttccaaaagcttttcctttctgctttgttatttctcgactctatctcttcaattttttccatgccgcagctttcgcccggcttcttccacaattctgtgcaatgcaccgcaggttcctgaaaaagcatccctgtgcctcctttctaataactatattcccttgcaacggaaaacacctttctggtattggccttcacatccgcagatgcttccagtgcggttacgcatccatccaagcggaaagattcccagccggcacttgtcctcattaccagctccaccatatccatgccccgcatttttttattttcccggttcatagacaatagtaaaatctgcagataatcctcataattcattcctcccgggctttcctttctttccgtttccgccacgtcaagaagatgtggcagattttccagtgatagctgccagttttcgccactttttataagaggtaccttcccacctgcaaaaagctcccgtacatccagcacgctttccccaaatgcccaacaaaggatcagtgccgcctcaatcacaggtgcagcaggcggtatcagaaagccggaggcaatagaagcagcaagggctgatgcctgtccctgtctgaccggatctgctgccagacatgccgcatttactccttctctgatcaaaagaagctttctggctacagctttcaaattttccctgtcgctgtcccttccataaagcacatactctatctgatagcttaagccaccttttccaggatcactgtaatttcccagtttttccatcaaatactgttgatacaagatctgtgatgttgtagaagtatcctctttcaaattttctctcataggcattccgctttggatttcccgtccagataccagttttctttttgacacttccttatccgatacctgctgtcccggcggcaaaagcagatccaagatccccatccagcggattcttcgtatggaagggataggattatcagcttggaccacctgcgttcctgtattatcctccttctgacttccatcccccagttcttctgaaaattccgaatttgcttcctgttttttctgttcttcctcgctttctctggcagcactgctcatttcatggtcatatgattccagtgtgcctccattttccgctttatttccttcctcttcagctttccgggttttctcatttctttcctgcattttgtcaagaaggagctgtataccatggctgcccaaagtttctttcatatattctgtaatctgctgaaaaaaaacttcccctttctgatctgtcagaagccggtatccggtaagtccgcactgctgcagcttcagtttctgactattctgtttcagtacaggtttcatatatttttccagttcgtcacagagaaaggcaagatccaaagcttctgtcccatttgaaacatccagtgcaaacagatcatattcctttaaaagtgcctgatcatactgtgcaaacaaagaatataaaccaatatccattcctgccaggatctgcgttctggctgctgccatacgtacagattcaatccccgtacagatcagtgaaaccacaaggctcaggatcagtgccataaaaacagtaatactcccctgggattttttcctgtttctcccagccatagacagcccctcctttccggtcatagccgtgaccttctttttttgtcagatcgagttgctttgttttgtgattttggaaagaattttcttaacaagacttgtaagctgttccttaaagataataaccagactgatgagaaccaccagaatcagaataatctccacaacgcctactgcatcttcttccattgcaaattcctttatcagctgtcgtaaccctttcatcctttcacctcctttctagttcccataaaaggccaggcaggccggtatcatgatcactgccattactaccagaagcatcaggatcataggcaccagaagcttagtcgctgcagcctcccccagtacccgcgccttccttttccgttcatcccaagcctccatggattccttttccaacatatctgcaagctgcctgctccctttttgcagattctgaatcagcattgtggcaaaggtcttatacttcacctgcccgcatcgttctccgaatcttctgtatgcttccatctccgagactccactatccatctcatgacacaggatcaggatttcttcatacgcagttctttttcgttttccctgttttcgctgataatcaaatgccattttctgaaaaatcttgcgcacagtcattccagcctgtacgagcaaagtaaatttcataatcagtcccggataatccattagaagttcttcctgtcgtttcactagaacagcctgtccttcccttcgttttataagaaacagcaccgtccctgtaataagaaatagaaaagcaagaagattacccatattacttcctggtttttcccattccagatgtttccccttccacttttccggcagataataatagtctggatcattcttttccagattgtagtttgcaattgcttcctccagttcctttttctgctgctgttcagaagttatattctgatcctgggtcttctcctgttcttcctccaattctttctctggaatctgtacatacatactgcctgctttttttccatccacggataccatgaacttctcctcataggtctgatcctcctcttttttcagtcctgttccttccacatagacctgactgtctccattttgcacagtcagagccattccaagcaggtttccagccaatgctactgccagaaacaaagaaaggcttctgtctttttcttcttttttggaagaaaaccatcctgctttgctgccaataaaaaccaccagcaggattccaaaaataactatatgtatccacatctttcctcctgcttttcaaacctctatatcaacaatgcgccttcccatccaataagcacctgtataaatccccaaacatacagtcattgcacaaatcccgaatggatttccatacagtacatccaaaaagccgggagatgtaagcctcagataaagaatgatcccagccggcatcaggctcatgatcagctgttccgacttcttggctgcaagggtagcttcgatttctttttttacatcaatcttatctcccaacatcctagccaccttctgaatcacctgattcatatctccgcctgttctttttgccacataaaatacttcagcaaaattttctatatcctccacattacttctctgccccagatcaaggaacagttcttccactggaacgcttacatgctgctgatgatcaatatactgaaattcccgtaggatatccgcattcccatcatacagctgccgcagatcccgcacacaggccgacaccgcattttccacagaataaccggcctgcactgccacgctcatggaattaagagcatccttaaactgaaaattcaaagtctttcttcgctcctttgccagcctttttcgctgccagcaaatgtaaacaactgggataggcaaaaatacaactactgcccatatacttttataaaacagataattaattcccagagccaaaaaactgccttgcatcagatacaatgccagttcctttgtactgaaccgataattctcataatccctgcttttttcccactccctggcagaattatcttttccatagcttgggctatttgtcccccgcacatgtttccgggtattttccatatcattctgcctgtttttctttttcataaacatatccctgccctttccagcttctccctgtgcagaagagtggctgtagacacaagtcccttttcctcctgccactgatacagaggctgcatttgaatctctccgtccctgtatccacagatttccgaaatttccaaaacttttctggacttatcccgcagtctccccagatggatcacaatatctactcctgctgtgatctgtctgcgaatagcgtccagcggaagttccactcccatcagaaccatcatttccaatcttgaaagcatatccctgctgctgttggcatgcgcagtacaaaaacttccctcatgtcctgtattaagcgcctttatatggactccctatgttcccatcatgcagaaatacaatatctgtacttaatacacaatgtatataacgttattatcttgccatttcacagttgcaaaaagaaaagagaacctttcacagccctctttcatatcgactttctcattcatttgtcatactcaacagtttgtcaaccaatgtctctaaactttttcccaaaaatgggacaaagtctggtattgcaccaaatgccatcccaattattatcattcgaccacattctcttgcagattccaat

SEQ ID NO: 45 - DNA, 13473 bp, Unknown
  gut microbiota DNA sequence
aaaacaatatctgaccagcatatcagatattatccttctttaaaaaatcttcagaagatcattatacatcactaccaccatcaaaagcataaggagcatcagcccggcaaaatgaaccatcccttccacctggcggttcaccggctttttccgcactgcttcaatcaccaggaagataagccttcctccatccagtgcagggataggaagcaggttcataacccccaggtttgcagaaagaaagattgccatatagatcatgtttacccatactgcaagtgttccttcttttttgctttgttcataggtggtaccgatggcatccaccacacctactggtccgctcaggtccttgatccccaggtgtccggtgatcagctctttcaggctcataatggtagagcggatcagatattttacttcataggcactgtatttcaatacagccatcccttttgtcttctgataacctgcattataggaaaagccaagatcaggtgtacggtattcctttggtgtaatggtggcatcatattccaatccatttcgctcatatgtgatctgtacaggctcgtcggaaagagggtgctcatcaatatatgcctggtattcatctccgtctgccactttaaccccgttaatggatgtgatcacatcccctgcctgaagacctgcttcctccaaaggcattccccggatcaaggattccacctccatagaggaagcatcgcttctgttaaagccaagcagatacctgacagatacatccggcttaaaggccagatcgatctcctgcccgtcacgatctaccgtcatgtgtacggtcttatcttcctgtgcaggattaaaatacgtatacaggtacagatccctggatagatcaatggtatatccttcatattccgtgatcacatcccctgtctgaagacctgccttttctgctgaggattcagtctttacatccagtacctctgcagggtcatatcctgccagagaaaccatgatcaccgaaagtacaaatgccaaaataaaattgaaaacaggacctgctgccaccactgcgatccgtccccagacagatgccgcattgaaagtgccaggccggtcatcctccatatcctcccccagcatggcacaggatccgccaagaggaagcagcttcagagaatacctggtacctccctttaccgtacttacaagccttggccccattcccagggaaaactctgtaactacgatcccatttttctttgccagcagaaaatgtcccaactcatgaaacaatacaattgcactgaaaataatgattgccagaatgatcttcaatctaccacctgctttcaatccactgataggtttctttttccacagccaggatctgatccagatccggatgccggatcactttatgtcttcccatagactgcccgataatctgataaatatccagaaaacggatcttttcctgaagaaacagcttcactgccagctcattggctgcattaaagacagtaggcatgctgcctccagcctgcgctgcctggattgccataggaagccccaggaacgtatccatatccggttcttcaaaggtgatctgcctgagtttatggaagtcaaggcgttccccatccagataacgtctctcaggataatacagggcatactggatgggcaggcgcatatccggtgtcccaagctgtgccatcactgccccatctttaaattcaaccatggaatggataatactttgaggctgtaccaccacctgaatatgatcaagatccatatcaaacagccatcttgcttccattacctcaagtcctttattcaccagggttgctgaatctactgtgatcttttgtcccataacccagttagggtgttttaatgtatctgccacagtcacctgctgcagatcttcccgtttccttcctctgaaaggtccgccggaggctgtgatcagaagcttatggatctcttttttgttttctccatgaatagcctgaaaaatggcactgtgctcactgtccaccggcaggatctgtactcccttttcctttgcaaggggcatgatcagatgcccggctgttaccagggtctctttattggcaagtgcaatgtcttttcctgcacagatggcttccatagtaggacggatcccgatcatccctactacagccgtcacaagtatatctgtctcatccatccttgccagctgaagcagaccgtccatacccgaaaccacttctacaggcagatctgcgatccgtatctgcaggtcttttgcagcctgttcatcccatacagctaccagcctgggatggaactcccgtacctgttcttccagcttaaggatatttctccctgcgctgataccaagaacctgtatatctttattgccccggactacatccaatgtctgggtgcctatagatccggtagaacctaaaattgctatttttttcataaaaagtgcatcctctcttcctatatagatcagcccaggatcagggttgccagataatagattaccggtgcagtaatgatcacactgtcaaaacggtcaaggattcctccatgtcccgggatcagtttgccgtaatccttgattccctgatttctcttgatggcagaagcagccagatcgcctaccatggagatcagcgctccaaccgcgcagatcagggcatactctgccactttaccaccggtggctgctgcatataatgcacccagaagtgcggctcctgccacacctcctacagctccttccaccgatttcttagggcttagtacaggggccatcttgtgcttaccgatgagcatacctgtacagtaagcgcaggtgtcgcatccccaggagcataagaagatcagccacacaatatacttgccatctgtaagattacgggtaaggtaaataaaagaaagcataaccgcaacatagacgatcccgaaaaaggcttccattacttctcctgcatgaaatcttggatatgtaaatacatatacaaaaagcagaaggatcaatgccaggatcaggcccatcatgccatatttctcatagtctgctgccatggcaatgtaatataccacagccccaacatagcctgtgatctccagaagagtaaacttctctttatgaacctgcatggtcttatataattcctgtataccgatcagggaaatcccgagaagggtaaaaaacagtatgtaactgccgctcatgatcgtaagaagtgccactgctaccagcaggatcccgcttataagtcttgttttaaacatgctgttcctcctttaccccaccgtatcttctgtctctttgattatatttctcaatggctctgattaattcttgtttatcaaaatccggccatggaacttctgtaaaataaaactctgtatatgccagctgccataagagaaaattagacaggcgcagttctccgcttgtgcggatcagaaggtccggatctggtactccggcagtatccagatatccctctatggtttcctctgtaatctttgccggaatcagcttcccttctgcagcatcctgtgccatccttcgcatacctctggtaatctcatccctgctgccataattcagtgcgatctggaaatacagttcgtcataatccttagatacttcttccaggtagtggatcctctcccggatcacttcatcaaatacagaggtatctcctatgatcttcacccgcattttatttctttctgcaattttcacacactttttcagatagcttctaaaaagcttcatcagcgcttccacctcatccctggaacgcttccagttctctgtggaaaacgcatatactgtcagatatttgattcctaagtcttttacatcatcacaaatggtttccaggttggcacagccttttacatgcccgtaagttcttggcatgccctttgctttcgcccatctgccattcccatccagaatgatcgcaacatgattgggtatcttcatattctctccttcttttaagactgcacaaaaggactgccgcaaacagacaatgccttatttgcagcagtcctcccatatatagcgcttatactgtcataatttctttggatttcttatcaactgcagcatctacatccttgatatacttatctgtcagtttctggactttctcttcaagttcctttacttcatcttcagaaacatcttcttttttcagtttcttgaaggcatcattggcatccctgcggatattgcggacagcaaccttcgctgcttcccctttcttcttaacatccttgacaagctctttacgacggtcctctgtaagttccgggaaaagaagacgaatcaccttgccgtcattacttggattcaggcccaggtcagaacacagaatagctttctcgatcttcttgatcagactgttctcccatggctggatctggatcaaacgtgcttcaggaacggtaatattggctacctgctgaaggggggtaggtgttccatagtaatctactgtcagcttatcaaggatatgcggattagcgcgtcctgcacggatcgttgtaagctctgtctcaaaaccactcagggtctttttcattttgtcctcatatttctgaattctctcatccattgttcaatctccctctcctgttattctctatttctacacggttacttttgtaccggagaatttaccatgaacagtatttacaatactgttctcttcctcaaggccaaataccagcataggcatcttctgctccagacacataatagatgcagtaagatccatagctgccagcttcttatcaaccacttcctgtatggaaatctcatcatacttcactgcatccggatttaccttgggatcactgtcataaataccatccactgcttttgcaagaaggatagcatctgcgctgatctccactgcacgaagcacagtcgctgtatctgtagaaaaataaggatgacctgtaccaccggcaaaaaatactaccttgccctgtgcaaagctctcctctacgctgtccttggaatacagtttggtaaatgcaccacaggtaaatggcgtataaatctctgtagaaaggcctacatatctgcagatatcggatacataaatgcagttcatgatagtagcaagcataccaatctggtctgccttgctgcgctccatggcaccgctggtacgtccccgccagaaattgccgcctccgatcacgatccctacctgaagaccttcagatacgatctgatggatctgcttcgcaactccaatcactgtagcctcatcaaagcctgtcttcttagggcctgccaatgcctcaccacttaattttaatagtactcttttcatttccattgtaaaatcctgcctttgcttcgattattctctggttgatgctcactctgctcgtcgtaacctgctcctgccaactggcagtacttattaccatacacctgcaacaatctcattcccactctcgtccacagtagtagaaactgtaaaagatggataataatggtagcctgtctctccagtctccggttcattctgatagtcactgccctggggctccccacatgctgcgatcagactgtccagggactgcccgatatactgctctgccacgctggcactattgtctgtaggatctgtattattaggatccggggtaggtgtaggagcagtagtagcagccggtgtagaggtcactcccggagtgggtgtggcatctgtatcattactactgtcatctgtactctgtccatcgtcatcgatcagccccagacgcttcttaacctctgtaagcgtggatgtctccttcttgctgctgcctgttaagtaagtagcatagggaatagaagaatctcctgagccatccatcttcaaagtgatctggctgatattctgaagagggatctttctgaagaagcactcgctcttattctcatctgtgtaagaaatacgaatgtcatagctggaaactgtattaccggatgcatccttggcattcttctcaaagtagtacagagccttatccccgtccttcaaagtaaacataccgttcacaagatcatcaccccagtcatcatcgtcatcggaattaggacggatatagatcctggcaacctcagaacctgtcttattgatcacaaccaccttggaagatgtgcttgtcttctctcccataatattggtaatatcttcatctgtgctcttctccatatccaccagttctgtgtcactgccggaagagccgtctttcttctggtcatctgatgcaggtgctactgttacctgcgtctcagactgttttccatcgtctttgctcttttttccacatccacatcctgctgcagctgccacacagacaagcagccctgccaggattagataacgttttttcataatatatattcctcccgaaaattggatcataaacaataaagatctggacataaatcgtaactattctgtaccctcacagtcactaatccagtaaaaatactattttattattacagagtatccccatcttgtcaaccaaccccggcaggatttcatacaatttttagacttttgtttttataaaaggataaccgcttttcactgaaaatcttctaaaatcctgtcttcatacggttcttccgcatgtttttcctaaggagccctgcctcatgtctgcccttttctgcctcagtacaaatcttaagccccggtacctgcataggatgctcgttttcgtccattgccaccatgacaaaaaatgcacggttcacagaatagcgcatgccatctgacctttccacatacgtatcgatttccacttccatagaggtattacctacacaggtaacatatccgatcagtaccaaaagctctccttcataggttgcttctttaaactgaagattatcaatggcagctgtggtcacacggttggtgcctgcatgacgcatggctaccacactggccacctcatctgcccactgcatcagcattcccccaaacagacggccgcctgcatttaagtgctgatgcatgatcaaatgtacctgttctgtccttgaatctgccacagtacgaatccgtcgctctttatcctgaatttgatttttctccatgaatcctgctttcttcatgctgcctccatcagtacagattttttaccttaaagtctcgttcagcctctcgtctctggtctttctttgcaatatcctgacgtttgtcatacagtttctttcctcttgccattccgatctccactttcaccaggctgttcttaaaatacacctttaatggtacaagtgtcaggcctttctccttcagctttccttcgatcttgttgatttcgtatctgtgcagaagaagcttccttacacgaagaggatctttattgaaaatattccccttttcataaggactgatattcataccatatatgaacatctcccctctctctgaccgaacataggattctttgatactgcatttccccattcggagagattttacctctgtgccagctagtgcgatcccggcttcataggtatcttctataaaataatcatgaaaggcttttttattatttgcgatcagtttgatcccaggtttcttcgccattggctctctccctttcttatatttttacggatggactactgtaaaatccacagtcttcaaaaatgtatctgcatctgctacccggacctttaccttctggcccagcctgtataccttccgggtcatgtctccccgtagttcataagtttctttgtcaaaggtgtaataatcatcccgtaatgtatttacatgtacaagtccttctactgtattgggaagctccacataaaagccccagccagtaacaccggaaatgatcccttcatattcttcacccagatgataggacatgtattctgcctttttcagcttatcagactccctttctgcctcatcagccctgcgttcacaggcactggactgctgtgccacatcctccaggatctcctgataatgttccgtccttccttcccggatcagacgtccccttaaattatctttaatgatcctgtggatctgaagatccggatatctgcggataggagaagtgaaatggcaataatactttgcagccaatccaaaatgaccgctgcactgggtagtatacctggcctgcttcatggtgcgaagagtaagacggctaatctgtggttcattctccagcccctggatctgctccaggatctgctgtatctccttgggagtgatctcctggcccatcttctgtacagccactccctgattacgcaatagggtcagcagactttccaccttttcaggatccggattatcgtgggtcctgtaaacaaatggttttccttctttacagtattcttctgccacagtctcatttgccatcagcataaagtcttcaatgatcctggtagctacattagcttcataaggctttacatcgatagcccttcctgctgcattcaggatgatcttgctttccggaaaatcaaaatcaatggaacctctgtgatgtctgctttcacggatgatccctgaaagttctttcataaggaaaaacatgggaatcaacgatgcatatctttcttttgcctgtggatccgtatcctccagaatattcttaacatctgtgtaactcatccgctcatccacacggatcacagtctctgcgatctggtaggaaatccgctttcctgatgaatcaatatccatcagacaggaaagcgtaaggcggtcctgcccctgattcagggagcagatcccattggaaagccgcactggaagcataggcaccacacggtctgccaggtaaacgctggtgccccttttcaaggcttcacggtccaatgcactgccgccctgcacataattgctaacatctgcaatatgtactcccaggtgatagatatctccctcttttgtcagggaaatcgcatcatccagatcctttgcatcctcaccgtcaatggtaaccgtcaaaagatgggtcagatccagcctgccatccctgtctgcatccagcacatgatccggtacacgttctgcctgacgcagcaccttatccggaaattcacttggaattccaaagcttttcacaatagccaggatgtctgtccctggcgctttcatacttcccagatcctcgatcaccttgccttccgggcttttgttcttagtgccgtaatctgtgatctgaacaaccaccttatctccatcccggactcctttggaatccttcttgggaataaaaatatctttggaaaatctgggattatcactgagaacaaagccataatcccggttattctgatacgtacctacaatctggatagtaccccgctccaggatcttcacaacagcgccttccctgcgttttccatcctccggctccctggtcacaactaccactacccggtcctggtgcatagctgttcctgtattttcctccggaatataaatatcctcttccagttcttcggtttctacaaagccaaagcctttattgtgcccgataaatgtcccttcatacctgggcatatccgcaagatcttcctgaaaatgattttctgtcagtctttttttaacccggtttttttcttttccgctgctccattcttttgcagcttttgaatctttttccctgatcttgttttttttctttttaccggatactttggaatacctgccttttttgtcctgctgtgccttgccctcctgctccagttcatccaacacctgccacaattctcttttttcttcctttgacaggccaagcaaagaggctatttccctcagccgcataggcttgtagacaggatctcccattaattccagtatgaattttttccttttgtctgtattatttcttccgctcaaaatatctcctttgataaaaaaaaggctgttgtaatatgcaacagcctttcccatttactaacttatacacaatgtccacagcataaagctgtaaaacctgcggcttgtcctgtcactggaatatgcttagaaattcaggttcagaactacagtaagcacaaagaacagaactcccatcagagaagtagctttaacaaggccgccttccatggtacgtcccttattctttccccagtaggtatctgctgctcctgcaattgcgcccaggccctgagactttccttcctgcatcaggactactacggtaagggcaatacaatctatagcaaaaataactgtcaatatcgttcttaaaatctccactctgttacacctcctaatcaactgctcttcattgtatcataggtaaagtgggatttcaactgtttttccaaaatgtttttataatgttttgttaaaattactgaaaacatacaaacagatcaagaaaatggattctgatagattgccagtccacccagatgctcatggatccgaagaagctgattgtatttggcattccgctcagatctgcatggtgctcctgttttaatctgccctgctcctgttgccactgccagatcggcaataaaagggtcctcagtttccccggaacggtgggatatgacagaacgatatcctgcacgatgagccatttccacagcatccagggcttctgttaccgttccgatctgattcactttgatcagaatcgcattggcagcatccagacggatcccacagccaagtcttttaatattggtaacaaaaagatcatctcctaccagctgaagatggcttcccagagcctttgtcatattcttccagccttcccagtcatcctcatgaagtccatcctccagagacacaacagggaaatcctgagccagcgtctgataataatggatcatctctccactgtcccgtaatacttcttcccctgtcatctgactttcgccaggaaaaacataaactcctctttcttcatcatacaattcactggcagccgcatcaattgcgattccaatctctttgcccggctgataaccacttttttcaatggcctccatgatcagctccagaacctgcctggagtccttcacatccggtgcaaaaccgccttcgtcgcccactccggtattcatatttctctgcctgaggatacatttcagatgctgatatatttctgcactcatccgcaatgcttccggaaagcagtccgtcccaaggggcatgatcataaattcctgcagatccaccgtattgtctgcgtgacagcccccattcaggatattcatcataggcacaggcagccggctggcatgacagcctcccagatattgataaaggggaatcctcatggccatggcacttgcccttgctactgccatggatactccaagtgtagcatttgcccccagattccccttgttgtctgtcccgtctgtgtactgcaagatctggtcaatgtacatctgatttaaggcattctctcccagaactgcttcagcaatcttcgtattcacattttggactgctttctccacacccagccccagatatttgtctttttcctgatcccttagctctacagcttcaaatttccctgtagatgctcctgaaggtaccattgctcttgctgtatatccattgatcccgatcacaccttctcctactgtaacttctacttctaccgtaggattgcctctggaatccagtacttgtcttgcgtgaatctttctgataggaagataccgtaacatgtttttacctcctgatatttatgaaggtagtttttcctgtaacagcattttctattcaaaacagatccttttatcacatttccattttgactgcagcttaaagggaaataaatcctttgcttttcaggcaggcttctacctccataatatcctctacatgaaggatcataatggggcgtcctgtatccctgttaaaggacaggtacagataatcaatatttacattgctgtcaagaaaactctgaagaagattgttaagatttcccacttcatccttaacctcgatccccaggacatcggtaagcttacacagaaatcctgcttcggtcaatgccttgccagccttgtccggatccgataccaccatgcgtacaataccatactcagcactgtcattggtaacagatccaagaatattgatatcattctcctgaaggatctgtgtcattttgtgcatggcaccttttacgttttctgcgaaaatagacaactgttttaacataataatctcctcggtatatgttctattctactggtaactcgatcagttcctttggtgagtgggccagatttatatgaccttcttttgtaacaaccaccatatcttcgatccttacgcctcccaaaccaggtacatagatccctggctctacggtttcgatcatattctcctgaagaatggtgtcatcagacggagaaagccttggattctcatggatgaaaagtcctacgctgtgtcccagtccatgtccaaaatactctccgtaacctgcatctgcaataatatccctggcaactttgtctacacttgctccggattttccggcctttaatgcatccagtccggccagctgcgctttcagaacaacattatagatctctttctgtttgtcacttgctttcccaaggactactgtacgggtcatatctgaacaatatcccttatatttgcatccgaaatcaaaggtgataaaatcgcctttttcaaatttctttgtacctggaatagcgtgaggcatagagctgttcagtcctgaagccacgatggtattaaagctgagatcctctgccccttcctgtttcataaggtattccaactcagcagatgcctccagctctgtcattcctggcttcaaaagaggcagaagccttgcaaatgctctgtcgccaatctcctcagccattttcaggtattggatctcttcctgggtcttcacctgtctcaggtcattgatgctgctttcaagaggtacccagcactgaaccggcaatgcttttgttaattttgcaaaatcacagcaaagcattgactggtcttcatagcccaaagcaaaatccccctgtacctgctctttttctatacactctttcaggatttcttctcttttatgctgattagactcctggagcacggtaaaactgctttcctttgctgctgcttcagtatatctggaatctgtgatcagaacggtctgggtgcctgaaatataaagggcaccttctcctcctctgaatccgcttacatggcgcatattatatgggtctgtgatcagaattgcctgaacctgtctgtctttcagaatttgatctaacataatctgttcctcccttatctctgtcaaatacgcttgctattatacccttattcttcccaaatcgcaacatcctgttcgtacacttcttacaatcgtgaacctcacatggctttcccttttctgcctggtcttttgattgtgaaccttaca

SEQ ID NO: 46 - DNA, 3722 bp, Unknown
  gut microbiota DNA sequence
gtatgtcacaagaacacccctttgctatacagggaggcaggcagcctggatcaggagctgaaggaaatgaatgagtgcatgcctcattactacaagattaccaatggacatgggcagggtgcggaaatgctgatggctgcagaagcaaaatatatgcagggacatatggtggatgcacagatagaactggagcaggtttattcgcatatcgaaggaaataatcaggaaaatataagactgtgctgcgattttcttgcattaaggctggctcttttggcagacttttcagtcaggcagaccatagagcaaagacgggaagagattcttaaaaggcataatacagcatggctgaatctttttgacagtgcatgtggatattattatgcgttagcaggtgttaatgatcggattccctctctttttcgtgagcatatgctttgtcaggtgaactttctggcaccgggcaggcctatgatggagatgatcgagaatcagatttatctgacccagggagaatatattaaggtgatcgggaaaagtgaaagccttttggaaatgtgccggaattttcattatggacttgtagcgttacatattgagattcagacagcagcagcctatgagcagcttgaaaagcgtgaaaaagccagaaggtgtatttcacaggccttaaaggaagcgattccggatcagcttctgatgccctttgcagagaattatccctatatatcggagttgctgagagaaagactgctgtgtgcagagaagcggcaggaaagcggatcatataaagaaacgatgacatttgcagaagcagccccggaaaaggaaatgcagtttatcaagcggattataaggcttggagaaggttttaaacggcaaagggaaatgctttgtaaagaggcagcctatcctgcacaatttagtattctcacacagcaggagctgaggatcgtagagctgatgtcagaacggctaactaataaggagattgcgattcagatgtttttatctgagggaaccatcaagcaatatattaatcagatttattccaaacttcatattgaaggggatacccggattaaaaggaaaaagcttttggatcagctaaacatgtaattaaccaatagttaattgcttttcagtaagattcaccgtatgcttaatatatacgatgagttttttctgtatacggggaggagaaaattatgctcaaaagaaagaaaatattcgcaatatgtgcggcaacatttattctggcgcctgtagctgtctatgcatcagacgcgcctacagatgaaggacagtatatctggcaggatgagaatggagatttctggtatcgcaatggtacagaagacgaatatatcggggaagggaattacggacaggatcctgacagcggagaatggatggaagccaataatgcaggatggacagaagaggaaggctattttgagccccattatcactatgacggaaagggtggtgtgtggtttgaacagggggacgatgattattatatctgatccacagaccagtattatattgatgataatggacagctttgtgaaatctcagggaaggcatcaggagatcatggagcagatacagcttcggagacgtcagccagtgattcagaggatccggaagcagaaaaaacaggagagctttacatgctggctgatttcaagcagcaagatacgatcatagagtctatgccagatggtaaattaggttattcagagattcgttctgtcaatgaaaataaaagcatgacggttcttttaaaagtaaaaaacgaacctgaaaataccttttccacaccagaggatttcctggcaggatattacccaggcaatggatctattgcttatgaagaagccatgacgatagcatcctatcctgcaatgcgttatcaatacaagggctccatcaatgatgaggatcgggaaattgatgctctggtatgcctgacagatgactattcctttggcttatttattctgacagagcctaaagattatgatgataatataaaaaaggcaaatgtggaactgatcaaaacggcagatctgatatatgcagaacggatagatatggccagtacagaattttttcaggtacttaccccggaaagatggaaatatctttgccattatgagacagaagaaacggagaacggtggctataaactgatttattattgtgaagatgcaccagtgctcatattggaggttcgggtctatgatgggacggatcagcctcttgacagtgtatggcaaggctatcttggacggattgaagcttttgatggcaagcagtatgacctgacagcaaccatcagtcagtattccgaggatgcctccgatgactggaaggaaatgtataatacttatgaagaagtaataaatggaatccgggtcattgacgggtgcgtcctcagggaaggaagccacctataaacaatagaatatttagcattatgtggtcagcctgtgaaagcaggctgactttttatatcaactggaaaaaaacagttgaagaaaccaactttttgtgtatatgatgataccagaaaagtcgaatacaaaagaaatgaggggacagaggatatgctgaagaaaatcaaagataaatatcatggtctgtcgctggcgaaaaagttttcgcttaccagcattatgatcattgtgatctctatctttgtgttgactgtggtggtacagcttttctttgaaaaatctgtgttggagattactggagagggctacaggcagaaatttgatgttgcatcagaaaatagccagaggatattggaggatggggaaaaaatcagcaaggttctgctcactgataaatcaatacaggagtggtttctggaaaatggaacagatgaagccaaaagacttcgccagaagctgcaggtggagcaaagattggattatctggacgcattatacccggatggtcaatacagcagcatttccgcatttgatgagcagggcgatatggtcaattccaacaggatccggtcaaaggcatctgtataccgtcagttttttgatattattaaagaaaaacagggaaatccaggctggctggatctgtatcagctggaagtgccaggatatcaggagacaggtattgcctatcttcgctgttttcgtgattatgcttcaggaaagatcaaaggctatattatggtggagtaccgttcgccgcttctgatcagtaattttactcatgttaaatacggagaaacgggaagctatctgatcacagatcaggaaggaaatgtgaaaatcgaaaataatgaagacagtaaaaagacaatatcaaatgagccatatttccagtgggcattaactgagccccaggagggaaaggtgttccaggtggatgggcaaagatgtctggtgactacggatgtgatcccaaagctggattggattatgatagggatcactcctgtggatgaactaaccaaacaggggaaaaatatcgtccgtattttgtatgtagtgggggtttgtgcggtactgatcagtggatatgtaagtttccgtttggctcatagcgtgacaaagccgttgacaaagctttcacagacaatggagcggtttggaaagggtgatctgtcagttcatgcgcctgtgtggtatcaggatgaaatcggaatgctgtcagaggaatttaataaaatgacagagcagatacag

SEQ ID NO: 47 - DNA, 29245 bp, Unknown
  gut microbiota DNA sequence
tcatccggtgcattatcttctatattctcccttacattctcctcgttatcccttgcgtcatctgttttgtctctgcttccatcattttccgtttttttatccttatcttttttatctgcggcattatcctctgtggcattatcttcggcagctttgtcatccgtactctttttcgtttcatctgctgccttacgtccgttctttgtgccacatcctgccagcatagaaaatgtaaaaacaagcagtatactcatcagaatcattttagcttttttcattccactgatctcctttttccttgggatttaacttgtactgtgtaactcttcagtgccctggcgggatactgcctgctgaatcgttactgtaatgttattttgtatatttttacaaatcctatactggaaaaataaggaatatgaaatcaggtactgttccggatactatcttacagctcttacgatcacttctccgctgccaggattgttccactgatcctttctgacaacgatctgtccgcctgtaagcacataatcaaagcctgtgcacagccggtccggatggtcaaaatctgctgccgcatccagattttccaggtggaacacacataaatctgctggcattcccacctgaagggttccacggtccatatgataaacctgcgcaggtctggctgtcatcttatagattgcttcctcaatggtaaatatctttttatcacgcacataatccgtcagaagcttgggaaatgcagcacatactcttggatgcctttttcctcctgccggataaatagcatcagagatcagattggcacgcctgtccttcaaaaataaaagcatatcctcttcagaagcaatggtatccagcatagttacctcacatttttctgcaatcaggatatcatacaaggtatcgtaaggatccttccccagctgctgcccgatcctggcaatagactgaccggcataaggtgcatattccggtgtatgaaggctgcttgcataaatcctttcaaagccagccagctccacaatattttcaaactccatagaaggtgtcttcagcacatgggtcagttcttttcggtaatccggatctgacagcctgcggatgatcgcctcagttccacctttctggctttggggaggcagaaggtgaaccagctgggtagaacctgtaagataagggtacaggtcaaaatccactttcacaccccttcgctctgcctgatccagaagcttcaggatctttaccggagtctctccccagttcttcttgccaatacatttcatatggcttacatgaagagggatctgaagttcttctgcaataccgatcacctcttccaaagccggaaggatgccatctccctcatttctgatatgggtaacaatagggatctgtgttccttttaagggggaaagtgcctgcacggctcccttttgatcgtattcaaactccggagcataggcaagtcccatgcttacccccagtacgcctgcagccaggcattcttccagcactgcccacacctgatgaagttcctcatttgtaagccggcctggggcatagcccttcactccagcccggatggtcccgttgccagatagcatcccggtattcacacttctttttgcctttttaagggcattcatataagaagtcatatccggcatgctcttcacatctgcggttggctctccggtaacactgcttaaaaagctgctgatttcttttgcatatctttgtcctgcaggtgctacagaaaggccgcagtttccatttacaactgtagtcaatccctgcctgttcaaaagcctgtcatccccgtttacaagggcttcccagtcaccgtgtctgtgaatatcaataaagccgggggtaatatagcccccggcagcatccagaatctggtcttttggaaaatctgaagggatctccacaaaaggagcaatctccaggatgattccatcttttaccacaacggttcccaggaaaggcttttccattttaccatttacaataaaaccgtttttgataatatattctgtcatttagtcctcttttacataattagcaccaagctttgccggcacgttaaactgtttcctgcatactgtaagtacgatcacaaggatgtatggaagtgcgctgaacagctcactgggaatggctgcattgccaagagcttttacataagttcccaaagcgtcggaaataccaaaaacaatgccgaagatcaaagccccaactggattccagttaccaagaaagcagataccaaatgcgatccagcctcttcctccaatgatctctgatgtatacattcccacattgcaaagagaatagtaagcacctgccacaccgcccatgcatccggctacaagcacggccaggaatctggtccttgtaacattaataccggcagcatctgcagcctctggattctcaccgcaggatctcatggaaagtccaagagaggttctatagatcaccaaaaatacgataggaaccagaagataggtaatatatgtaacaatattctgtgaaaacagtacctgtccaatcacagggatcctggacaaaagaggaatcctgatcactgataaaggtgttaccttaagaggtactgtctgaatgccaaaaatcacacgatagaagaaggtacagaacccggtgatcaaaatggcgatggctgttcccataacgatctgatgctgatgcatatacacagtagtcactccatataaagccgccacaagaagaccacaaatcatagcaagaagaaagcctgccagcatgcttccgctaagataagcaccaataaagccgccccatgcaccaataaggaaaataccttcaacagcagtaaccatcatacctgtacgctctgccagaacttctcccagtgctccaaggatcaaaggtgtactcatgaaaaatgctctggtgatcaaattaataaatacctgcatatcatgcctctcctttctgcagcttctgatgtttcagtttccggatctccagctttcttcttacaaagaaggacatcagcacaaacaacataacaaagccaagcataacgtcaataacgctggccggagcatctgtggaatgccccagtgctgtaccgcctacctgaagagttccgaaaagaagcgccgcaaaaataacaccgatggggtttgcacttgccataatggcgataccaataccataagatccaatatctgactcaaatcctgtaagaagcatatgctgcattccgttgatctctgtaaagcctgcaagccctgcaatggcaccactgataaaaaatgcggtcatacacattttcttagggctgatacctgacatcctggctgcatcctgattcagtcctgttacacgaactctgtatccaacagatgtatgatacaggataaaccagatgaaaatggctgctgcaagagcgatcacaatcccaagtgaaactgaagttccaggaatgatcttaggaagccatgcagaattgtcaatatatgcagtcttcagatattcgtgcttcggctcctgcagggcagtacggagaaggagctgcatcacgtactgtactacatacgtggacatcatacttaccagaaattcattggcattaaattttgctttcagaaatccaatgagaagcccagtcagtccgccgcccagaatacttgccgcaaatgccagaagcagtaccactactcccggaagctttgtctgcagtgccagggtagttgccactgcacaaatacatcccacataaaactgcccctgtgcaccaatattataaagattggctttgtaggtgaatgcaaaagcaaggctggtaaggatcagcggtgtagtcttgatcaggatatttcccatggtaaacttatctgaaaaggtttctgtaagcattatcttcagggaatccacaggatccacgcctaaaaggggaaggaatgcaaagctgacgatcagtccaagtacaatggccagcaccgtccataaaaggaaatcctttatttttccgttctgtttcatgcctcttcctccttatccggctgataacctgccatcagaagaccgatcttctctgtggtaagttcaccatttttgtaaatgcccatgatcctgcccttatacataactgcgatcctgtcagacagtgcaaatatctcagacaattctgtagaaacaaggatcacggacttgccgctgtttttctctcccagaatagttttatgtacataattgatggcgcccagatcaaggcctctggtcggctggtcaaagatcaccaggcttttccccatatctacttctctggccacaactaccttctgctgattaccgccggaaagactgcctgcagttacattgcagtcaggagccttaatcttgtattctttgatctgacgttctgtatactggcgcagttttttccagttaatgatcccatggcttacccagtttttcagataactggctttcagaagcatattctctgccagggacatctccgccaccataccgtaacggtaacggtctgatgctgtatatcccatccccatggtgatcctgtccttaacgctggtggccgtaatatccctgccgtccagaaggatcttaccctgggtaggggtctctgcaccgtaaagtgcttcacacagctcctgctgcccattatcggaaacaccggcaatcccaagaatctctccttcatggactgtaaggttaatatgatccagcactggtgcactatcctttttctgaatggtcagatcttccacgatcagccgtttctttttcttttccagatcatctcctcccggtgcctgcaaggtttccagatcatgaccgatcatcatatgtgccagttctttttcattggtatcttctctttttacggttccgcagatcttaccgtttcgcataaccacaatggtgtctgacacctgcatgacttctttcatcttatgtgtgataaagacaacagaattgccttttgacacataatttttcacaaaggccatcaatgtatcaatctcctgtggagtaagaactgcagtaggctcatccatgatcaggatccttgcattcagataaagagctttcaggatctctaccttctgctgggtgcctactgaaagattcttgatatattctccggcaggcacatcaaacccgtactgctttgccagtgcctctatctccttttctttggccttgatatccaccctgcctttgcaattgccaagaatgatattttctgttaccgtatgtgccggcaccagtgaaaaatgctgctggatcatggagatccccagtgccattgcttctttgggggatgctattttgcgttcctttccatcaatccatatctcaccggaggtagcatgataaaggccgtagaggattttcatgatcgtacttttacctgccccgttctccccaagaagagccaccacttctcctttatggactgtaatggaaacgtcatcatttgccagtaccttggcaaaccgtttcgttatgtgctttaactcaataaccgcttcactcatatctgcctcctgttcaagaatgcctcggcattcttgctgcgaggtgcgcgtcatgcaattgcatgacatacttctcctgcgcacctctgcaatcctgccggaggctatatcagctgggggattgactcccagctgatgtaccaaaagggactgctgcacaatcccacgcaacagccccttcggaagatcttttgtaactgttcccgcaggatactacctgctgaatcattacgatcttttacttatttctcggaaaaatactgtgtgaaatcgatctttccgtctgtgatatctttgattgcctgatcaacagcagctttgcactcatcagagcatgcatctgaatatttagcttcaaatacgccttcagcaacgccaacttcctgtgcacccttcagctcaccctttgcaacaccctggatgatccacggatatacatttgcccagttcatcggtacagaaccgtatacacagctgctctcatcattcttatctgctgcaaaagcaacaaacttgccttctttttcttctgctgcctgaacagcaccggaagcaccctcattagagtagcagaatacggtgtcagcgccattgtccatcatctgcgctgccatgtcctttgttgcggaaacatctgtccagctgtttacgaaagaacgtgcagtggtaaaatcaaggcctctctcctcacatacagactcggctgctgcatcataagtatccatcagcttcaccataggagcattggactcgccgcccatgactgcaaagtttccgttctctgtagcgtagcctgccataatacctgcaagataagatccctcatactccttggggaatacaggaaccatattgtctgtatcactgatctggccgttgatcactgtatatacggagtccggatactgtggtgcaactgctgcacaagcctcgtcaaactggcttcctgcagacaggatcagatcgtatcctttctcaccatactcagtaaaggtggattcaaactcttctaccggaacagactctacaacttcgatggatgtgcccagctgttcatcgcaggcctttgctcctgcattattgctggcattccagctctggtcatcaatgcttcccggaaggatcagtacgatcttcatagatgcgtaatccggctcatcagccataaccggtactgccggcacagcagcaactgtcagtgctccacataataatgctgcaacgaatgacttcttcatgttaaattcctcctttttctgactgttgttcatttgttagcttcagtatagcacattcaaactgtgaatacaatgttatttatgtaaaataaataatttttttttggtttatacaatttttttcagcattttaccagacatgtttgatttctacatgtcttttgttgttaaatcgtataatgttctcaaataaaaagcgtcttctaaagaaaaaaaaggaacaagccctctgtggactcgctcctttgctatcttcccgcacattatagcaggtttgtttaggattgtaaatcctattttgaattatccgatcacatcactcatatcatacttcccagccggcttgcctgcaaggaatttggctgcttctacagcacccttaccgaatacagccttggagtatgcagtgtgcttaaactcgatcacttcgtccggtcctgcaaagatcacttcatgatctcctacaatggtaccgccgcgtacagcggagatgccgatctcctttggatcccttaactctctgcgctggctgcggtcgtatacataatgatactctccgtccatggcctcattcagactgtccgcaagagcaagagcagtaccactgggcgcatcaagcttcagattgtgatgcctctctacgatctccatatcaaaacctgcagttgcaaggatcttcgctgcatcctggatcagcttcagcagggtattgatcccaagagacatgttggcagaacgaagaaccgggatcctgcccgatgtttcttccacctttgcaagctgtgcttcactaaggcctgtggtacaaagtaccagtggcagactgcggcgtacacagtagtccatcagctgatctgctgcctttggagaggagaaatcgatcaatacatccgccggtgtatcacatgcttccatatctgtaaaaaccggataactgttattcccattatctgcaatatcaatgcctgcaacgatctgtgcattaggatccttctctactaaagaggaaatcacctgtcccatatgtccattgcagccatgcataataatctttaccatttgtaatccctttctgtcttatgcaagcttaatcccaaaatccttcattgcttttgcaagacgtgcctcattttcaggctccatttcgcataatggcatacgagtaggtcctacctgcatgcccataagattcagtgctgtcttgacagggataggattcacctcacagaacagcgcattgatcagcggtatagcatccagctgaatcttagcagctccttttacatctccttcaaggaacttagcaaccatatcatgagtctgccttggtgctacattggataacacagagatcacacccactccgccaagtgaaagaatcggaagtacctggtcatcatttcctgaataaaggtcaatacatccatctgccattgacatcatcttggcaatctgggacagatctccgctggcagccttgataccaacaatattcttaacattttttgcaagagaaacaacagtagccggtgcaagattacatcctgtacggcttggtacattataaagaatgatcggtgtatccggcacttcattggcaatggctgtataatgcctgatcagccctttctgtgtagccttattgtaataaggtgttacaagcagaagtccgtcagctccataggaagcagcctccttggacagcataatggcagtctctgtacagttggaaccagtacctgcgatcaccggaatacgtcctgccactttgtcgatagcaaacttgatggtctttaagtgctctccatgtgtcatggtggaagactcacctgttgtcccacagatgatcactgcatctgtgccgcctgcgatctgctgttctaaaagttcttccagcttatcatagtttacctttccatcctcatacattggagttacaattgcaacaccagcacccttaaaaattgccattaatcttcctccttatcttctttgtataaactatgagaaacacgctccgcgagtttctcaagttatcgcggcagtcgccaaggtctcgtgcaagcacggactttggctcgttgctcgcgtaaatcagggaatcctgcattcatgcagctcttccctccgccagattgtttctgttgtcagatcatttctgttgtcagagtggttacactgtccacatagggtcttaatgaatccggcatcatccttccggtcagcactacatgcatagattcattcttcagtttgagaatgtctgtgatcatatccaatgtagcgatcccattgtccagaagccccaggatctcatccagtacaaggaaatcacattcctgggtggcaactaccttcctggagaaattcagtccattcagaatattgcgtttctcctctgacttctcctgttctgtcagctcctcatagcaggtttccattttctcgaagcgaaaaatcttaatatccagttcatccagttcttccagaaaatccagttcccggcgttcatttcccttcaggaactgtatgatgatcacacttttgccctgagtggatgcccgcaggctctgtcccattgccagagtagtctttccccggccacttccacagtaaacctctgttaattctctttccataatatttcctctcgacgctgcgtccagctggatttccctgtcagaaaaagctgccggtcagtgacattttgctgctgtaaaatacaggcgcaaactacgccattttcaaataatatccttatattacctcagtttcgccagaattgcaagcccagcatgactggtaatcattttaagcttaggcagcatatcattctatgtactctagcttgcttacagaaatctcataggcagtccgcttttctgtttcgttttccccgatgcgcttcatatattccctgctctgtatcctgccccagatcagtacatgaccgcccacttcaaaggcagaagcgtatcttgcatttcttccccagcaaatacaggggatataatctgatttaccataaggtctgtttacagccagtaaaatatctgcgatttcccttccaagaggagtttttctataaacaggcggcttacagatatagccgtccagaaatatctgattgaccggatcagcctcatcatcttcctccacaaatctcagttctcttacaaaaacagacaataccagccgattatgtttttcttcgtgtcggttataggaccggaactgtccatggatctctatgtattcccccacatagtcctgggttacatccaccagtctttccgaaatcattaccggaatcctgtcctctgaattactcaatcttttcactagcagctccatggtataaaaaccttctccgaaaacctggtgactgaaggtaaaacctgttgcgatcttcccaatgatccacacctgattgttttcaataattttatctgccataatgtagctctccttcccttcactttgcgtgttgctgccctcttgggcgggtctatattatgtatgtagataagatcttttttagaaccaaaaaatcaggaaaatcaaaaaaatcattccaacaccttgtaatctgcgaaaaatgtggtaaactgaaaaatcggacaacttatgagaatgaaacacattaatatagaaagaatagaaagaaaggaattcgattttatgaagaccaaacgcgaagatgtacgcaatgtagccattattgcccacgttgaccatgggaaaaccacacttgtggaccagcttttgaaacaaagcggcgttttccgtgcaaatcaggaagttcaggagcgtgtcatggactccaatgatattgaaagagaacgtggtatcactatcctctccaagaatactgctgttcattacaaaggtgtaaagatcaatatcattgacacacctggacatgctgatttcggcggtgaagtagaacgtgtgcttaagatggtagacggcgtcatcctcctggttgatgcctttgagggtgctatgccccagaccaaatttgttttaagaaaagctctggaactggatctgcacgtgatcgtctgcatcaacaagatcgacagaccagaagcaagaccggctgaagttgttgatgaggtactggaactgctcatggatctgggtgcttctgatgagcagctggactgcccgttcctttatgcttcagccaagacaggtcatgcagttttggatctgaaggacacaccggaaaacatggagcctttatttgaagctattctgaaatacatccctgcaccggaaggtgatccggatgcagacacccaggtactgatcagcactattgactacaatgaatatgtaggccgtatcggcgtaggtaaggttgaaaatggctccatcgctgtaaatcaggagcttactcttttgaaccaccatgatcctgacaagcgccagaaggtaaaaatcagcaagctgtatgaatttgacggtctgaataaggtggaagtaaaagaagcttccattggttctattgttgctatctccggcattgcacagattcatatcggtgataccctgtgcggtggtgagaatccggaagcaatccccttccagaagatttctgagcctaccattgccatgaatttcctggtaaatgacagtcctttagccggacaggaaggaaaatatattacttccagacatcttcgtgaccgcctttacaaagaactgaatacagatgtgagcctgcgtgtagaggatactgaaaccacagagtgtttcaaggtttccggccgtggtgagcttcacctttctgtactgatcgagaatatgcgtcgtgaaggttttgagtttgcagtgagcaagccggaggttctgtatcactatgatgagcgcggcaagaaattggagccaatggagatcgcatatgtagatgttcctgaggagttttccggaactgtgatccagaagttaagcgagcgtaaaggagaactgcagggcatgagtactgccagtgatggctctgtccgtcttgagttccatatcccttccagaggtatgatcggcttccgtggtgatttccttacttccaccaagggaaccggtgtgatcaatacggagtttgatggttatgcgccttacaagggagatttcccatacagaaaacagggttccctgatcgcatttgaggctggagaatctgtgacttacggtcttttcgctgcccaggagcgtggtaccttatttatcggacctggccagaaggtttacagcggtatggtcatcggacaaaatggtaaagcagaggatattgagctgaatgtatgtaagacaaagcatcttaccaacacacgttcctcttccgctgacgaagcattaaagctgactccgcctaaggtactcagtctggagcaggcaattgaatttattgatacggatgagcttctggaggtaacaccaaaaagccttcgtatccgcaaaaggatccttgatgcaagggatcgtaaaagagctgcctttaagaaaaactgattttacatccccaaggcctgccgctaaggttttgtccggatgtcaagcggatattcgcaatccgcttcgctacttgctcataaccgaataactgctccgcagtttatcagaaggagcttgcactcctcctgatacaagcaagtccccacccactgcttattgcttttcgcaattgaagcaggggacttacttgattcggttaaaataccctgtgctttccgcatgatctttcacggaaggtacagggtattttttacttattctttttccagttcttctcttcgccgcgcaagaatccttggaaagaaatgaagaaacagacaggtagtcactgtggcactgatcacatctgccagcggctctgaaagaaaagctgcatctgcagcgatcaccgccggaaagatcagaagcacacctaagaataaagttttacggaacatagagcagaacagtgcaagccgcacctgccccagagctgtagattcatctaccaaaggatactgtacagccaatggtatgatcatggctgtaaaaatccggatgtatcgtacagatctgttcaggagcatttcatctctggtaaaaagtgaaacatatagcggggatacagtaaaggttacaatcgtcatcagtccgcaaaaaagcagacacagcccaacaatacacttcattgccttctttacccgctctccatctccgcttccgtaattatagctgatcacaggctggcacccaagagtaattccgcccagaggcatggtgatcagaagcatatagctttgtacgatggtggcacaggttacaagaatatccccttcttttccccctccataacgctgaagcactgtatttaatacgatcaggatcacgctgtcaaaagcaatgatcaaaaatggggacatcccgaaagcaaggatccttttcacggttttccaggaaaatcctccccagccaagacgtaccggcatctttttgctgtgcaggaaaagaagtacagccacgcaggatgccatctgggagatcacggtagcaaccgcagcccctgccacacccatgtggaatacaaagatgaacaccggatccagggcaatattcagaattgcaccaaggatcactgttcccatcccaaggccggagaacccttgtccgatcagatagctgttcatgccacaggccatcagggcaaaaaaagtacccgccgtgtaaatggtcaggtaggtatccgcatattgaaaagtggcattgctggctccaaaccaaaggatcagcttttcctttgatagaagaaagacgatggtaagaattgctgacagtgcagtaagcatcatgaatccattattcatgatcttttttgcttcttttgtattcccctctcccatacgcatagccattaaaggagatcctcccaggcccacaagggtgccaaaggaggacaataatgtaacgatcggagcgcacacacctgctccggccagggccaggctgcccacacccattccaatgtacatacggtctacaacggaatacagcacgcttaccagctgggcaagcatagtgggaagagccaggcgcagcaccagttcaggcacaggatctttaccaagatcgtttatatgtgccttctttttctttttggtgatcatggtatcaggcaatttcaaactccttcgccagctttgcaaactgaggcagggaattgataatggtatcataagatacacagtatgccagacgtacatatcctgggcaggcaaaagagctgcctggaaccatcaggatattatatttcttaccggcttcacaaaacttcttctcatcttcaaccggtgactttacaaagagataaaaagcaccttccggtttgatgcactcaaagcccagatccttcagcccattataaagagccagtctgttcttgtcataagcagccacatctacctctgcatccacacatttggcgatcaccttctggatcagggatggtgcattcacactgccgatggtacggttggcaatggctgctgcagtgatcatctcctggcttccgtccgcttcatccggaatcaccagatagccaatacgctctcccggaagggaaagtgacttgctgtaggaatatcctacaatcgtattatcatagtatttggtcagatacggaacctgtactccatcataagccagttctctgtatggctcatcagaaataagatagatcactgtcccatattccttctgctttgcttccatgatggcagccagcttcttgatggtctcctcagaataaacaacacccgtaggattatgtggagtatttacgatcaccgccctggtgttgggagtgatcttctcttcaaattcctgaagattaggctggaaggtagcagtatccggtgagatttccaccagctttccgtcgtagttctttacatatgcaccatattccaggaaatacggtgcaaatacgatcacttcttctccagggttcagaatagtcttaagggctacattcagaccgctggcagcgccaactgtcatgatcagattctttgcggcaaaagctgtaccaaaacggcggttcagggaatctgcaattgcctgacgcacatcctcaaagcctgcattgctcatatagccgtgaagtacagtaggctctgtatcatttaccagttcaatgatggcctggcgtacacagtccggtgccggtacgcttggattgccaaggctgaaatcaaaaacattctctgcaccgtaaatccctctcaaacggtttccttcttcaaacatcatacggatggcagaattgtttttaacgtaaggtttcattttttctgcaatcatggttaatctcctatcagtgaaattccttttttcaatgcttttttatttaattccaggaactgcggcttaatattggcctccaggatctgctcccagtggatatgctccagccccattgcacggatgatggttcccagaaggatcatattggcagccttttcattaccaagctctcctgcaaggcgggtagcatcgatcacctttgcctttacatgcttctggatttcttccagtacatcctccggatattcctcttctcctgtgatcacagacatggatggaatctcttcgttatttactacaagtactccatctggtttcagataatccagcgcacgcagtgcttccatcttctcgaaggaaacgataatatcagcctttcctttttcgataaccggagacattaccttttctccataacgtacctgtgaagaaacgcttccacctctctgggacatgccgtggatctcgctcatttttacatcatatccggcctccatcagacctgttgtgagaatcttgctggcaaggatggttccctgaccacctacacctactaataaaatgctttttgtcatggtcacgcctcctcctttacaatggcagccttagggcatacctgggtacaaacatcacagcctacacactgtgctttattgatatggactttctttgattttctgtcataggacatagccgggcagcctgccttcaggcaaagacggcagcctacgcacttctcttcatccactttgttctttgtaacaaacagactgtcaaattctgctttatcctctttggaaaatttctttaatgcacatggccagcgggtaatgatcacggacggctcatccagtgccaggcatttatccagtgtatcatctacctcctgaagattgttaggattgatcacatatacatgcttcatgccgatagcacgcaccagatcctcaatacggatcagagtagtctcctcacctttggctgtataaccggttcccggattattctgatgacctgtcattcctgtgatcctgttgtccaggatgatattcactgtattgctcttattgtacactgtgttgatcagtgaattgatacctgtatggaaaaatgtggaatcgccaagtacggtaaccactcttctgttcacgccttccatattgaaggctctttgtgccccatgtccaaggctgatgctggctcccatacatactgtggaatccattgcactatagggctttgcagctgccagtgtatagcatccgatatcgccgctgatcataatgtccttacgctttccaagccggtagaaaagacctctgtgaggacagcctgcacagaaagaaggcgccctgccgatcagcttgctgtggtcaaaatccattacctgattttcttttcctgtaatgcaggcacggatcacatctggtgtcagctctccatatgatggaaaaagctctttaccgatgcaggcacagccctgctgctttacgaattcttcaatatagggatcattctcttccagaatataaaccttatctaccttagaacagaaatctttgatcagacctgcaggcagaggattggtaaagccaagtttcagataagaggcttcctctccgaatacttcctttgcatagtaatagcagataccggaggcgatcacacctacacgggtatcccccatctcaatccggttaaatggtgttgtctcgctgtaagcagcaagcttctccattcttttttccagatttacacgcagcttccttgcaatagcaggaaggcaaacgtatttggccggattcttctcccatgtcttaggctgctgctctgccctgtctgtcagctcaacaatagatttggaatgacagacacgggtagtcatacggatgataaatggggtatcaaattcttcgcccaggtcataggctgctttcaccatatcaatacattcctggctgtcagaaggctccatcatggcaatcttggctgctttggcataattgcggttatcctgctcattctgggaagaaaacatcccaggctcatctgcagttacgatcacattgccgccgtttacccccatgtaagcccaggtaaacatagggtctgctgccacattcatgcccacatgcttcatagatacaatacttctcagtcctgcaacagatgctccaatagcagattccatggctaccttttcattgggtgcccactctgcataaatctctttgtatgtagacaggttctccaggatctctgtacttggtgttcccggatatgcagatgcataagaaacacctgcctcatatgctcccctggcaatggcctcatcgccggtcattaatttcttcatttgctacctcctaaatggttctcttaatacatgattgtataccttgacaccttatcgtgtcaacgcaaaaaagtgacaggtttccctatcacttttttacactcagtcgtaccagtgcacggtgaagttttgcttgtgcaagtttgtattcctgatcagtcaaaccgctttcggcaagcttttcttctgctttttgctttgcaacatctgctcggtggacgtctatgtcctccttccattcccaggtggttgccagaagactgcagctgccgttcatcacagagatcatacccccgatacatgcggcagtccttctgctgccatctgccatcaccacactggcttctcccatgccaagggcagtgcagaaattacagtgtctggcaagaatggcaagatctccggtaatactgcggcagaccacacgttctgcctctccttcaaacagaagcccgtccggtgtaccgatccttaaaggaaatgtactcataggcagcctcctttactgattctggctctttgccttttccattacatcatcaatggttccggcaaacaggaaacagctttcagggatctggtcacattccccgtcaagaatcatcttaaagcctcgtaatgtttctttcagcggaacatactgtcccttcatacctgtaaactgctctgccactgaaaagctttgggacaggaatctctgtaccttacgtgcacggcttacagtcagcttatcctcctctgacaattcatccatacccatgatggcgatgatatcctgcagttctttatatctttgcagcactctttgtactgcacgtgcgatctcataatgctcgctgcctactacctcaggagaaaggatacggctggtggaatccagtggatccactgcaggataaataccctgactggcaatatccctggaaagtacggtagttgcatccagatgggtaaatgtggtagcaggagccgggtctgtcaggtcatctgccggtacataaactgcctgtacagatgtgatagagccctttcttgtagatgtgatacgttcctgaagagtacccatctcagttgccagtgtaggctggtatcctactgcagaaggcatacgtcccagaagcgcagatacctcggagcctgcctgtgtaaacctgaaaatattgtcaataaacagaagcacatcctgattcttaacatcacggaagtattctgccatggtaagtccggaaagacctactctcatacgtgctcccggcggttcattcatctgcccatacaccagggcagtcttgtcaataacgccgctttccttcatctcattataaaggtcattcccctcacgggtacgctctcctacgcctgtaaacacagacagtccgccatgagcagtagcaacattatggatcagttccatgatcagcacagtcttacccacacctgcgcctccaaacaaaccgatcttaccaccctttgcataagggcagatcaggtcaactaccttgatacctgtctccaggatctctgttgccggtacctgctcttcataagcaggcgcaggacgatggatcgcccatttttcttttgtttccggtgccgacagattgtctaccggatcaccaagcaggttaaataccctgcccagacattcttcgccaaccgggactttaatgggactgccagtatccacagcttttgtccctcttaccattccatctgtggaattcatggcaatgcatcgcacggtatcatcaccgatctgctgtgccacttccgcagtcagcttcactccatgattatcaatctcaatggcattcagcagtgccggcagctggtcatgggcaaaacgtatgtccagtaccggcccgatcacctgcactacctcgccaatgtgtttatcattcatcctatatttacctccaaattatacgccttccgcaccgcctacgatctctgtgatctcctgggtaatgcttgcctgacgggctctgttgtaatgcagatttaggctttcgatcatgtcctgggcattactggtggctgattccatggcatttcgtctggcagccagttcactggccagactatcacacacagccccgtagatcaggcctgccagatattcaggcacaatggcatcaaatacctgtgctgcatccggctcatacagaatcagattgcggacaggctctctttccccactgtctcctacaagatctgtcaaaggaatggccgggatggcatccggtttctgggccagcatggaaataaatctggtatagcaaagatctatatgtccaaagctttcctttttgaattcttcacagagaatattggcaatctcgtaacagtctgccactgaaatatctgcgatctccccaaatgcatctgtcacacaggggatcccttttctctggaaatactcaacagcctttttccctatgggaaggactgtatattcctttccatggcttttttcttccaggcatttaaacagatttgtattatatccgccggccagtcccctgtctccggcaattaccacatagcagtatttgccgcttttggaaccggctgcatatacggatgtaaaatcagtattacctttggcgatctcttccagggtcttatgaagagccaggaaatacggtctgcttacttccgcacgttcttttgccttacgcagtttggaggatgctacaagctccatagccttggtaatctgcatggtgctttccacacttttgatacgcagctttaccgctttcatatttgcagccatctaaaatcctcctaatcatttaccagttgccggctttgtatccagaaagctttctgtatactgttccagaacctttttcagttcctcttccgtctcgctctccagctttccggaagaacggatcttttgcatcactgcaactccctctgcatcattgtcaagactggtaaaaagtcctgcctcgtattcttttacatcttccactgcaacccgggacaaaataccctttgttacagcataaagaacagccacctgcttctcaacaggaaccggttcattacgtccctgcttcagcacctccacaatacgtgctccctgatccagacgggcttttgtatcagcatccaggtcagacccgaactgtgcaaagctttgcagctccctgtattgggaataaacaagcttcagggtaccggcaaccttcttcatggctttgatctgtgcgttgcccccaaccctggataccgaaatacccggattgacagcaggcatgataccggaatggaacagctctgtttccaggtaaatctgtccatctgtaatggaaataacattggtagggatatatgcagatacatccccggcctgtgtctcaataataggaagcgcagtcatggaaccgcctccatgggcatcatccagcttcgctgcacgctccagcagtctggagtgaaggtagaatacatctccaggatatgcctcacggcctggtggtctgcggatcagcagggaaagtgcacggtatgccactgcatgcttgctcaggtcatcataaatgatcagcacatccttacctttgtacataaaatactcacccatggcacatccggaataaggtgcgatatactgaagaggacttgcctctgaagcagtagccgcaacaacaatggtgtaatccatggcaccattctttgacaatgtttccacaagggaagccaccgtagatcttttctgtccgatggcaacatagatacagatcacatcctcacctttctggttgataatcgtatccgcggcaatggtggtcttgcctgtctgtctgtcaccaataatcagctctctttgccctcttccgataggtaccatggaatcaatggccttgatccctgtctgtagaggctgattcacactttttctctcgcagatacctggtgcaggactttcgatcgccctgtactcctctgcttttataggaccggcaccgtcaatgggctgaccaagtgcattgaccactcgtccgatcaatgcatctccggccggtactgacactaccttacctgtacgctttactgtctggccttctccgatccctgtatcatcaccgaacaatacgatggatacgctgttttcttccagattttgtgccattccatagcttccgtcctcaaattcaagaagctctcctgccatacagttcaccagtccgctggctctggcgatcccatcacctaccataaggacagttcctgtttcattctgctgaatagcattttcatagtatttaatctggcttcggatgaccttggttatttcttcaggtttaagctgcatgtttccttccatcctttaaactatgacttcatttaaactatgattttatttagactatgacttcatttaaactatggttttatttagactatgacttcattcaatttctttgacatttctgacaaacgtccctgaaccgttccgtccagctgtctgccttccagctccacacgaagacctgctaccactttcggatctgttttctgggtgagaagcacctgcttgccgctgatcttctcaagctttgtcttcagggctgccatctgtgtctcatcaagaaccacagcactggtaacaagggcttctgctatattgtgatcctcattatagcgccttctgaactcctgacagcagccggaatactcccgcataagatcgcgctggcagagtagcttcaggaaattcaccagatacctttgcgcctggcctccgaaagcctgctcaagaagctcttctcttttttctcctggaatggaaggctctcccagcagcttcacatactccggattctctctgaaaagctgacgcacttcctccatctgctccatcaaaacgtctgtaagctgttcttcggcagcaagttcatacaaactgctgccatataatctggcagtctgtgtcatgatgcctctcctacattcgatataaactcatcaataagctttgcgtgatcctcttcactgatctcacgctggatcactttcccggcgatctccatagcaataccgccgatctcattctttacttcattcactgccttccgtttctcctgagcaatgtccttctcagcttttgccttaatggcggctgcctggtctgcagcctccttcaggatctcctcgctctggatggcagctgttttctgtgcacttgttacgatctgatttgccttatcctttgcatccagcatattctgctcgtattcctgcttcattgcatctgcctcttccttggccttctgggcatcggtaatctgggcatctgccatggctcttcttttttcaagcatctcattgattggcttgaacagaaaacgcttgatcagatacatctggataaaaagattgcagatctgggccacaaatgtccaaggcacaattcctacaagttcctgtacctgcattttataacctcctgtccggtgttgctttttcgtaccttatgcaaggaatttcatgaaggttccaggtgcaacgaagatcaggagcaatcctgtaacgaaaccgtaaatacctgtagtctctgcaatagcacatccaagaagcatagtacctgtaacatcacctttacactccggctgacgaccaatagcctccaatgccttcgcaactgcattaccttctccaataccaggtccgatacctgcgataagcgcaagacctgcaccgattgcacaacctgctaacgcaataccttttgctaaaatctgaaaatccataattcaatcctcctgagttttattatttcctgtgttgacttcatttatggcaatgccgctgacatgcggcatgtccgtttgatttctaaccttcttctgctgcattggcaatatacataacagtcagcatacagaagataaatgcctgcataaagccggaaaaccagtcaaaatatacagacaggatcgccggcacacctacgtcaagaataggaatctttgataatacctgtcccacgatccccgggatcaatccaaacaaccgggagcttgccactgccagtgctgcatacaaaagtccgttaataaccacacctgaaagaatgttgccaaaatgacggcaggccatactgataggtgttgcaagttctgataatacattgaaaggtgtcatcaccgggatcggtgttgtaaagcctttcagatatccgcccacaccattgatcttgatcttctgggatgtgatcatgataaaaacaaccactgcccaggctgcttctgtggaaagatctgcagtcggacttctaagaccaaccagactgatcaggttggacactacacttgtaacaaacaacgctgctacaaaaggaatcatcttcttaaacttttctcccatatttccgattacaaacttgttggcagtctccaccagaagttctgcaaccgcctgacgcttggagatcttctccactttcaggtcatgggtgagccagatgcaaagacctgtgatcaggatcatcaccagccagcttaccagcagtgtttctgtgatctggaatttcccaagaacagggaaatcaatgggaaaggtgtaaaatatccttccaccagttatatctatgtccatcttcgtctctcacctcctgtctttttaagaatgtgctctttttaagcatgcatagcacgaaacaacccatacatatcatgaaccggagctgtctttcttttttccaaaaatgcctgcgatcttaatggctgctcctggaaaaagcagaggaagaagtcctgctgcaaactgaaaatatggtgttgtaatggctacaatacaccataccagctgcaaaaacattctcttggagtagctggaacgcatcactctctgggcagcgtcctgattctccagggacacgattctctgaacggtaatccccatggtaaaaaagttcagtactgccacaataccaccgcataatccacccaggatcacagtataatcaaagggtaccttctcaggcattgccacgtgaaggatcccgaataccacccacatcaggatcactcctatggcggtacctgctgctactttttcagtctctttttttactgctggctggatctttactctttcattgctcatattcctgaaatcctttccttcacctttcctgcatctgccttctttctgattatcttctgattgctttgaccgtgtgctgctttccttcgtctttgtatcctgattttccattaactgtgtttgttaaaggataccttctgttcctgatcctgcttcttctctttcttcatggtgatccggtaaaacttgtaggctaccgtaaaggatccacccaaaccgaaaaagaatccgggaatatatacccagccgcccagaccaaaactggatgtaagccaccagcaaagtcccagcatcaaaagggtgggcgtaatcaaagaaaggccgaactgagaaacaagactcatatttttaaaaatatttgtcaattctctcatattccggcccctttcttacgcatttttagatatttatcacaatgtttagcttatcacaatccctgaaaaataacaactttttttgtttgtacaaattccgtttactgtctcaaatttgtgcatttgtccaggattgtctaatcgcattttggtgtttttggcttattttttagtgatttttcggtactgttcaaacttttcgtcccatactttcgtatcctgtggcatatagtctgctatttcgaatgtggcacgaaggatcctggcattttctttctcatctgagatgcagcccagtgacttcagctgtaccatagcattgccaactgcagtggcctcaataggacctgcaaccaccttcttacctgtagcatttgcaataaactggcaaaacaaacgatcccggactgcaccgccaaggaaatgtactgtatccatcctcttacctgtaatcgcttccaaatcatggatcgcctgacgatactggaaagccagagactcgatcactgtcctgtaaaattctccctgtcccttaggcggcttctgccctgtcttctcacagtattgccggatagcagcttccatatccacaggtgcaataaataattcatcgtccacatccaggaaggcagtaaaaggctttgcttttgcagcagcatccagaaggaatccgtaatctgtatccttcccttttctttcccagcttttacgaagctcctgaaccagccacatccccataatagtattgaccagcttgatcttcccataggctgcgccttcattggaataattctgttcaaaaacttccctggtgatcacaggctcgtctatgatggagccgataatggaccatgtgcctgaattaataaaaatatagtcttctgtttctgcaggaacagcatgtgctgcggaagcagagtcatgctgtgcagcagcgatcagcggaacaggtgcctgtccttcccgtccgatcagctgagcaacaaccgggctaagataccccttcacttcaccggtcataagaaccttaggaaatacggatctgtccatacccagtttcttcaggatcttctctgaccagtccttctttttcacatcatacatctgcgtggtagcagcgcttgtatattctatattcttctgccctgtaagcagaaatcccagtacatccggaatcatcaggaaggtacgtccatcccttgggatccttggatttctcttcttcagacccagcagctggtaaaccgtgttataccacatatcctgaactccggtctcttcaaacagaacgcctttcccgaaaatgtgctctgcttcctcgatcatcccggaagactgatcatccctgtaatggaatgggttccctaccatctcatcagctccatccagcatagcaaagtccactccccaggtatccagtccgatggcatcaatactctccagttcctgatttgcttttctaaggcctgtaataatctcatgaaaaatatgcagcacatctgtataaaatctgtcacctgcgtgaatcccctcatttgggaatctataaatctccttcatatcaagcttcccatcctgtaaagttaccccgatcagtctgccgcttgatgcccccaggtcaatagcgatcaccgtttttgctcccatgtcaaattttacctcccaagccccaatttattgtgaataatcactaattttctattattctatcatactttagctgtgcattcaatcgattgaccattttttaaaaattaaaaaactgtgaaatctatagacgtaaatttgaaaaagtgtataataaaaaagaaatttcggttactgtggatttttagtccatcatcaatgatatttaacaccaaaaggagacgaaaccaatgaaaaaaatggcatctgcttctattgccatcctgtctgtttccgccttgttcctggcactgggcaatcatttcctgcagcccgttactggccctatcaaagtcaaagcccaggacaaagccttagattcgaacagcgaagaacaggctccactactctctcagatcgatacctcttcaaagattcaacctggtgcgaagattgctgtagtaagtaaatccaaaaaaggccagttctggagccttgtacaaaaaggcatggaacaggctgtatctgacgtaaatgaagcatataattttgaaaaagacgataagatcacgatgacctttgaaggatcctctgatgagacagatgtggagagccaggtaaataccctggatgctgttattgctgagaatccggacgtggtatgtgtatctgccggagacagcgaatcctgccaggcccagttggaatcagccagagataacgggatcccggttgtgacctttgactctgatgtatccagcgaggatcttgtttctgcctactgtggcactgacaatcagaagctgggggatatcgcagcgaagcgtatggcccattacctgagcaatcatggaacagtagcagttttttctccacaagagaagaccttaagcagtaaatccagagtagaggccttccaggagagtattgcagattatcctggtattgaagtggtacaggtgatctattctgaccaggtagatgatatggaggcagccattaagggcgtactggagatttatcctaagctggacggtattttctgtacgaacggtgatatttctgatctatgcctgtctctcgtgcaggacgcagaccgtgattccatcatttttattggcacagatgccacatcagcccaacaggatgctatccgtgatggtgctgaggtgggcaccctttcccaaaagccttatgagattggatatcagaccatccttgcagcactccagactaccactgaagattcattttccagcaaacagaccactctttttgatccagcctggattgataccaccgctttggatgatccctattacgctgactacatctatgagtagatcaccaaggatagctggctttggcaaagcatataaaaattttgctctgttatagtgattttttttagagggagaagctcttaaaggcttctccctttggttttaccttaaaatgcattttctttctgcttccaggatataagaaagtaagactgcaggcgcaaagcccaagtgctgtatctgttgttccaccatacttccgatcccctgtaagcggcattcctgcatgtgccatttgcacccggatctgatgatgtcttcctgtatccagtttgatttttatgagaaagcgttctgtttcttcatggatcacctgatatgaaagcctggccttttttgctcctggtgtgccttcggctacaactgcggacatattggtacgtccgtcttttttcagataatcttccagtatcccctcttctttttccggcttttcttttgtcactgccagatatattttttccatctgtccgcctaaaatctgcctgctcagttcttttgcagcaaagggtgtatgtgcaaatacaagaatcccttctactggctgatccagcctgtgtacaatccccagataaggcattttgccaggttctttcttatacaaataatttttcaatgcactttccatgtctgctgatccgatccgtgcattctgcactgccagtcctgccggtttatggcatacaataatatttttatcttcatagagaatatagtcttcaatctttccgctccacatgatcgttctccttaagtatttcgcatatgaataaatatgatgttttattatatccttacttcttcttccttacaacaccaaaacacaaaacgagacggtcaccattttcctataatataaaatgatgaccgtctcaaaaatcttcgttattcaatttttcttcctctttagatcatttacaatgtaacttctatggtatatctcttaggatatctattgtttattgatatgttctgttacgattgtctggattgaaaggttctctattcagttttattctttacgtgttcttctttgatttcctgctcataaacgatatgatctttatcattcggtttatttagaaagttttatagatttgggattataatttcacggattataatctgttgatcgtatgtaatcatacttctgatgcaaagcttcaattcatatctaaaatttataaaatacgagtttaaaatatcctgtttataccttaaaattataaaatacaaaactcaaaatatcttgttc

SEQ ID NO: 48 - DNA, 1056 bp, Unknown
  gut microbiota DNA sequence
ctttggcctctgcaaaagctttctttaataattcttcatcaaactcataatgatcaacaaatttatattcccatctttgacagttagtaaaagacaaaacagctgcaaatcccgtatttatgggctctgtggctgtttgttcgtttgcatcgatgtgtgctatatttttgtttttgtgctagttgtcttttttgtctttgaaataattcctcgcatggaggcttttgatataaattcaaagtctgttcttaatccaaatgaactgtgaagagcatctgttagttttgttcgtttgtaagaaggaatgtaaccactatccttgcttaatagtgtcatattcataccacgtagtgtttccaaaatctgagtacatgtaaatccttccccaagtttcttttctaataatctatatactaagagactgatatagcacgtaagaaaatgtgctttgatacgatcatctctttgcacataaacgggtctggcttcgaaatcggatttcatgatccggaagttctcttcaatttcccagcgttgcttattaatcttaatgatttcagctgggttatcttcaaggtttgttacaacagcataaaaaccatcatacatggattcttcatttatgcgttctttatccaattcataaacagacttatctgcgatttcgccatctgatgtaatggaggttttttgaatgaaacgtgcggggtcgttttgattctttcctcgtctgcattttccgggagactgtatcattttcaacgcacggtcaatctgacgactacgaattttttgttgataagctttatatttaggagagtaagtaacaataatcgtttcatccatgtctccagtcacaagaggtacttctttgtaatagaccgtatgaaatacatcaggatccgtttcgtcaagggttcttagatcaatcattttatttgaaccaggaactttaaattgagttggcttcaaggctatttcgcgatcttcctgtttcatttttttcaatgagtaagtaattacataagaacgattcccaaagctgtttagaaatct

SEQ ID NO: 49 - DNA, 26926 bp, Unknown
  gut microbiota DNA sequence
ccagcaaaaaatatttgctagtgcgacagtcccttcttttgatttttgtacaaaatatcacttgcaatcaaaataatgtgatgctataattactacattgaagtagtaaagaggaaaagtcattagggagccaaagccggctggatggaccagtgggctttttgactatatatgagatatacatgctccggttttcccgctggcttcttccttaaaatctaaggaggagattttattatgagaaatctgaaaaaagtactcagtatcacagcagccgcagcgatggcagttacatccattgcacctgtatctgtatttgcagatgacgaggagacttttaagattggtgtgatcggacctatgaccggtgattacgcacagtatggtaccggtgtttacaacgcagctaagatcgcagcggatgagatcaatgagaatggtggattcaatggatataaggtagagatcctggacgcaggtgatgatcagggtgatcctgataaagccatccatgcatatgatgatcttcttgacaagggtatgcagatgctttgcggaacagttacatccggtgcttgtatcgctgttgccagtgaagcagctgacagcacattcctgtttacaccttctgctacagcagtagagagtattgagggaggcgacaatgaattccgtatgtgctttaccgatcctatgcagggtaccaaatcagcagagtacatttctgagaaaggtcttgctacaaaggtagctacactgtatgattcagcagcagattacaatgtaggtgttcacgatgcatttgttgaagcttgtgatgaatacggtcttgagcttgtagatgatcagaaatacaccacagatagtaatcaggacttctcagcacagcttcagagcattaagaagagcggtgcagagcttctgttccttcctaattattactctgacaatgcactgatccttcagcaggcaagcgatatcggtcttgatatcaaattcttcggagttgacggtatggacggtatcctgaatgttgagaactttgatacatcccttgcagagggcgttatgcttctcacacctttcgctgctacaggtgaggatgaggctaccaagaactttgtaaaagcatatggtgatgctaataacggtgaggttccgaatcagttcgcagctgatgcatatgatgtgatctatgctatgaaggcagcagcagatgatgcaggtatcacaccggatatgtccaatgaggatatcagtgcagcaatgtctgagtccatgctgaacatcacaattgatggtcttacaggagaagcaaaatggacagaggatggcgaatgcgataaagcaccaaaagcatatgtgatcaaagatggtgtttacgcatccatggatgaataatcctttgaacaaaatacagggacattttcctggatatacagggaatggccgttaagcaaacggggagacggttaagatgattgccgtctccctcttgtatttaagaagatcctggtgattttctttaaagtgacctagagcgtgtctgaaaatttacttccggaaagactaagactttagactatttacatccgggaatgaattttcaagcacgctcataaaatacaaatcattcatattacgaggtgggttatgagttttttggtatatttaaaagacgggataaaccttggaagtatctacgcaatgatcgcacttggttatactatggtgtatggaattgcaaagatgctgaattttgcccatggcgatgtaatcatggttggtgcttttgtgatccttaccgctatcacaaaagccggactgtcacctgcagtggcaattcttttatctgttgtgatctgtacattgatgggtgttgtgatcgaggcagttgcatatcgtcctctccgtaaagcatcatctaatctggcagttctgatcactgccattggtgtcagctatcttctgcagaacctggcccttttggtttttggtgctgatgcgaagagctttgttacagtgatcgatcttccgtctctgtctttgtttggtggagaactggtgatcaaggggatgacgatcctgaccattgttgcatgtattgtgatcatggttggattacagctttttgttaagaagacgaagcctggacgtgccatgcaggcagtttccgaggatcgggatgctgcacagctgatgggtgttaatgtaaatgcaaccatctcccttacttttgctattggttctgggctggctgcgattgcaggtcttttcatgtgctctgcatacccaactctttctccttacacaggtgctatgcctggtatcaaggcttttgtagctgctgtatttggaggcataggatccattccaggtgcgatgatcggcggacttctccttggtgtgattgagatcttcagtaaagcatatatttcttctcaggttgcagacgctattgtgtttggagtcctgattattgtactccttgtaaaaccggcaggattattcggcaagaatatccaggagaaagtgtgaggtggacaagatgaagaaaggtatgaacaaaacatcaaaaaacaattttattacatatggcatggtgcttgtgatctttgctgttgcacagacgctttcttccacaggaaatctgtccaggcttctgacaggtcttcttgttccaatctgtgtatatgtaattgcagccatttccctgaacctggttgtaggttattctggtgaattgagccttggacatgcaggctttatgtgcgtgggcgcatatgcaagtgcagtattttctcatgttgcaagcgatgtgatcccctctgtaccaagactgatcatcgcaattctcatcggggcagcagtagctgcactccttggtttcctgatcggcattccggtacttcgtcttcggggggactatcttgctatcgtaacacttgcttttggcgagatcattaagaatctgatcaatattttgtatgtgggtgtggacagcaaaggccttcatgttgctacaagctccggtgcgcttcagctggagccgggcggaaagcagatcattaagggggcgcttggtatttccaagacagctacactttataaagacattaaagattactttttcctgatcggtgtgattctggtactggtgtctctgtttgttgtacagaacctggtaaattccagaagcggacgtgccattacggctaccagggataatcgtattgctgcagaatccattggcatcaatgtaaccaagaacaaattgcttgcttttaccatttcagcagcgattgcaggtgtggcaggtgtgctttatgcacataacctttccatgctgaaggtttccgtttttgactataacctgtctattacattcctggtttacgtgatccttggcggtattggtaatcttcgtggttccatcattgctactattatcctgtatgcccttccggaactgcttcgtggattctccacataccgtatgctgatctatgcaattattatgatcgttatgatgctgtttaactgggctcctgctgcaagggatttcagaagcagagtagctgataaatttaaaaaacatggaaaagaaaaggaggcggcttgatcatggctattttagaggtaaaaaacctgtccattcagtttggcggccttcatgcagttgataattttaatattcagatcaaccagggggaattatacggtctgatcggacctaacggagcaggaaaaacaactgtattcaatcttcttaccggtgtatataagcctactgaagggatcatcaagctggacggtgttgatattacaggtaaaaatcctatagagatcaataaagcaggtgttgcaagaactttccagaatatccgtctgtttaaggatatgacagtgctggacaatgtaaaagcaggtctgcacaacaattataagtattctacctttacaggtgtattcagacttccaaaatattttaaagttgagaagcagatgaatgaaaaagctatggagcttctgaaagtatttggccttgatgcttttgcagattatcttgcaagcaacctgccttacggtgaacagcgtaagctggagattgccagagcacttgctacagaacctaagctgctgcttctggatgagcctgcagcagggatgaaccctaatgagactcaggaactgatggatatgatccgttttgtacgtgaccatttcaatatgacgatcctgctgatcgagcatgatatgaagctggtaggcggtatctgtgaggaactgactgttctgaactttggccaggtcctttgccagggcaagacagcacaggtgctgaaagacccggccgttatcacagcatatctgggagagtaaggaggaaacgaaaatggcaatgttagaagtaaaagatttgcacgtatattatggtgtgatccatgcattgaaggggatttcctttgaagtaaaccagggagaggttattgcactgatcggcgccaatggcgcaggaaaaaccaccacccttcagacattgacaggtcttcttagcgcaaaagaaggatccatcacttttgagggcaaggatattacaaagattccggcccataagatcgtggaacttggaattgcccatgtaccggaagggcgaagggtgttttctgatctgagtgtttatgagaatctgatcatgggagcttacacaagaaaggataaggctgagatccaggaaagccttgccggtatttataagcgcttccccagactggaagagcgtaaagggcaaagagcaggtaccttatcaggtggtgagcagcagatgcttgccatgggtcgtgcactgatgagcaaaccaaagctgatcgtcatggatgaaccatctatgggtctttcacctatttttgttaatgagatcttcgatattatacgtgtagtaagtgagagcggtacaaccgttcttcttgtagaacagaatgctaaaaaggcccttaccattgcagaccgtgcatatgtactggagactggaagaatcagcatgagcggcaaagccagtgatttgcttaatgataaggctgtgcagaaggcatatctgggagaataaggaggggtgacatgagtaattatgtgattaccattgcaagacagtatggcagtggcggccgtacagtaggcgaaatgctttccaagaagctggggatttcctattatgataaggacattatccgtatggcttctgatgacagtgggatccatgaaacactttttggaagagtggatgagtacagtagtgccaagccgcctcttttcaaaaaagaaagcatttatacaggagatctgatcccaccacacagcaaagaatttacatccgatgagaatctttttaattatcaggccaaaacgatccgtcatctggcagagacggagtcctgtgtgatcattggacgttgttccaattatgtgctgaaggattatcccaatgttttaagtgtgtttattcatgcatcctgggaattccgtatggagaaggcagcagagaagctgagcaaaacaccaagggagattgagaaattccttcagaaggatgataaacgcaagtttgaatattgtcgcagatttacaggcaaagagtggacagatgctactaattacgatctgtgtcttgacagcagcaagcttggctacgataagtgcgtagaggaaatcgaatacaggctggcacttcttcgggagaagcttaactaaatctgtgagcacaaaattacaataataaggtatgcaggcagcggggacttcagggttcccgctgttgttttatatcagctgggagaagatataccggtgtttccaatagtctattcagaagaaatctgcatatagtataggaaaaggcggagtggatttcaaaatggggaagaactggatcaaaaagatcagaacgatagcagctgcacttacatggagtctgttcctggcagcagtaggagtgggggctggagctttcaatcgggaaaaaaggcagatcatccaggtgatacagatagagaagccaaaagttgcccttacctttgacgacggtccaaacaaaaagtatacaccggctctattaaatgaattaggaaaaagaggaatccatgcctctttttttcttatgggtaaaaacatcccgggaaatgaaaagctggtgcaacagatgcaaaaggaaggacatctgttgggaaaccatacttataatcatgtagagttggataaaatccctgttgcccaggctagaactgaggtagagagaaccagtaatgagatatacaagatcactggggtgtatccccagtatgtacgtcctccctttggagcctggccgaaaaattttgaccttttggtgactatgtttccggttctttgggatgtggacacattggactggaaaagtaaaaatgtagattgcattatgagactggtacgatctcaggtaaaagacggctcaattatcctgatgcatgacggctaccagacttctgtggatgcagccgtgcagatcatggatgaactgctggagcgaggctatgaatttgtgactgtggatcagctgctgatcatgtaaaaactgggaacatatgtacttttactaatttttctgttataattccaatcatgaggtagatgaaatgtgaacaacaaggacatagttcttcagatgggagttacagatatatggatttatttgaatatgcgaaatcaaaaacaatggaaagagagtccccgcttgcgtctagacttcgcccaaggactctggatgaggtggtggggcagcagcatattgtgggtaaggacaagctgctttaccgggcaatcaaggctgacaagctgacttcagttatattctacggaccgccgggaacaggtaaaaccacgttagcaaaggtgattgccaatactacaagtgccaactttacacagatcaatgccacagtggcagggaagaaagatatggaagaggttgtcaagcaggcacaggatactcttggtatgtacggtaagaaaacgatcctgttcattgacgagattcatcgttttaacaaaagtcagcaggactatctgcttccttttgtggaggatggaacagtgatcctgatcggtgccactacagagaatccctattttgaggtgaacggtgctcttttatccagatctattgtatttgaactgaaggccttggaaataccggagatcaaggaactgatcctgagggctgtccaggatacagaaagaggaatgggcagctaccaggctatgatcgatgaggatgccctggatttcctggcagatatggcagggggagatgcaagaagtgcattgaacgccattgaattggggatccttactacaccaaggggagaggatgggaagatccatattactcttgaagtggcttctgagtgtatccagaagcgggtggtacgttatgacaagaatggggataatcattatgatattatttctgctttcattaaaagtatgcggggatcagatccagatgctgccgtttattatcttgcaaaaatgctgtatgcaggagaagatgtgaaatttattgcaagaaggattatgatcctggcttcggaggatattggaaatgcagatccccaggcgattcaggtagctgtggcagcagcccaggctgtggagcgtgtaggcatgccggagtcacagatcattctggcccaggcagcagcttacatggcatgcgcccccaaaagtaattcagcagtgaatgcaatttttgcagctatggattctgtaaaacataagcgcacaacagtgcctgcccatttgcaggatgcccattatggcggtcatgagaagcttggccatggcatcggctataagtatgcacacgattttcccaatcattatgtggagcagcagtatctgccttctgagatccttggggaaactttttatgaattaagtgatatgggatatgagaaaaaactgaaagaacatatggagaagatccgggagcaggcttaagaagaccatattctgccggagtatagagaaacagatataaaagtggaggggcttataacagctcctccattaatttatcatagattttctgatattttaaaggccaggccttacataccgcttccgcagcttccagtgtgggaacggaaatattcaggtcgatcagggatacgtttttctcaagaagctgacagcgaacagagtagtttccctgggatgtgatataataatcagcaggggtaacaatggaattctgtacttcataaccggctgtttttagaaattcggatacatctttacgaatctcaggtgaaaggtcagattcaaaaaaagaaagggtgcttgcaccatcagaggtgatctggtaataagaggaattggactttacccgcttgtagatcagtcctgcctccacaagctcggagatagcctgctgaagatgaaaataattggtataatcccggtcaaggataaattcagaaagctgagaattggtaagttccgtgtctgaatgggacagcatgtacaaaataataagcttatatactgtaaatggtgtttccatacgatcaacctcctaaaattgtatttatacttgggtaaaggctttgccctgatagctgccctgctctttcatctggtgatggagaagattcagcacttcccgtttcctggaagcccacaaaggagcaatcagcagatccttgggaccatctcctgttaccctgtgaatcactatggaaggatccagatgttccagacagcggatcaccagatcaatgtattcttcacggtccagtacggaaaacttcccagcctgataatcagcagccaaatctgtaccggaaagtacatggagaagctgaagcttgatcccctggatttgacaggcgttcaggtacttcatggtgtcaagcacatccctggaggtctcccccggaagtcccagaatggtatgtacgatcacatccaggcctgcctgatgaaggctttgcatggcctggtcaaaacaggaaagaggataacctctgcggatatatctggcagtgtgctcgtggatggtctgaagaccaagttctacccacacaggcttgatctgattcagcctggaaagcagccgaatcacaggctcttccagacagtccggtctggtgccgatggatatggcacagatatccgggttttggatggcttcggtgaatattctctccaaatattctacaggagcataggtattggtgtaagcctgaaaataggcaatgtatttatgaatcgggcgtttggcagacaacatctggatctgttgccggatctgctccgtaatggaaagggaagcactggcagcaaaatcaccgctgcctcctgcgctgcagaaaatacagcctctttctccaatcttaccgtcacggttgggacaggtcatgccaccattcagtgtaaccttgtatatcttttctccgaatctctgccgaagcatatagtcaagggaatgataaggcttgccgttccaactggtcatgaaccggatacctgggagtcatttccctgttcctgttggtcttcctctgccggtgtgttttcctttggaatgtagttatcaaaaatctttacaaaaaagtgtgaattgatataggcaatggcagcaaagccaataagaacaaaaagcataatcaccagggattgaaccttaaatgtaggaatatacaggatggcaaccggcagtgctgtgatcacaagcatcaaaagcgtatatggaagatgacggatcgccatcaggaatgcgttgataaaggtattcttaatggtgttgtaaaacttggcaagtactgggtaaatataaataaataccattacgtaaagcagcaggatcatcatgaagattactgaaagtgccttaccaggaaggccgctcatgcttttggcaatagtcaggtcaaaatacagaagtgcgcctgttaccagcatgatcaggttgatgataatagactgttttaaattctgtttgaatgacttgaagaagcttttggcaatgtaggcttcttcattgcgtaccatcttcagggtaacgtagaacatagcggtaatggatgcacctgctgtgacaatagggagacagcagagtatgcatagcaggttcaggatgatcaggtcgctgactctgctcataaaagtaaaaaatctattatccatatcaaaaaaacgtcccatataaacaaacctcctaaaatatcaatatggtatagtatgattacagtgtcaaaacacaaaaattatgattacacggatagtttcgtgctttgtactttgcattgtaatcatagtataacgaatctgtgggtaaaaagcaattggaagattggatgtgttttaggtcaaaaatgtctttgatgaatgggagaattttggtataatatgaaaaaaaggtttgccaggtgtggatgaggggagttttgcgtatggaaaacaaacacaggataggcagacaggtgtggctgatggtggctgcagtactggttgctattcttttcattttttttatctcttcttattataatacaatcatggaaaatgcaggagccatgtcagaagaactgaatcagatttataaatatcagtatgaaatgatcgttgacagtcgaaatgaaaccttctggcaggacgtatacaagaatgcaagaaaagaagcactggctaacagcgcagtgctggaactgaaaagtgctgagaacggcggcgattataccaaaatggactatatggatatgagtattgccgcacaggtagacgggatcatcctggagtacaatggagaaaagggtatgcaggaaaagatcgatgaggcagtggaaaagggaatccctgtggtgatcattgccaatgatgccacaaagagtaccagacagtcctttgtagggatcaatgattatcagctggggcaggtatatggagaacaggtggcaaaactgatagattcttccacttccagggtgatgcttcttttgaaccgggaacaggagcttggacagaatcagatttatgctcagatctacagtgccattgagaagaaggcaggcaatgaccagcggatcaaaatacagacccgcaatattttgtcttatagtcggtttgatacggaagaagaaattcgcagtattttccaggcaccggaaggaccgcctcagatcctgctttgtctggatgaggtgacgaccaaatgtgcatatcaggccatgatcgattacaacatggtaggagatgtgaagatcattggatattatacctccagaagtattatggaggctgttaagaaaggactgatccctgtgaccattagcatgaatgtggagcagatcggaaaatacagtattgaagctctcacagaatattgggaagaaggcagaacaaatgcctattataatgtggatctggatgtgattgccagtacaaaggacgaaacgatgtactagcttaaggacaggggaatagtaatgaataaaacaagaaaaaaactaagatggaaggatctttcccttgcagtaaaggttttgatacaggtaataattgtggctgtgattctttttggtacaaacacacttctatattggcagatgaaccgtaccatgcagacactggatgctgtatatgccagtaatgtggatattacagagcttgcccagtcactggaaaaggttcagatcggcatgtacgattatcttacagtgaagtcttcagatacattggaggattattaccgttatgaggagaattataggaagcttctggagaagctgaatgaacaggtaatggagaatccggtaaagcttctggaacgtaatatacggaatatgtcagaaacctatctggcttatacggcagagacagtacaggcaaagcgtgggcggaatgtggagaagtataaggactcttatggggaagccctgcaggtatatcattatctgaatacttacatcggagaactgaatggacagcagtttctgaataactcttcaagctaccaggctctccaaagcgctatttggtatctggagatcgtaagttctgtgcttcttattatggttatggggatctgcatgctgatgctgtatctgatggtaaagagtgtatctgctccccttacaagactggcagctacggtaaagctggtaggacaggccaattttaatgtaaaaatgccttccacagatgcaggagatgaggttggcgtactgacaagaacttttaattctatggtatcaagtctggaagaatatgtgaatcttaccaaggaaaatatggtaaaagaacagaaaatgatggagcgggaatttcttatgacgaatcacctgaaggaagctcagttaaagtatctgcagtcacagatcaatcctcattttcttttcaactccctgaatgcaggggcgcagctggctatgatggaggatgcagagaaaaccagtatttttgtggagaagatggcagatttttttcgctacaatgtaaaaaaaggcagtgaagatgctacacttcgggaggaagtggaggctgtggagaactatatctacattttgaatgtacgcttttctggggaaattcattatacaacagatgtggatgaatctgtgcttgactgcaggatccccagcatgatcttacagccgatcgtggaaaatgctgtgaatcatggtatccggaatattgactgggagggccggatccatctgtgtatcagacgaaaagaagagtatatacagatcagtgtaaaagataacggaaaaggtatttccagggaacggatccggcagatattggacggagagatcaccagcgaggaggaagcaggggattccacaggtgtaggtatgaacaatgtgatcagcaggctggaattgtattatggagaaaaaggactgttgtccgtccaaagccagggagaagatctgggaactgaagtgatcatacagattccggacagtaccagatgctaaagcacttcatggaagcagggaagggaaaagaaaatgtacaggatattaattgcagatgatgaagggatcatggtggaatcccttaaaactattattaccagcagttttggggatgaatgtgagattgcctgcgcaaaaaccggaagggcagtggtagaacaggcagaaagctttcggccggatattgcgctggtggatattcagatgccgggtctgaacgggatccaggctattaaagaggttcgaaagtttaaccagaacactatttttattattatttcggcatatgacaaatttcattatgcacaggaagctattaatcttggggttctggaatatctgatgaagcctgtgaataagaagaagatcctggaagtctgcacaaaggctatgcagctggtggatgagacaaggaggaagcggagtgatgacctgaagatccgtgaaaagctggagatcgtagtgcctgtgatcgagtctggttatatatacaatcttctgcttcttgacgaattccatacatatcagagcaattatcaggttctgctgaatattacacaggaatatgcttttatggtggtagtggaatttggcgacagtgtggagaatggcgtgcttaccaatgcagtaggagccagtgtaaaggccaataaattctatacagagtttcgggagatcgccaaaagctttctggattgtctggtagggcctgtgatgggaaaccgcatcatccttcttgtgccatatcagacggggagcgtagagtatgaagaacgtgtggagatccttacccggatgcgcaatatgctccatcgtctggaaaacaggatcgattgtaagttcagaggtgggattggcagagttaagtcctgggaaaatgtgaaagattcttacactgaggctttacgtgcactgcgtgaaggagacagccatgtggtacatattaatgatattcccattgtaaaggattatgacggagaatacccactggaattggaaaatcgttttcttcaaagagcaatggaaccggattatgcaggggcaatggatacagccaaccggttttttgagtggatgctggagcattaccaggagtacagggaagacattgagatcaaagtgctggagctggtaatgaggattgagcatacagcgttttttaagggcggagtgaagtatggttttcgctacagggagaactacctgaaagagattcatggatgcagggactatgaagaattacggaactggtttttggagaaaacagcccacgtatgccagggcatggcaactacaaaggaaaaggaatccgagtctgtagttgcaaaagccaggaactatattgatgaaaattataataaggatatttctcttgatgaggtttccagaatggtggatatcagtccatattatttcagtaagttatttaagcaggaacaaggcgagggctttgtggagtatctgaccaggatcaggatgacaaatgccagacagcttctaaagaaccagaagtacagtattaaagaaatctgcagcatgtgcgggtacagtgatcctaattatttcagcaggatctttaaacgttatgaaggggtaacccccagtgaattcagagaaagattaggatagtgttaaacgatctgggaaagattcggcaaaacaaaacactcagatgaagatgagggtaggagcagcaatatgaagaaacggaaaaaagtaatatgcctgtttttgtgtatatgtgttcttggagttggatgtggaaataaaacttcagaaagaacacaggacagtgggcagcaggcagaagaaaataataacaaagaaaatcaggaagtaaagatagggtttagttttgattcctttgtgatcgaacgttggatccgtgacagggatgtatttgtttccacagctaaaaagctgggagcttctgtgaacgtgcagaatgcaaatggcagtgtgcaggaacaaatttcccagatccagtatctgatcgataaaaatgtggatgttcttgcagtggtggctgcagactgtgcggctttgtctgatgtgatgcatgcggcaaaggaaaaagggatcaaaactatcagctatgaccgtctgatcctgaatggagatacagatctgtatgtttcttttaataacaaagcagtaggcactttaatgggaaaggaactgaaacgtgatctgccggatgggggacagatcattatgatccagggagctgaagaagataataatgtgaagctggtgtatcagggctttatggaggaattggaaggcagcaatctggaagtggtttatgaagcacattgtaaaggatggagagcagagctggctgtggattatctggatgaagcattggaaaaatatccggatgtaagcgggatcatgtgtgggaatgatgatatagcagctcaggtagtacgtgttctggcagaacacagacttgccggaaaagtacaggtggtaggacaggacggagatctggctgcctgccagaggatcgtggaaggcacccagacaatgacagcttttaaatcagttgagcttctggcaaaggttgcagccaggtatgcagtcagtatggcaaagggagaaaagctgtccaggattaacagcagtataaatgatggctcaggggatattccattttgtatgcttcagcctatttccgttaccagccggaatatggatgagatcattattgacggtggctatcattctgtagaagatgtgtatctgaatgttcccagggaggactgactgaaataaaaagtcaataggatttttttgtagcaaaaatgtcttgcttatggcaggacattttttgttttccgtaaataatccgatattttgacaactatgtcctgtattgcccgtgctaagataacatcatcaaaaatgaatgtaccgagaaggtatgagattaaagggaggatttacaaaatgaaaagaaaattatttgctgcaactctttgtgcatcaatggtagctggtctggtagtagttcctacagttgcacacgctgatgaaagcaagggactgatcggtgttgcaatgcctacccaggatcttcagagatggaaccaggacggcgagaacatgaagaaagagctggaagcaaaaggctatgaggtagatctgcagtatgcaggaaatgaagttagcacacaggtttcccaggttgagaatatgatcgctaacggagatgagctccttgtggttgcttccatcgaaggtgattctcttggaaccgttcttgctcaggcaaaagaaaataatatcccggttatctcctatgaccgtctgatcatgaacacagatgcgatttcctactatgcaacatttgataactatcttgttggtaagacacagggccagttcctggtagatgctttggatctggacaatacagatggaccttacaacattgagttcgttacaggtgatcctggtgacaacaatgtaaacttcttcttcggcggtgctatggatgttcttcagccatacattgatgaaggaaaactggttgttccgtccggacagatgacaaaggatgaggttgctacagcaaactggtcaacagaaactgcacagtccagatttgagaatatcctttcttcctactatgcagatggcacaaatcttgacgctgttcttgcatccaatgactccacagcacttggtgtagagaatgctcttgcagcaaactacacaggcgaatatccgatcatcacaggtcaggactgtgacattgcaaacatgccgaatatcattgatggaaaacaggctatgtccgtattcaaagatacacgtacactggcttccaaggttgttgaaatggttgatgctatcatgcagggtggcgaggctcctgtaaacgatacagagacatatgacaacggcacaggcgttattccttcattcctttgcgagcctgtagtatgcacagctgacaactacaaagaacttcttgttgattccggatattacacagaggatcagctgaaataatcagtttcatatgaactgacataataagtaataattttgaggctgccgcataaaaggtcttctggctgtttgtgcgacagccccagttttaaaaatattggtttctggattaaattgggaaagtctggagggaaaaattttggcaaagatactgttggaaatgaagaatatcaccaaaacattccccggtgtgaaagcgctagataacgtaaatctacaggtagagcagggcgagatccatgcgctggtaggagaaaacggtgccgggaaatcgactttgatgaatgttctttcgggaatttatcctcatggttcttatgaaggcgatatcatttatgatggagaaatctgtaatttccatgatattaaagacagtgaggcaaaaggaattgtaattatccatcaggaactggctctgataccatatatgaccatcggagaaaatatgttccttggaaatgagcgtggaaaaaaagctgccatcaactgggatgagacataccggctggcagagaaatatacaaaacaggtaggtcttacagattctgtaaggacttatatcaaagacattggagtaggcaagcagcagctggtagagattgcaaaggctctggctaagaatgctaagcttctgattctggatgagcctacttcatctttgaacgaggcggattcccaggcacttctggatctgcttcttaaattaaaaaaagaagggctgacatccatcattatttcacataagctgaatgaggtttcctatgtggcagataagatcactgtgatccgtgacggctctaccattgaaacactgacaaagggcgtggatgatttctcagaggagaggatcattaaaggtatggtaggccgtgagatcgctgaccgtttcccaaaacggccaggggtaaagatcggtgatgtgcgtatggaagttaagaactggaatgtgtaccatccactgtataatgagcgaaaagttgtggacaatgtatccctgaatgtgcgtaaaggtgaggttgtaggtatttctggattgatgggagcaggacgaacagagcttgccatgagtattttcggaaaaagttatgggaccaatatcagtggacagctttttattaacggaaaagaagttcatctgaaaagtgctagggatgccatcgagcacaagctggcctatgtgacagaggacagaaaaggcgatggtctgatcctcagtaattccatcaagaataataccagtctggcaaatctggcaggtatcagtaatcatggggtcattgaccaggacaaagagtatgctgtagcagtggaatataaggataagctgaaaaccaaatgtcctacagttgaacaaaatgtgggtaacctaagcggtggaaaccagcagaaggtgcttcttgcaaaatggatgtttgcagatccggacatcctgatcctggatgagcctacccgagggattgatgttggtgcaaagtatgagatttactgcatcattaatagtcttgtggcagaaggcaaatctgtgatcatgatttcctctgagcttcctgaagttcttggaatgtcagacaggatctatgtaatgaatgaaggcagaattgcaggagaattatcttcagaagaagcttcccaggaagtgatcatgacctgcattatgcagtcaagcaaaggagagtaaaaatggataagacaaagtttaaagaaggttttcagaaatatacaatgatcattgtcctggtgcttgtaactatatttttcgcatggggaacacagggcaagattcttcttcctcagaatattaacaatctgatctcacaaaatgcatacgtatttgtactggctacaggtatgctgctgtgtatcctgacaggaggaaacatcgacctttctgttggatccgtagtatgttttgtaggtgccctgtgcggcatttttatggaaaatatgaaccttccagatggagtagccattattctggcacttcttatcggtacactcatcggagcatggcaggcattctggatcgcttatgtaagaatccctccttttattgttacactggcaggaatgctgatgttccgtgggttgtccaacgtggttcttcagggaaaaacattgcctatcaaatctgagattttcgtaaaactgtttggcggcggtgcaaactgttatattccggattttctcggcggagaggacggacttaataaagtcgctcttgctgtaggaattattgcatgtgcgatctatgtgatccttaccatcagaacttacatgaatcgtaagaaaaacggttatgacgcaggaagtgctgtggctgtatacggaaaaatgattctgatcgtagcagtgatcatggctgtatgtataaaactggcgcagtacaaaggtgttcctacttctcttgtatgggttattctggtggtaattgtttatggctatattaccagcaaaacaaccgttggacgtcatttctatgcagttggcggtaatgagaaagcaaccaagctttccggtattaatacaaacagagtttacttcattgcttatgcaaatatgggcttccttgcaggtcttgcaggtcttcttacagttgcacgtatgacatctgctcagcctacatatggacagaactatgaaatggatgcaattggctcctgctttatcggtggtgcatctgcttacggtggaacaggtactgtacctggagttattgtaggtgctgtgctgatgggtattatcaaccagggcatgagtatcatgggtactgaccagaatatgcagaaggttgtaaaaggtgctgtgcttctggctgcagttatctttgatgtagtaagtaagagaaagtcctttattgcgaaataagggcagagaaacaggtctctcaagcattagttgttaaaataatattctctcgagacgcagaacaggatattgtctttggacagtatccttgttttgctttcctgaaaaaatgtgttatactatgaagactgacaggaaatcaggaggagtgagaagattatggaatacaatttcgaagctgatctgcacacacataccattgccagcggacatgcttacaatacgatccgtgaaatggcacgggcagcagcagataaaggactgaaagcactggggatcacggagcatgctcctaagctgccgggaacctgccacaggttctattttgataatctgaagattgtttcaagagaaatgtatgggatccggctttttcttggaagtgaggtaaatattatggatagccggggaaccctggacatgtcagataagctgcttaattctatggatattgtgatcgcaagccttcatattgcctgcacagagcctgggacagtggaggagaatacacaggcttacctgaatgtgattaaaaatccatatgtagatattatcggtcatccggatgacggacgttttcctgtggattaccaggcagtggtgcaggcggccaaggactatggcaaggttctggagttaaataatcattccctggatccggccggctgcagagagaatgcatgggagaatgaccgtaaaatgttaaagctatgcaaggagtatcaggtacctattgtggtagacagtgatgctcattttgatgaactgatcggcagatttgagtatgcagtacgacttttgaatgaaatggattttccaaaggaattggtgctgaatcgttcttatgagctgctttgtcagtatttggaaaggtaagcctgacaggaatatctgggaaattactgaaaaatcccttgcttatcacagtttagcgtgttaaaataataaaagataatgccattcagtaatgtattggaaaagggaatgaatggaaataaaacatatgcagctacagttgctgtaaaggagtaagactatgggaaaaaatatcagaacagaggcagttgaccatctttttgaggcaatcctgtgtttgaaagataaggaagaatgctacacattttttgaggatgtgtgtaccatcaatgagcttttatccttatcacagagatttgaagttgcgaagatgctgatggataagcgcacatacctggacatttcagagaagacaggagcttccactgctacgatcagccgtgtgaatcgttcattgaattatggtaatgacggttatgaaatggtatttgccagaatgaaagcaaaagaagagcaagaataaaaactgaaatatatcagatggcaacatatatgatcaagaaaagttccacgcaaaaacagacggctgtcagattcagccgtctgtttttttggaagattttttacgctcttttttggtatcaccaggagccatctggtcgatcagcttttcgatgatcatttttttgatgtatacgtcaaagcttaattcacatataaaggaaaactttcggagaaattcctgatcctggggatctgcatcctgaaaagtcttggatgaaacagaaaaatcccgaagaagattcttctccatctgctcaatatggtttttttccatcccgaaaacttcattataaatataagccatatctttgccgtcagaacctttaaaatacttttctgtgataggctgaaaaagggtctggatgtcattgatggacagaatatttttgaagtaatatataaaaataagcacaagaagatgatccctggaatatttcttcttttcaggtgagggtagaagggagttcttggcataattgttgatcatggtcttggtgagaactttgtcctcaggatagcgcttggtagaagccagttgcccctccataaaggtagttacctgatccatataaagatcaatattgggaagatcttctggtttaatataacttaaactggatatattttgcagaatactatttaaaatgtctttgttatcaattgtcatgttttatcacctcataatccttattatatagttttcaatactacttgtaaatgcttttttggatttttcattcaagaatgcctcggcattcttgctgcgaggtgcgcgtcatgcaattgcatgacatacttctcctgcgcacctctgcaatcctgccggaggctatatcagctgggggattgactcccaccactgataccagcttgtttctcaccacctatagaggtgggggtcatctcccagctgatataatttcttcgtcctgattcaggtgtacttgtggcaaataggaatatcatgtataatttaaagagtagttttttgatgctaaggtaacttaagtactgagtaatttatagtattttctgagatattgatttcagtttgaaaggaaaagcaagaatgagtatatatgacagtttaaatcctatgcaaaggcaggctgtttttcatacagaaggcccattgctgatccttgcaggtgcaggatcaggaaaaacccgggtgctgacacataggatcgcatatctgatccaggaaaaagaagtgaatccatggaatatcctggcaatcacttttaccaataaagcagcgcaggagatgagggaaagggtagaccggatcgcaggttttggctcagatgcaatatgggtatctacctttcattccacctgtgcaaggattttaagaaggcatattgacaatctgggatatgacactaattttactatttatgatacagatgaccagaagtcagtgatcaaagaggtatgccgcaggctgaatgtggatacaaagatatttaaagaaagggcactgttgtcccagatctcccatgcaaaggacaatctgattactccggatcagatggaaatggatgcggccggtgattttaatcagaaaaaaacagctatggtatacagggagtatcaggcagcccttcgtaaaaacaatgcgctggattttgatgatctgatcgtaaaaacagtagagttgtttcagaattgtgatcgtgtactggaatattatcaggaacggtttaagtatattatggtggatgagtaccaggataccaattatgcccagtttaaatttgtaagtcttttggcttccaggtatgagaatctgtgcgtggttggagatgatgaccagtctatttacaaattccggggagcgaatattgagaatattttgggatatgagcgggtttttccaaatgcggctgtgatacgtttggagcagaattatcgttccacccagaatatcctgaatgctgccaaccatgtgatcgcaaataatgcagagcgtaaagaaaaaaccttatggacagagaacgaagaagggtcaaagatccatttcaggcagtttatgaacggatttgaggaggcagaatacatagcaggagagatcagcaaggcccacagggaagggctttgccagtatagggattgtgccatcctgtacaggaccaatgcccagtcacgtttatttgaggagaaatttatcaatgccaatataccttataagatcgtaggcggagtgaatttctatgccagaaaagagatcaaggatctgctgtgttatctgaaaaccgtggataatgcaagagatgatctggctgtacagaggatcatcaatgtgccaaagcgtgggatcggcgccaccacgctaggtcgtgtccaggattattcagataaaatgggcatcagtctttatgaagcacttcgagtagcagaagaagtgccatctataggcagaagcttatccaagattgatggatttgttacttttatccagatgctgaaaagcaaggctcaggcttacacagtggaggatctgttaaaggagatcattgaacttaccgggtatgtgaaggaactggaagctgaggatacagaagaagcaagggcaaggattgaaaatattgatgaattgatcagtaaaacagttacgtatcagcaaactatggaagagcaggatcagccagctactcttgcaggattcctggaggaagtggcactggtggcagatattgacacagtggatccggagcaggattatgtacttctgatgaccctgcatagtgcaaagggactggaattccccagggttttcatggctggtatggaaaacgggattttcccaagctatatgtccattaattacggagatggttcagaactggaagaagagcgaaggctatgctatgtgggtatcacccgtgccatgaaggagctgaccatgacctgtgcaagacaacggatggtgagaggggaaacgcagtataacaaggtgtcacagtttgttcaggaaattccaagagatctggtagatctgggacacaccatacaggaaaagaaaccaaagatggaacaggtattctcttctgacagcaaatattcccagatgaagcagatttttcagacaagagcctacaagccaaaagaatttaaagtgacaaaagcggatgccctggattaccaggtaggtgatactgtgcgacatatgaaattcggcgttggcatagtgaaagccattgcagaaggcggaagggattatgaagttactgtagattttgataaagtaggcgttaaaaaaatgtttgccagctttgcaaagctgaaaaaaatataactgcaagggatactgtctgctgaatgtatataaaagaatgttgatttgtggttgctgtgagcagtttgaatgatttgcatgatcttttttatcttggatatggtaaaaagacagaattggtggtataataccgaatatgaatgatgttgggacgtatggtgtttttctcagtatcagcaattatgggtgttatcagaaaaagagaggatggtattgatcatgaatattaaaatggataagatcgaagaattattgtcaaccttaaagaaaaaagaagatgagaagcagaagaatacagtcctctgggtactggcgatcattggagctgtagcagctatcgcaggtattgcttttgcagtatatcgtttctttgcaccggattatctggaagattttgaagaagatttcgatgatgatttcgatgattattttgaggatgaagaagagtaaataagacaaactgaaaaagctgttgcattaaaccattttctactgcttaatgcaacagtttttttatgtaccaggaaattactttgtaatgttcctattacataaaaactccgtctgcaacaggagattcttttgtaatgtacctgtgcgatcgtaaagacattgtgagaggtagactattatgaaaaaaggtgaaatatatcagggagttattgaaaaaatcgattttccaaataaagggatcgtgaatatcgatggtgaaaaggtaattgtaaaaaacgggatcccagggcagaaagttcgctttatgatcaataagaagcgttctggaagagctgaaggacgattgcttgaggtattggaaaagtccccattggaaacaagagatccggtatgtcctgtttttccccagtgtggcggctgcatgtaccagactatgtcctatgaggaacagctgaaaatgaaagaaacccaggtgaaagagcttctcacccaggcagtaggagaagatatccactgggaagggatacatggaagtccaagggaatttgaatacagaaataaaatggaattttcatttggggatgaatataaggacggacctctttcccttggccttcataaaaaaggcagtacctacgatatactgacagcagatcactgcaggctggtacatccggatatgaacaagatcctccggtgcgtgctggatttcttcacagaactgggagctgtgcattatcgcaaaatgcagcataccggttatctgcgccatctactactgcgcagaggcgtaacaacaggagagattctggtgcatgtgatcacaactagccaggcagaatatgattatgctccgctagtgacaagacttctggcacttccgctggaaggcaggatcgtaggaatcatgcatattatcaatgattctctttcagatgtggttcaaagtgatgaaaccaggcttttgtacggacaggattacttctacgaaactcttttgggacttcggtttaaaatcagcccgttttccttttttcagcccaattctctagcagcggaagtgctgtattccattgtgcgggaatatattggggaaactaaagaaaaagtagtcttcgatctttacagtggaaccggaactattgcccagctgcttgcaccggtagcaaaagaggtgattggtgtggagatcgtggaagaggctgtgaaagctgccagagaaaatgcagcctttaatggtctggaaaactgtcattttattgccggggatgtgctgaaggtcctggatgatctgactgaaaagccggatgtgatcgtgctggaccccccacgtgatgggatccatccaaaggcattgcccaagattctggactatcaggtcgacaagatcatttacatttcctgcaagcccaccagcctggcaagagatctgcctgcattcattgatgccggataccagatccaaaagacctgcagcgtggatcagttttgctccactgttcatgtggagacggtggtaggactacacagaaaggatatgtagaaatccttgaatttacgcactttgtagagtttttcagcttcaacaggattgctgaaaatcacaaggaaaaagagcttgtgaggaaggtaacggttgttgtggcattagacctcggttgtgggaacacaaataattctgaatatgaaagtaaatagagaactatcagatatgttgatagaacgtagggatacttgaaagagtgtccctattttttatattagggcattccattaggagtgcctttttcaattcactttagaaggaggtcatacaatgacaaacacagcgttaggagcaggatctgaaaaagcccaagaaattatttttatcagcgaagcacatgag

SEQ ID NO: 50 - DNA, 2383 bp, Unknown
  gut microbiota DNA sequence
caggcattaaagaatgtggaataagcaggattacggaagaaataaaaatgagagtgaaagaaataagcctttgtttggcttgacaggaacgggggaatagtgttacctttatcccgttgaatgaattaactacggaagctgacgaggtgtaaaaaaatgcaggaaatgaagccaatcaaagaaggtaaagtacgtgagatctacgacaatggagacagcctgatcatggttgccacagaccgtatcagttgttttgatgtaatcctcaataatgaagttaccaataagggcaaggtgcttactcagatgtccaaattctggtttgaccttaccaaggatattctcccaaatcacatgatctcgacagatgtgaatgatatgcctgaatttttcagacaggagaaatatgatggtaagagcatgatgtgcaagaagttggaaatgctgcctttggagtgtattgtccggggttatattacaggaagcggctgggcaagctataaggagaacggaaaggtttgcgggatcagcctgccggagggactgaaagagtctgacaagctgcctgagcctatttatacaccatctacaaaagctgagatcggtgatcatgatgagaatatttcttttgaacagagtattgaccatctggagaaatattatcctggtaaaggtaaggagtatgcagagaaacttcgcgacctgaccatcgcactttataagaaatgtgctgagtatgcactggagaagggaatcatcattgctgataccaagtttgagttcggacttgatgaggatggcaatattactattggcgatgaaatgcttacacctgacagttcccgtttctggcctgcagatgtatatgaaccgggacatggacagccgtcctttgataaacagtttgcccgtgactggctgaaggcaaatccggacaacaactggactttgccccaggagatcgtggataagacaattcagaaatatctgcagagttataagatgcttacaggcaaagaactggactgatctttaaaacaccggcataagtggggatatccggtggttcatttattgccatataattaagttaaagagagggatgaatgaaatggattatgcgaaagaatcattgaagatgcactatgacctgaaaggaaagctggagatcaaatgccgcgcagcagtagactctaaggatgcattaagtcttgcttatacaccaggggtagcacagccttgtctggagatccagaaggacattaataaaagttatgagcttaccagacgttggaacacagttgctgttgtgactgatggtactgcagttttaggacttggagatatcggaccagaggctggtatgccggttatggaaggtaaatgtgttctgtttaaggcttttggcgatgtagatgccattccattatgtgtacgcagcaagaatgtggatgatattgttgagactgtacgccttctggcaggcagctttggcggtgtaaaccttgaggatatttctgcaccaagatgctttgagatcgagaagaagctgaaagagtgctgcgatattccgattttccatgatgatcagcatggaactgcagtgatcactttggctggtgtgatcaatgcactgaaagtagttggcaaaaagatggaagatattaagatcgttacatcaggtgccggtgcagcaggtattgctattatcaggcttttgatctccatgggtcttaagaatgtgatcatgactgaccgtaaaggtgctatctatgagggcagagagggtctgaatccaatcaaggaagaaatggctaagatcacaaataaagctcatgaaaaaggtactcttgcagaggtgatcaaaggcgcagatgtatttatcggtgtatctgctccgggaacacttactcaggatatggtacgtaccatggcaaaggatccgatcatttttgcatgtgctaaccctacaccagagatctttccggatgaagcgaaggcagcaggtgcagctgtggtttccacaggaagatccgactatcctaatcaggtaaataacgtactttgcttccctggtattttccgtggagcactggatgtacgtgcatctgatatcaatgatgagatgaagatcgctgcagcctatgctattgcaggactggtaagtgatgaagaattgaatccggattacatccttccggctgcttttgatccaagggtaaaagatgcggttgcaaaggcaactgcagaagctgccatcaagagcggtgttgcaaggattaaataagctttttaaaatagtaaaatgatttactaaggactgtcgcattcgtttgcggcagccttttttgctttataggacattactccgtaatgttcctat

SEQ ID NO: 51 - DNA, 2774 bp, Unknown
  gut microbiota DNA sequence
gccttgccctggatgtttcctgcgcagaagcaggctttgctctcactgaggaatttgcctttaccagcgaaggatcatggctgtccagaaatgcttctctttttgggttcatcatccgctatcccaaaggaaaagaaaacattactggttttccctgggagccttggcacatccgctacgttacccgggcactttccaattacctggcccttaccggtcaaacgcttgaagaatactatgcccttcgtcccttctgatcctactgttccatctgccttcccagaaaaccggcagcggtctgaaccagaagcttttcactgtttcctatggtttccctgtcatttttcccgatcaggatcacacttcctatggcatctccggagcttataatcggctgtatgatctgcgccagggagtttttcacctgttctgtagtaatagccactttctttctgtcctgtgctccggacagtttcatttcccgtgcaaagatcacttcttccaattcactgctgatctcttttcctacatactctttgcttccctggcctgctgccgctatcacctggtcgtgatctgtaatacaggaaaccattcccgttgtctgcgacagtacttctgcatattcttttgcaaaggtactcagctcccctattggtgaatattttttcaggataatttcaccttccctgtctgtaaaaatttccaaaggcgtaccttctttgatccgtaatgtccgcctgatctcctttgggatcacaaccctgcccagatcatcgatcctgcggacaattcctgtagctttcatataaaaaatccctcctgcttcttacatactttccataatttgtgctgtatggatagtatgcgaaaaacaagaggaattatgcgccaaaatcacaaggtaaaatatttcatcccatcaatcctatttcattttatctgtcaatatccatttgccttttcgattagaaccctcacggataactttaccttcatgctgcatttttgtaagagtacgcttaatcgttgtcgcagaaaccgcaagtgcttctcctaatgctttatgagtcagttctggatttttacggatcaattccgacaatcgagtttcaaggtcatcttttaggtcatcatggcctttattggggtcatccaggtcatgatcccgatttttgacctcaatgacctcattctgacctcgataaagattgattcggaaagctacttccatgtcaataaattctggttcacgtaatccatattcctgcatagcctgcatgagtttgggaacaccgcttccccaagcttccacaagattcatataggcgaaagcattggcaagtgcacgatttcggatttttgaaaatccttctttcatcaaatcaatcgttacaccaggaagcaatccccccggagaagtaatctccagacgatcatcataaattgccacctgaatattagaagcctgaatataactgcaattcataactgcattaacaatcaactcacggatactatccggcggcagctcataaatatcctgacgatatactccctccagccgacatcccatccgaatatttctaaggacaaactgtactgcttcatctacctgttcccataacggtccttcataattgcgccggtcaaggaacacagaacgggtcgttcccttaaacacagcacattgaatcatggaacgcagcccaccctgtccagttaaataaacatacgcattcgttggatagattttttcattttcatctctcttcaaaataccccaactgagcaaaacattcttcgttacatcttttactgccgacctctgaagatttgacttgcaattggcaatagcaacttttttcatttgttcacaaagattcctaatatcttcatcagtcacttcaatatctctgcggattaccgaatcaaaagaacgagcatcgcattcataatacagctctcttgacatatcacggtcagctggacgtgtcgttccagaaacccgaatatatacgccactttccagaccatctgctttaatataatatggtttctgtcgtccagctctgatttctgcaacaattacaggcttatcatttatattttgcaaataaacatctggaataatcgttggttcacagctatcagaaatagcattggtaatcgcatcaatttcctgaaaaactttatcttccgaaatgccaaccacttccctggttttgtcatcaataccaaatataatccgtccaccttttccattggcaaaggcaacgactgttttcatatatttaatgctcttgtccgggcgttgcaccttaaactctacattcttagattccccggcaagaatttcttctattgtcatataaccacctccatgattaagttttaccaacagtaagtagattaactcctattgtttaccgtaaaacacaggttcttctgccactttgctcaattctggtcttagtgaatatgtatactcgtttgaagatttcggcaataactccatatcattattgtctgtccataattcacattgtgtcataaccgtctgaactgcatcatccataccttccggcggatatctatgtttcctcaaaagcctttttatcatcattcgcatccttgctctcgcagaatcacgtttttgccagtcaatcgttctattttttctaagggtatctgcaagttcttttgtaatagcaatcaattcttcattttcataaaaatccttgattgcctgcggcttagtcaatgcatcataa

SEQ ID NO: 52 - DNA, 681 bp, Unknown
  gut microbiota DNA sequence
tcacagaggctggttttggtgctgaccttggtgcagagaaattcctggatatcaaatgccgtatggcaggcctgaagccaaacgcagtagtgatcgtagctactgtacgtgcactgaaatacaatggcggcgttccgaaggctgacctgaacaatgagaatctggaagcactggagaaaggtcttccaaaccttctgaagcatgtaagcaatatccgcaacgtatacaaactgccatgcgtagtagctatcaacgcattcccaacagataccaaggcagagcttgacctggtagaaacaaaatgtaaagagcttggcgtaaacgtagcactttccgaagtatgggcaaaaggcggcgaaggcggtctgaagctggctgaggaagtagtacgtctgtgtgatgagccaaacgacttcacatattcctatgagctggaaggctccattgaagataagctgaaccagatcgttcagaagatctatggcggcaagagagttgttcttacagcaaatgcccagaaacaggcaaaacagttagaggctcttggctttggcaactgcccgatctgtgtagctaagacacagtacagcctgacagatgaccagaccaaacttggcgctcctacagactttgaggtaacagtacgtaacctgaagatttctgcaggtgccggcttcatcg

SEQ ID NO: 53 - DNA, 32447 bp, Unknown
  gut microbiota DNA sequence
tatgccaggacttcccaaggtaccggctgctgagaagatcgacgtagacgaaactggaaagatcacaggtcttttctaatagaaattcaaccttgacaaatactccctcttatagatataatacttccaataagagggagtagctgccacaggcttggacctttatcagtgtttcatccagtggattttcaggcgtcagaacggccaccagtacagtgacccgcctaaagttgaaatagcaagacttttattacagtatgtttattgttcattcagcaaatactgtaataaaagtcttttttatttactatgaaatcacgggcagcagtcataaatgaggcatgcttgtcctcacttcactctctcaaaatccatttttcaggaggaaaatcatgagttttttaattgaaggagtccaggctctcacctggcagcaggtggttatgtacgcagtaggtatcctgctgatctatctggcaatcgaaaaaggttatgaaccatccctgcttttaccaatgggatttggtgccattctggttaatcttccctttacaggtgtacttgatcagacccttcagggaggcattcaggcaaatggcgtgatcgaatggctgtacaatgtagggatcaatgcttccgaggctatgccaatcctgttgtttatcggtatcggagcaatgattgattttggtccactgctttccaccccacagatgtttttatttggtgccggtgcacagttcgggatctttgcagcaatcctgctggcaaccgttcttggttttgacctgaaggatgcagcttccatcggtatcatcggtgccgctgacggtcctacttccatcctggtatcccaggtcctgcactcaaaatatataggtgccatagcagtagccgcctattcctatatggcgctggttcccattatccagccttttgctatacggcttgttaccaccaaaaaagaacgccagatccatatggaatacaatccggcttctgtttccaagaaaatgcgtattgcattccctattgttgttactatgattgtaggtctggtagcaccacaatctgtggctcttgtaggatttctgatgtttggtaatctgatccgtgagtgcggcgtacttggcaccatgtccgataccgctcagaatacacttgccaacctgatcacattattgcttggcatttctatttccttcagcatgcgtgcagaatactttgtcacaaaaggtactttaatggttatgctgatcggactttttgcctttgtaatggactctattggcggtgtatttcttgccaaatttatgaacctgttccttaagaaaaagatcaatcctatggttggcgcagctggaatctctgcattccccatgtcttcccgcgtgatccagaaaatggcacttgaagaagacccaagcaatgttatcctgatgcacgcagccggagccaatgtatccggccagatcgcttctgttattgcaggaggacttgtgatcaatctggtaacaagcttgctttaaagattcataattataatgtatgataatgtatagatgtaggagggaatctcaatgaatacagagaatataatggcagccctggaaatcatgggcaaaggaatggctggtattttcgtagccatcctgttgatcatgctttgtgtatggatcatgggaaggttaggtaaaaaataatgaaatacaaaatgatggcagtggacatggacggaactcttttaaatgattccaaggagatttctcccagaactgctcaggcgatcaggaaagctgttgcacagggatttctatttaccctgtgcaccggacgtcccatccagggtgtagaaagatacagtcagtttcttggtcttcaagctcctttgatcacctataatggtgccatgatcatccgctctgacaccaaggagatcctgtacaaacaggaacttttaccagaagatatacataagatattagaattcggccggaattataataccaccatgtgtatctggtccggcaaccggctttatgggaatgttttgaatgatcagatccatgcctataagaaaaacactggtgtggagcctgtccttatggaagacgaagatgccctgatccgccagggcgttactaagatcctgtggatcgatacagaagaaaaaatcaaaaaaatacaggaagagctccctggagatgctttttcccaggtaactttctgtacttcccagaccacttatctggagtttttcaacagtcaggtatccaaagccaaggctatggaacggctgggacagctttttaatatccgtcaggaagagatgattgctgtcggcgatggcctgaatgacctgcctatgatcgaatatgctggtcttggcgttgccatggaaaatgcacaggcccaggtaaaaacccgggcccggtacattacctcttccaacgaggaagacggtgttggtaaagttcttgaaaaatttgtcttaatatgaattcacccatgcaaccatggctcattcatggctgcagtccgggacttttatagtaaataaaggcttcatcgttggatacaattcacggaatttctggtatcttgcttcatatttttccacaagagccggttccggttccacagtatccacaatctttgtaagcttctttccaatggtttccacatccgggtaggcgccgcagccaactgctgcaagcatggcgccgcccaatgatggaccttcttccacttccaatacatccaccttaagattcataatattagcaatcatttttttccaaagtgggctctttgcgccaccaccgcagatctttgtacgttctatctggattcccaggcttcttgccacttccagggaatcccgaaggccaaatgcaacgccttccagtacggcctgagtcatatcagcccgtgtggtatccatagtcatgccaaagaatacgcctcttgcatccggattgttatgaggagaacgttctcccatcaaatacggcagaaaatacacatgattctcacctaattctttgattggtgcctgctccgcactatagtcctttgttccaaggatctcttctgaccaccatttattgcaggaagctgcactaagcatacatcccatcagatggtagctgccatctgcatggcagaaagaatgaagtgcattattctgatctactccgaattctttgctggaaataaaaatagttccggaagtaccaagtgaaatattacactgaccgtctcctacagtacctgtacccacagccgcggccgcattatctccggctcctgccacgatcttcacctctggtgaaaagccaagctcagctgccagttccggcctaagggtacctacaacctcccagctttcatacagttttggaagctgttcccttgtgattccgcagatctggatcatttcctcagaccagcatctgttctttacatccagaagaagcataccggatgcgtcagatacatccgtacagaaggaaccagacagacggtaagccaaataatcctttggaagcatgatctttacgatctttgcaaaattgtcaggctcatttttcttcatccacaagatctttggtgctgtaaatcctgcaaaagcaatatttgcagtatatgcggacagtttatccttaccgatcacctgattcaagtaatccgtctcttctcctgtgcgtccatcattccacaaaattgcaggacggatcacctgatcctctttgtccagagttaccagcccatgcatctggcctccaaaaccaatgcctgccacctgggatctgtcgatcccggcggtcagctctttcatcccctccatgcttttctcaaaccagtcagaaggattctgctctgaccagcctggatgtgggaaatataatggatattcttttgatacgatattacagatctttccggactcttccatgagaagaagctttacagcggaagtgcccaggtcaataccgatatagtacatactcaattacccccatggattctccgtcggatatcttacgcctgccggctgattataaccgatctcatctaccggaactccgatatacttaaatacttcaaacaatgcttttccgtaatgtccaaatgcaactgcaccatgatgtgggaagttcttctcgatcaatacgtggcggtagaaacgtcccatctccggaattgcaaaaataccaatagatccaaaggaacgtgttgcaaccggcaggatctcaccatgtgcaatataagcacgaagcttgttgtcagaagtgctctgcagacgatagaaagtaatatctcctggcaccagatcaccctccagtgtaccctgtgttacttcctcaggcaggcttcttgccatgatcatctgatacttcattgtgcaggaagacagcttgccagctgctgtatttccacaatggaatcccataaaggtatccttctgcgtataattaaatttgcccttgatatcgctttcgtacatatcatttggtacggtgttgttgatgtcaagaagtgttacagtatcattactgatcactgtgccgatgaactcacttaatgcaccgtaaatatcaacctcacaggataccgggataccctgtgctgcaagacgaccatttacatagcatggaacaaatccaaactgtgtctggaatgcaggccagcatttgcctgcaatggcaacaaatttacgataacctttatgctcctctacccagtcctttaaggtcagctcatactgtgcaagctttggcaggatctccggctttttattacctgctccaagctctgctgccatctcttctgccagtgccgggatcctttcgtctcctgcatgtttgttgaatgcttcaaaaaggtcaagctctgagttctcctcaatctcaacccctaagttgtacagctgctggatcggtgcattacatgcaaggaaattcaatggccgaggtccaaagctgataatcttaagattgctcagtgcatatactgcctttgcaacaggcacaaaatcatggatcatatctgcacattcttctgcatttccaaccggatattctggaatataagctttaatattgcgaagcttaagattatagcttgcatttaacataccgcagtatgcgtctccacggccctgtaccaggtcatctccagactcttctgcagctgccaggaacatctttggtccatcaaaatgctttgcaagcagggtctcagaaatctcaggcccgaagttaccaagataaacagccagtgcattacagccagctgctttaatatcctccagtgcctgtaccatgtggatctcactttctacaatacagacaggacattcataaatttcagaagcatcatatttctctgtgtaagctttcaccagtgcttctcttcttgtaacagaaagagactccggaaaacaatctctgcttactgcaacaattccaatcttgatctgtggcatattattcatcatgatattatcctccttattcctcatccaatgaaatgtttttaccttttaatccgttaaatgcaccctggatctttgcatcctcatgtgcgatcagccatttattcttagcagtctgaagtctgtcttccccatcggtctctgtctggaaagtcagatctgtatttgtccctcttggaagaactaccacgcactgaaagcctgtatcatttacatgacatggtgcgtaatgaagtgtagtagcataaacctcaatgccagtgcctgccggtaccagatatgcctcaatattcgctgtgtcatatgtaaaatccggtgcaatatcctgctgatgtccgatcagcagcaccagatctgttacagccacattgatttctgaattgcgatggtattccactgcattcagtttcctgttatgtccattacagtatccgatctcaataggaagtccgccatagcctttattctgcagttccctggccacatccaaactttccagttcttctgctgaaggtacataaagcacattttccggtacaggtgtatgcttcatctccctgatcagcgccgtaaaatcatacccttccagaacctttccatatttgcggaaagagtcatctgttacattttgaatcttcacctctttacctccttgccataagttttttgtttatcgataaaaaaagcataccataaacaggtatgcttttcgtcttttttattgtctattccatgtcacttttttgaccttttttctctttccactgcactgggcaggatctggtatcttttttggaattccttggcaaatgatctgttgctggcaaatccgttatccagtgcaatctgactgattgtatggtcagtattcatcagttctctgtatgcatatgccattcggatatcctgaagatatgacttaaaattgacttttgcatattttttgaacattcgtgacaaataagcctccgaatagccaaaaagggctgccatttctgaaagcttcaaatcttccctataatgctccctcatataagaagtgatctttgacagtgcatcaagcctgcggctggcgtgaatctcctgtctgacagcttctgattcacgataatcacggatcataagaaacagaatattgtaatacaatgccatagtccggaactcgtatccgtctccttcctgatgatacacattgtaaagctcttccacaaaaaaggccagcttccggttgtccgggatcttctcatcctggtgcccactcatacgggcagcacttttaaaccggataaacctttgggcagtaaaataatcctggaactgcttcaaagggatctgcagcacaatggtccggttcttgtgtggagcctgcactgaatgaacctcattggaattgataatgatcagctcaccggcctccaatggatactcctgatcatttaaaaaaagggaaagatgcccttcctgcacagcaaaaatctccacagaggtatgccagtgcttttctcttgcataattcccattcattccttcaaatataaataatttaaaaggcaccccttcatttgggatgatcagttcatgctgaaattccatatattataccttctattataccttctttcgccattgcgcaaatcacatttagtaattctgtaaatcacccatttagtaatttcgcaaatcacctatttagtaatttcacaaatcacctattgtctttccacaggaaattacctataataaagcttagtattgctttgtgcttcgcactcctgcaatcatcttttttattggaggctgttatgaaatttatttatcctgcggtttttaaaaagacagaaaacggcacataccacggctactttccagacctggaaagctgctacggagacggagataccctggatgaagccatagaaagtgccaatgcggcagcttatgactggatcacactggagcttgcagaagatgaacctgcaatgccccctatctcagacgaaagcgatcttgaccttaaagaaggagagatcgtccgcaacatctctgtaaatatccgattttatgaaggctgggacgaatgatcgccccagctgttcttttatctgatccgaccagtcatatggatgctgaattcgtaccgatcgccaaccagcttattatcaacatattcgaaaggacctttctcagtatatccaatccttcggcttcgcagcagggctgccccctgtttcaaatgaagcacctgggcctccagatagtccgcattcaccgctgaaaatgtatcatctgcttctgtcaccaccaccccatatgtgttttccaggaaattatataagcctacaaatttgcctgcatattgttcaaaaccagggatctggtccttcacaaggtaattattcataagagcaatgggcttatcatcagcatataaaatcctctggatcagataaaccgttacctcaggttccagtttcagcttctcccgaactatctccggtggttgcaccagttggatatttaccccttctactgtgatattatatccttttctttttaatgtttctgtaatagaagtgactgtattcagctgctgagttgttgagatgtcccgtacttccgtgcctttaccttggaccacttttacataaccttcatccgaaagcatggcgatagctcgccgcacagtgatcctgctcacagcataaattttctccaggtcacgttctgtaggaagaagcatccccggtttgtaggcgccttccttgatcagctttttaatgcttaaataaaccgtcatgtaagctgttaccttttgcatattttctccgtaatccttttaatctgaagtgtaatttatactatttatttctatattatcccatttttcagataatgtaaacacataagcgtcaaagcacctagtaaccctttaaatcatattttctttcatgtaatctcccacatcagatagcacctggcttgtataagaaaataccttcataagcttctcatatttctctgctttttcctgctctggattacattccagttcttttatatgaagcttctcgataatactgtaatccttaagaacccccactgcttttgcagcaatagcagctgcaccgatagacgcagcattctggtcaatatttgttttaatgattggtctgttaaatatatctgcaaacatctgcatccaatatggatttctggctccgccgccacaaaactggattcctttttccagttcagcatgtctctccaattcatctaaagacagcttcagattcatggcaatcccttccatggctgcatgtaccagttctgctcttcctgtccccagattcagccccaggaaagcccctcggatatttacggatttatcctgtgaagtacctcctgcaagactgggattaaagatcactccattggatccaggcggaagctctctgatttcctcggtcattactctgtatggatcttctttttcaagaagatccttgcacagggtatcccgcacccacctaaaagagcttcctcctgcaaagatagagaaggcggatgtatacatattctcctgaatatgtgcgaatacatatggctttgtcttaaaatccagtaccggctcttttgtatttacagcgatccaggaagaggagccaagagaggtatagactctcccttcccttccgcctacgctccccaaagccatgcaggcattgtccacaccgccacaggctacctttgttccgggagcaagaccggtttgtgcagcagcttcttcagtaacctctcccacaattccatgagaagggatgatctccggaaagatttctttactgattcctgccacagcaaggatctcatcagacatttttctttttttcaggtcaaaagctcctgtaccggatgcataggaatcatccatatacatctttcccgtaagcttatagttaataaaatctttagatcccagcaccttccaggttttttcataaacctgaggctgattcttcttcatccacatcaacttaaaaatggaatagcatggtgccggaaatccgtttccggttcgcatataccagtcttcttcactgaagctctcaaaaaactcctttgattctgtttctgccctggtgtcagaccagatgggaaccatctgaagaagcatattgccatctttatccataggaaccgtcaccagactgtggccactaagtgcaagacttacgatctctgccggatctgttcctgtttcttccagcagctttcttgtgctttttgccactccattccaccagtcctggggagcctgctcatgaaagttcccaccagtatattttgtcccatattcaataaatgaatttgcaagtacacccagctgttcatcaaaaagacttgcctttacaccgcctgttccaagatcatatgaaataaacttcttcattcccatcaccacacttttgctatattattgtctggaaaattcttcacagattgttacgccattactggtgccaatacgctctgcgcctgcatcgatcatctttttacaggtttcccagtcacggataccgccggcagcttttacctttacttcatctccaacagtatccttcatcagttttacatcttcaggtgttgctcctgaagtaccgaatcctgtacttgtcttaataaaatcaggttttacttcttttgcgatcaaagcagctcgcttaatctcttcttttgtcagatagcaattctcaaagattactttagagagaactcctgctttacggcagattcccacgatagttttcatttcttttttaatgtactcatcatcacccattttcagcttgccgatattcagcacgtaatcgatctcatctgcaccttctttgatggcctgctctgtttcaaaagcctttgtatcaatggtagtctgtcccaaagggaaagaaattgcagcaccaacatgtactttacagccttccagaagttccttacacattttaacaggataagaattgatggctaccattgcaaatccattttctcttgcctcaccacacagcttctcaaaatctttctttgttgcatatgctttcaaaaatgtatggtcgatcatacctgccagctgctctctagtaatctcattactgttcattttttcatcctcctgattttgtctgtcattttaattttatatcacggaatttgtatttcaattttattcaaaactttgtacgatctcaagtgctgattttgttccaatgccgaaacgctccacacccatatcaaccattgcaaggaaatcctcttttgtacggataccgccggccactttcaatttgatctttcctcttgtaaagtctttgatcttgcggattctttccagatccagtggtgctggtacccagcctgtacctgttttcacaaagtctgctccagatgcgatcacaagctcacatgctttcagcatttcttcatctgtaagacagttgatctcaatgattacctttgtcagaatattggaagggatcacactgagcacttctttcagctcgttttccacatagtcgtactcgccgcttttcagctttccaacattcatgaccacgtcgatctcctgggccccatcttctaccagtcttttcgcttccattactttaatctctgtacaatgaccaccacctgggaaacctgccggacctccaacataaatatccggttcatccttcagcagttccgctactgttttggtccagcttggaagggcatgtacattaataaacttatatttttttgcaatgtccaccacttcctgaatatccttcagtccatggtgggttctgactgcactgatgtcaatcaatctagctgcttcatatgcgttcattctcaacactcctttttcataattgttccggtgctttctccactacaccgatttccagttcaaataatttctcctcaccaggctgtatgtattccagctctccacgtctgcgcacaacgtctcttccttccggaatcgcattggacggttccagccctactacatagtccccttctcccatcatcttccattctccgaaatgagaaaactgttccgttgaaaaggctacatatgcacccagatttacatccggattataaaggacggctttcgtctccttacctggcagcttatgataaaatacctgctctgcataatcatgggtaggcttctgaaattcaaagcatttctcaaccacgccctcactatctcttgctgtcactacagttcctttaggttctatcaaaatagtgttttcactgacgatcggatacccaaaattacagtgataaagaagcataaacggctgctggttaaagccctgattctggatcttgtctgtgatcttcagacttttgcctcccagttttgtctcaatctctcttataagaacaatattctcgccaaacacactgctttctcttacctgtccacggatcttcaggatatattcatccccgtcccagtatttttcaatgcaaacaccatctgccggtgtattactaatccttccatgaagcccaagagactgtccatcatcctcgcaaggtgccccaaaataagttaatccgcatgttgtgacaagtccgcaaaagaatccgcgtaagaaggataatccgtctttttcaaaatatgccggatgtgttactcctgttttactgataaaggaaagtgcttttccattatactctgcccatgcaatatccatgcctcttgttggaaggactgtaaaatgcagtcctcctccggttttcacttcaatagcacgaacaccatccgcctttccctctgaaagtacacagggccttgcatcagcaacctgtgaaggatcacccacatatttcataaattccgtttttgtcattttctttccatataattccatttacatcctccttaaagcttagcaagctggtctcccatgtcacaaagcatgtcagtaaactgattataaagatccatctctttattataaaattccatattttcaggaataggttttacgtattcttccacctgatgaagcgcatcgatccgctcaaaatctttccatatgccagttccaactgctgcacatgctgctgcgccaagagctgctgcctgctgatcaatatttgtcttcaccacattcattccataaatatctgcatagatctgtctccacaaggaagacttggaaccgcctcccacaagaagcatctcatcttccacactggttagcttacgaatctcatccagacaggaacgaagtcccatagtgatgccttccatggttgcccggatcacatctgcccttgtatgaatcaaatccaaaccaatataagatcctcttaaattatagcttttattcataggcattccgccgccaagactggggttaaagatcagtctgttggctcctaccggggatttggatgcctcacgtgtcatataatcgtattcatcctccccagtctcttttgcagccgctgtaaattcgtgtgccaactgatctctgaaccagcggaatgctgttccccctgccgttacacatagtgcagatgcgtaaaagccaggtactacgtgagtaaatacatatggtcttgtatttacatctaataatggttctgtagaggatacggcgatccaggaggaagagccaagggaattgtaagcccgtccttctttaaaagcttttgctccaagtgccatacaggaattatccacaccaccgcagacaacctttacgccagctttcagcccaaggcatcttgccgcttcttctgacatcaggccaaccacatctgtggatttgatcacctccgggaaaagatctctgtcaaatcccattgcgtccatcaattcatctgaataatcccatttcagaagattccaaactccgcatccggatgcataagacggatctgtacagatcctgccagtcagtttatagttgatataatcttttgttccgataattttctttgtttttttaaacatttcaggttcatggtttctgtaccacatcatcttaaatgcagtataaaatcctgctgtgaaaccatttcctgtcatctgataccattttttctcatcataggtcttaaaaaactcatcagcttctttgattgctcttccatcagaccagatgggggtatactcccgaagaagatccccatcttctccaatgggtactgttccaagagaatgcccggaaattccacaggctatgatctcttccggatccacccctgaccgcttcagaagctttgctgtactttgcacaaccgcattccaccagtcctccgggcgctgctcatgccatccatgagcaggataataggtattatatgaagtaaaatcagacgcaaggcaatttccttcttcatcatacaatgatgctttatttcctccggttccaagatcccatgcaataatttttttccccatgacagcctccttttccggcatataactctctggatttttatatttttaaatagttaaataaagagttcctgtttcttctctttcttttgcttccccaaggattttctctgaagctctggttccgcaacgtactactccgatagacatcagtgccagacagtcatccagtgtgcggataccgcctgctgccttaaccttcatcccctgtgcatgatcaaccatcacctgcatgtccgaaagcactgcaccgccgcctgcatacccggtagaagatttgataaaatctgcccctgcatttttagcaagctggcaggctttcacaatctgatcttccgtaaggtaataattttcaaagattactttcagaagtgcgccaccttcatgagcagcggctgcaacctctgtgatctcgttctccacatagtcatattctccagaaagaaatctgcctatgttcataaccatatctacttccactgcgccctttgccacagcgtcttttgtttcaaacacctttgtttcctttgtacaggtgccatgaggaaagccgataactgtagtaacaagaacgcctgtaccttttaattctttatctgcgatttccacatcagacggcctgacgcatacagaaatgcaatgatactttgcagccagttcacagccttctttcaaaccttcaactgtaatgtccggtcttaacagagaatggtcaatagtatctgctacatcctgtactgtaatttttttattcatgttagtgtcttgcctcctcatattcttcagccaaacgttttctgtcgtccagctcgtcctgtgtcactgcatcttccagtgtataggaaagaatcttaacctgatctgcctcatcattcatcagctcgccacgcttgtatccgtgatgcataaccatgatacggtctgccagggaaaggatctccggcatttcagaagacagaaggataactgctactccttcttttgcaagatcatcaataatcttgtaaatctcattttttgcgccaatatcaattccatgggtaggctcatccataaatagcactttcggctcattcatcagccatctggcaacaatggtcttctgctggtttcctcctgaaagactggaaacaggtgtatccagtgtaggagtttttactctcagcttttccctgtaagcctgggcaatgctgttactctccttcacatttcggattcccatttttgctttctgtttctcataaacgatcatctcattctctttgacagacattttcaaaaaaagtccctggatcttgcggccttccgggatcagtccaattcccagcttgatcgcatcattacagtcattgatgtgaacctcttccccattccagaaaatttgtccggacttcattttattagctccgaaaatacactgaagcacttctgtacgtccggctcccaccagacctgtcagcccaagaacctcgcccggatacaagtcaaaggaaacgtttttcactttccctgccatatcataaagatttcgcacagacagaatgggtttacgtccttcataatttcttataaaatcacgtttcccaacgccctggaattcacgtcctaccatgtaattcaccatttgctgctccgtcatctgggatgccggctttgtgatgatgtgctgaccgtcacgaagcacggtaatggtatctgcaattctccggatttcttccagcttatgggaaatataaagaatagatacaccctgttctcttagctgcataacaacctgcagaaggaattcaacttcagagcttgtaagggaggatgtcggctcatccataatgatcattcgtgcattcagagagattgcttttgatatttccagaagctgctgctcggaaatactaagattctttgcctttgtttttggtgaaatatagcttacattcaatcgtttcaggtattccatacagtcattgttcatcttcttataatcaatgaacccgaacctgttttttggcatacgattgataaacacattttcggcggcagtcatctgggatgcaagggataattcctgatggatcattgcaattcccgcctgtctcgcctcgtttgtacttgcgaaatggcattcctgaccttcaaaaattacccgtccgccttccggatgatatacacctgaaagaatgttcatcagggtagactttccagcaccattctcaccaacaatcgcatgaatttctccttttgctatatcaaaagaaacctgatccagggctttcgtacccggaaattcttttgtaatgttttctattttacagataatctctcgctccatatcctgcctccgtctgttaaaataagggcgggcgcttaagcaatcccgaaataggaagcgcccaccccatgtatatctcagtttttattcaaataattctgggaactgatcttttactgtatccggagttgcgataactgcatcataggtattgatttcgtcacaatcctgatcagcaaccagtttattgaatgcagatacaactggctgatagccctggttaaatggatcctgatcgattgcaacagagattgttccatctgcgatataatcagcaactgcatcaagaacatcgtggcataccagtgtaaccttgccatccataccagcatctttcagagcctgagctgcacctgaaggaccaccagctgttacatagatcgctttgatatccgggttcgctgtgataaggtctgttgtaaggctatatgctgtatttgcatcatcattgttctcatactcaccaacaagctccagtccttccacttcgtctgtaatggagcggcatcctgtacgacgtttctcgtgacctgttacagagaagctgcctgtgatgatcgcatattttccaccatctggcatagcatctttgattgcgttaccagcagtctcacctgcctgataatcatccattccgaaccatgcagtacggtctgtatccggaaggtcaccattgaagcagtatacaaggattccagcctctgttgcctgattaacaacaggatcaagttcatcagatacaccgaagatacagatcgcattgtagttagcagcgatacagttctcaattgtggatgtccagttcatagcctcaaaattttctacagaaataacatctactgtacagttacgatcagcaagaacctcttttgcgtagttctgtcctaccataacagctgcgccccatggattgttctgaacacaaattgaagcaattttgattgggtcttctgctgtctggtcaacaggaagtgttcttaatgtttttcctgccggtacctcaagatctgctgctttcacaaagtcgtctgccattgctgttacccccgtaccagctactgccatcatacctgccatcagcattgccatcatttttttcttcataagtcccttctcctttcgactttggggttgggcttttcccacccttttctttgtattgtttttgaacatccacggatgtaaaaaccttacattatttagtttttattgttttagtttttgctttattagtttttgttttcacttgacactcttatcttgcttcccgtttctttctgaagcaatcaattgctacagagaagatgataacaataccaagaacaactgtctgccagtatcctggtactgccacctgtacgaacaggttcttcagcagagacatcaatgtggcaccaaggataacaccaaagatatttccttcaccacctgtcatggaaataccaccgattacacaggccgcgattgcatccagctcataaccatcaccataggagggaccggcctgtttcagctgcccaagcatcagaagacctacaaaagcactcatcagtccgctgaccgcgtatgcaaaaatcgttacgttttcagtattaataccggaaagctttgcagctctctcattacatcctacagcgtaaatattacgtccaagcactgtatattttgcaaacatccaggccagtactacaacaacgatcataaagattacggaaaccggaatagatccgatataagaaccaccgaatacgctgatccaggactctccatacttaattggagatccgttagaaacaagaagtgcgataccatttcctattttcaaaacacccattgttgcaataaacggtggaagtccgatctttgctactagaacaccgttgagaagaccaaatgcaagtcctactacaaggatgatcagaagtaccaggaaaggattaactccattctctgtattcaggtttgcatatgttgccacacatatggagcaggcaatcactgcaccaacagacagatcaactcctcctgtgatgattacgaaccccattccgactgcaaggactgcgtaatgggaagcctgtctaagtacgttgaagatattcatggttgtggggaatgagtccggcctcacaatagataagtagattgccagtaaaatgattaccaataccactaccatttcctgatgtgccagaagctctttcagctttccaacacctcccggcttattttttgcttttacattcatgtcgtttcccctttcatggtgttttgtttttcgcctccgctggtttgtgcgctttgcgtttttgttaaattgattataaccaatttgttattacttgtaaataccctttagtattttttactttttacacagtatttattatatatatttatgcattatcaacaatttcttctcatttcgctctaatattggttatattctttcactcagtttcagcacgcttatacgccagatatgcattctgtaccttaaacataccaccgtctacaccaatgatctcaccggtaatataaccagctgcatcagatacaaggaaacttacaagcgcagctgcatcttccggtgtcccaaatctctgaaggcacagatcctgtacctgctcatctccacgctctgtaatcattgcatgtgtcatatccgtatggatgattccaggtgcatatgcatttaccgtgattccataaggtccaagttctcctgctccaatctttgtcagcatatctaccgctgccttgctggctccataacctacaaggccgcagtccgcaaaatgtcctgaaatagaagatgcattcacaatacgtccgtatttatttttcttcatccacggaataactgcttttaccataaagaactggctcttaaagttaatcccaagaatacgatccaggtactcctctgtcatatcttcgatatagcagaaatcaaaaatccccgcattatttacaagaacatccactctgccccatttgtctgtaacctgagcaacaatagcctctgctgctttctgactggaaacatctccgcagatcacctggcattcaggctgaatctcctgcagttccttctcagtttttaatgcgctttcctggttagaatgatatacagcatttacaatatatcctgcttttgcaagggccacactcattgcatgccccatacctcttgtaccccctgtaacgatagctactctcttttctgtcatgtttttctcctcccttatttagccgatggtaaatccaccatcgattacaatatttgctccattgatcaggcttgctgcatcacttgccagataaaccgcacacgctgccacttcctccggatatccgaaacgtcttgcaggaatagtctgtttaaaagcctctccagcagcattgttccagttcatctctcctaaagctgtaaggataacagtaggtgaaattgcattgatgttgatgttatatcttgcccactcaagtgcacactgttttacaagctggatgatacctgccttcgtacagccatatgccacatgcttgtcaagagctactacaccggcctgagaagcgatgcagacaatttttccgccgccgttcttcagcatggttttcccaacttctcttgtcatcttaaagcttccggtcagatttacatcgaaggttttctgccagatagaatctgttacttcttccaccttttcaagaataccgatgcctgcacagttaatgagcacatcaatctttccaaattcccggattgctgtatctactgctcttttaatatcttcatcctttgtaatgtcaccaacaacacttacaaatctgcgtccaagtttctcaacttcttctttcgtatgctctccttctttcaggtcaaagcacacaatatttgctccttttcttgcaaacatgattgcagttgcctgtccgattccctctgctgcaccagttaccagaactgtctttccatcagcgccaaagttaatgtcaaaattcctgtagtccatttttaagccctccattttgcttatttttattacatttataggttctgttacattcacaaacatttgttttgtatgtgtattttattatgctcgtgcacaattccaatatagcatacattatatttgtgtgcaatatccaattatcataaatagcaattctgttttttatctattttcactatttatttttacttaaatatgcgctttattgctttttgcacaattgtttttgttgttttccacactttttaccataagcgtctttctcaaagaaaccattttttattattctcttgcgcatattgtgctcgtgctcaatgcgatattttataattttcccagcatacgctattgcctgtcagactgttttgtgttaaaatttttctaatatcaagcgggaacataactcattacaaagaccgcagcacaggatatgtaccgtagaagcaagaggtgataagatcaatggctgttaccattaatgagattgcccagctggcaaatgtatccagggcaactgtagataaagtaatacatcaccgtcccggtgttaagaaagaaacacgggagcgggtagaatttatattaaaaaatatggattatcgtcccaatcttcttggaaaagcacttgtgcacagtaagaatcctatgaagatcggaatcatccttccaccggattataatgcttttattcaggttctcttgaaagggatccacaaagcccaggcagagtatgctccttttggatttgaagtagtagttaagatgcttacctccctggagcccgtggagtttatggggctgcttctccaaatggaagccgaaaatgtaaacggcctggcaatgattcctattgatgatcctcaagtgatcaagaaaatcaaccaaatggagcagaatggtatccatattcttacattcaattcccctattaaagaattgaatggattctgctatgtaggacaggatcataagaaagctggtactgttgccgctggtcttatggagaagctgcttcctcaaggtgggaagattggtgtgatcatcagttctcattcccttacctgtcatacagaacggctggatggattttgcagtcgcctgttccaatctcctaacgagatccagatcattggcacagaagagaatcaagataagcaggaggatgccttccgtattgccttaagttacctgaaccgttatccggatctgatgggtttttacctgtctggcaatggatgccgtggcgtacaacaggcactttccattgccaatatttcccaccctgtaaagatgatctgccatgatctggttccggaatctgtccagatgctacaggatggctgcctggattttgtgatcgcacaaaatgcccaggaacagggatatcagatcgtgaagcagcttttcgagtacctgatgcttgcccagaagcctgcagattacttttatgaaattcctatccaaattatcacaaaagagcttctctgattttttgctattttacttttacagcttcaagtcgaacagtcgcgagacttggcgcatgattctggtcagcgtaagctgacatattctttacagaatcactgcgcatcctcgcggagcgtttatctcagtcggagattggactcccactgaaacgaatttgctgttactcaccacctgaaagaggtgggagtcttctcgactgagataaaccctttttgtaataggaacgctgcgaagtaatttcctactacacaagacaaaagctactgtatctccggttcttccaaccagcatatacagcagcttatattttatatcaattctggcaatacctgattacacaggcctgcttatttacagattatgattacggtcgatcttcctctatatgatcccggccctggtcaatgatggtccgcacatgctcatctgcaagggaataaaaaatggattttccttccctgcggctctttaccagtttgttctgctttaggatccgaagctgatgggaaatagcagactgattcatattcaataccctggccaagtcgcagacacacacctctgcttcaaaaaggacaaacaggatccgtattctggtggaatccccaaataccttaaaaagctctgccagatcatataactctgtttcttccggcatggtatcattcacggtcttcagaagatcctcatgtacttcaaagcaatcacacacctcaagacctttttcctccatacggtttctcctctctttcttttgaatttaaagattctttacaaacaaagctcttgttgcattcagtacggcgatcaccataactcccacatctgcaaaaattgccatccacatatttgcaataccaagagcaccaaggagcaggcaaatccctttgatgccaagagcaaaccagatattctcataaacgatcctaagacactttctggaaatcctgatcgcctttgagatcttcagaggatcatcatccatcagcaccacatccgctgcctcaatcgcagcgtcagaaccaagcgctcccatggcaataccgatgtcggctctggacaaaacaggggcatcattaataccatcacctacaaatgccagtttctctttttcaccttttgtagaaagaagtgcctctactttagttaccttgtctgccggaagcaattcactgtaaacctcattgattgccagctcggctgcaacctgatcagccactttcttagtgtctccggtaagcatgattgttttcctgactccagcctttttcagtgcctggattgcttcttttgcatggggtttgataatatctgcaatgaggatgtgtcccgcatatttaccgtcaacagccatgtgaacaattgtgcccacatgatgacaatcaatatatttaatgcccaaatgatccatcagcttggtatttccagctgctacggatattccgtcaaccttggcaatcacaccattgccgctgatctcttcaatatctgtcacacggcttctgtctatcgctttgccataagcctttttcaggcttttgctgatcggatgggaagatgcacactctgcaagtgctgcatactccagaagcttgtcatcactcatgtcactgtgatggatgcctgcaacttcaaacacaccttttgtcatagtgcctgttttatcaaatacaacgtactttgtctgggacaatgtttcaagataattggatccttttacaaggattccctgattactggctccgccgatccccgcaaaaaagcttagcggaatactgatcacaagggcacacggacaactgattacaaggaaagtaagtgctctgtagatccagtccccccactccggagaaagccccataacagccatccttacaatcggaggaatgatcaccagtgccagtgcagagtagcatactgcaggtgtgtaatatttggcaaatttggaaataaaattctcagatcttgacttcttggagctggaattctctaccagatccagaatcttggaaacagtagactcaccaaactccctggtggtacggatcttcaacacaccattcagattgatgcatccactgatgatctcgtcatcacatccaacttctcgcggaaggctctctcctgtaagtgcactggtattcagcgtggattggccttccactaccacaccatcaataggcaccttctcgccaggctgtacaacgatcacagttcccacttccacctcgtccggatctacctggcaaaaggtaccatccttttccacattggcatagtccggccggatatccatcagttcactgatattcttcctgcttttgcctactgcatagctctggaaaagctccccgatctgatagaacagcataacagctacgccttctttgtaatccttcagggcgatcgcaccgatggttgccactgccataagaaaattctcatcaaatgcctgtctgttcaagatccctttccatgcttttttcagaatatcatatccgatcaccagataaggaatcataaacaaagcgaactgcacgtatccttctaccggaagtaatgacagaataataatcagggcagtggaaataataatcctaatgaacatttttttctgtttcttattcacaattcatgcctcctgtaaatctgcctctctaaagcttaaagaaaaatctcgcaatcatcctcaactttcttgcagttcttcaatacatcctgcataacagccttaggatcctggccatcttcaaactcaacgatcatcttcagtgtcataaagtttacagtagcatccttaactcctggggtatgcttggcagcgtcctccatcttatttgcacagtttgcacaatcaacgtcgattttgtaagtttttttcatggtctactccttttctaccttcaccggctgcttacgatcctgcctaaggtctttcataatttcgttttatcatatgaacatttattcatatgtttgatattattatagcaccctagacctttttgtcaatagggtgctataatatttttagacattttcaaagaaatatcccataatattttcaggcaagtgcttttccaagatcctggcaagctgcctgtgcatcatcatccggctcctcgttgcaaagcacaggctgggaaacaagggatacacctgcaccttttgcattttcttcccaggtgcgcatccactctccatctccccatccataggatccaaaaagacctacttttttacctgcaagctttggctcacacgccgcatacatcggctcaaaaatagtatcttccagttcttcatctcccatagccgggcatccgaatgccagtccgtcaaactcctctactttgtctgtggagaaatcctctgcactaaaaacagaaacctctgcacctgcttcttttgcgccttccgctactttatctgccatagactctgtattaccagttccactccaaaaaacaactgctactttgctcataatataaatcccctttcattcatattgatgtcgccctcaggcggctactgtcagctgcacaacacttcttccattttgccacagactgcggtaaatattcctgcacttccggtacttatggaacagctttaaagtttcacactcattacagtatactttccaacagcctgcacacttataattctgtccactgttgttgataaaaccaatcacatccccaagaggataatccaaaaaaatcccaatttcatgaggaaattcctcctgcccggaaaaccgttccataaggcggttcagtgcgtaccctgcatctgtagatgtatacccgtacttttccaaaaaacctgccacatcggatccatccagcttttcctgcagctttttctcacgatatacatatacaagtgcccgtcgtccatgattacgcaaaaccagaagcttaactcccttcggattcatcagacgattccactgttctacttgttcagccagttcctgttcatcttctgtcactgcattaaacagattggccgccttaacagacgccagcgtaggggaacaatgttcaatcaaatatctttccatgttttccgccaaaatgaatcctcctttttgtgtccatttaatgactgctgctgttcagccccttgcaggatgctgtctgctaaataattaaatatgattacgttgtgcaaagcacagatcattccatgtaagcatgttactgtgattagtgttttataatctttataagccgtaactaactctagatcaaaaaataaggggcagcacccattgaatgttagtatttgctaaccacatagatagattactttatctatgcttttttgtcaatagatgatgcctctcttatttgtataataattctcattatgatgtcaatggctggtacagtgaatattaagtaaccgccatattgacttacctgattttaactgtactagttagtcctcataataaccagattttcgcccatacaaacctctgtttattccggaagaagattcttcatactcctcatcccgatcagcagtgtggaggtattatgaagaagtgctgaagtagtaggctgcaggataccagccacccccaggatgatcagtcctgtattaaagcctacaatggttctgtagttgcatctgattctcttcattagttcatcactaatgtatttcagcgcaagaaggctatacagatcatcaataccaatggtaatatctgccacttctcttgcgatctgtgcaccttcactgacagctatacctgcgtcagccgccgaaagtgcaggcgaatcattgatgccatctccaagcatcactaccttacgtcctgcggctttttccttgtctacgaatctggctttatctccaggaaggacttctgaataatattcatctaccccaacccttttggcaactgcagctgctgtacgctcgctgtccccggtcatcatcaccaccttggtaaatccagcgtctttcagcctgcggatcacttccggtgcttcctctcgcagcggatcctcaatacagatcactgctgccagttcaccgtctatggcaagataaagatgggaatactcttccgggatctgttcaaacttctcttccattccctgcgggaccttgcagttctcatcctcaaatacaaaatgagagcttccaatcacagttttatggtcatttacaaaagtggaaataccatgtgccacgatatattccaccttggaatgcatctcctcatggtccagatccttctgctttgcagcatttactacagcttttgccatggaatgagggaaatgctcttccatacaggcagccaggcgaagcatctcatcttcactgtgtctgccaaaagaaatcacctttgctacggttggttttgccttggtaagcgtgcctgtcttgtcaaatacaatggtatctgcttcagctacagcctccaggaatttgcctcccttaactgtgatcttgtaccggttagcctcgcggatcgcagacaatacggaaataggcattgccagcttcaaggcgcatgaaaaatcaaccatcagcactgcaagtgcctttgtagcatttcttgtgagaagatataccagacctgtaccgccaagagtatatggaaccagacggtctgccagatgttctgccttgctctccagtccggatttcaatttctcggtatcttcgatcatagcagcgatcttttcatatcggctgctgcctcctactgaggaaacagtaaagaccacttccccttcttctacaactgtgcctgcatatacggtattgccggatatgcggcgcactggtacagactcacctgtaagagaagcctggttcaccatagcctcaccttcaagaactgtaccgtcaaatggaatcacattgcccatgtgcacaaccacgcagtcacctggctttatcacatctgcatccgtcagtacttcctgttcattatctgtgcgcagccataccttgcccacattcagggacatagtacgagccagatcgcctaccgatttcttatgggtccactcctccaacagttcacctactcccaaaaggaacattacagaaccggccgttccgaaatctccccggatcatagaaacactgatggcagttgcatccagcaccggcacctcgatcttgtgctgccataaagtcttcagacctttccaaatatattttgcagataccacgcctgtatagatggctgaaaatggcatcggaagcataaacttccttgcataatgaaagatcactttattaacaagcttctctttatactgttcatttaattccctgccggagctatcaagcactgctgccggaaccttcacattctcatagtggaagcactgcagcttgccaagaagttccttcctgtcgcctttgtaactgatggtggcatcacaggttttatcataaacatttgccgttatcactccgtcaatattttccagataatactgcaggatatctgcctgctgataagtcattcgtttctggaaaatatggatcctgattcttccccggatctcatgtttaatattaaaacgcatcgttattctgcctctttaaatgtatcctcttctgttttattctcttctgtcttgatttcctcgtctgctatatcctcaaaagcctcctcagcagcaacgcggtcttcgttgatctgctttgccccctcataaatgtcaccgcagttttcctgaactgtagtaactgtcttcatcacgcagtcctttgcacgaagaacagctgctgtgcaattggtatacagcttctttgcatccttgctggacagcgctttgatgcctgctgttccaaataaaactcctgctgcaaataatcctgattttttccagtttaaatctgccataatagattcctccttatatttcccagtcagatgatctctgctgtttctctttctttgtaaaagtttgaaagtcagtatagcatccgtatttttgcttgtccagaagcttttccttaattgagaaacattctcaattgtgaagtgtgctcactgttgacagacataatgcattcccatatcctgcaatgatcccgcctgctttcaggcttcgcatttgcaagccttcatttcaatactggcgatttcctgctcctttatatatccacattctttcatacctgccttcatcacttcccgccacattccgggagaaagcctgcatattgtatcgtcacttaatttcacataacaggatttttcctcacaacaggtactgcagtctgcgatcttatacatgtttttccggctgatggccccaatattctcaagcacgttcaccatacggtaaatcgttgcaggaccaatattcttatcttttttctgaactttaaaataaatctctttacagcaggagcactcctcttccaaaataatatccaggatcgtccttcgttgtctggtgatcctgcatccttgctcacgaagcttctggatcaccatggttttctgcattttcgtccgctcatatgactgagactcccttgctgcttcttcctttcgttctcccaccaaaactcacctcctgttgctctgggctgatgcagtaacagcctgcaccctgttggatgcaggctgtaaaagtgcctgtctttatcaggcttttacacttacttttaatgtattgctctctttgtatggtctgaataacagataaataaagcatgcaaccagtatgaaagcaaccactgtgccaataccgaaaattccagtagtgatcagtgtaccgatctgatagatacaaagtgaaactacataagcaagaccgcactgatatccgattgcaaaccagaaccattttttgttgttcatctctctcttgatagcgcccattgctgcgaagcaaggtgcacaaagaaggttgaataccaggaatccatatgctgcgataggtgtcataacctgtgccaggttaccccagatctcagcgccgtcttctgcaacttcagcaaagccgaacagcataccaaaggtagctactacgttttcttttgcgatcagaccagttacagcagcaacagccatcttccagccttcgccggcttttgtccagcccaaaggtccaaagatccaggcaattgcagaaccgatctttgcaaggatactgttgttcaattcctctaccattccaaaggaaccgccttcccatccaaagcccattaagaaccacagaacgatggtggaaagaaggatgatcgtaccggcctttttgataaaggaccagcctctctcccacatgcttcttaaaatgttaccagctgtcggccagtgatatgccggaagctccataacgaatggtgcaggatcaccagcaaacatttttgttttctttaagataataccagagcagatgattgctgcaatacctacaaagtaggaacttgtagccacccatccactgttgccgaagaatgcacctgcgatcatagcaatgatcggaagctttgctccacatggaacaaaggtagttgtcatgatagtcatcttacggtctctgtcattttcgatggtacgggaagccataacaccaggaacaccacatccggaaccgatcagcataggaatgaaggacttaccggaaaggccgaatttacggaagattctgtccatgataaatgcaacacgagccatgtatccacaggactcaaggaatgcaaggaagaagaacagaaccagcatctgcggtacgaaaccaagtacagcgccaacacctgcaacaataccatccaggatcagtccctgcagccatgcagcacaatgaacagcttccagtgcagattcaatcgctggcgggatgatctcgccaaagagaacgtcatttgtccagtccgttacaatcgtaccaaccgtagttactgatacataataaacaacaaacattacaactgcaaagattggaagtgcaagccagcggtttgtcacgatacggtcaatcttgtcagatgttgtaagtttctttccttttgcagattttgtgtaacactgcccgatgatggaagaaatgtaaacataacgttcattggtgataatactctctgtatcatcatcaaatttatcttcaagagccttaacctcaatagatacatccggcacgcttttcatctgttctgtgatcttgctgtctttctccagaagcttgatagcaaagaaacgcttctgctcctcagcaacaatacctgtaagctttgtctcaacagtcttgatcacatcctcaacttcctgagcaaactcatgaacaggtgttacgctgcttttcttctgggctgccgcaatagctctttcagcagctttactgatgccagttccctttaaagcagagatctcaactacttcacagccaagctttttgcttaatttgtcaatatagattttattccccgtcttctgaaccagatccatcatgttgacagccataaccaccgggatgccaagctccatgatctgagtggacagatacaggtttctttccaggtttgtaccatcaacgatattgatgatcgcatcaggtcgttcattaattagataatttctggcaactacttcctccagtgtatatggggaaagggaataaataccaggaaggtccatgatgatcacatctttgtgtccttttaaacgaccttcttttttctcaacggttacgccaggccagttaccaacaaactggttagatcctgtcagcgcattgaacaatgttgttttgccgcagttcgggttgcctgcaagcgcaatcttaatcgacattttcatgcctcctctttctttcctgatttaattttgtttcaagcttcttccattcgttagaatatacggttgttaattagcattcactaacggctgcgtaaaaaaaatcattccacttcgatcatctcagcatccgcttttcttaaggacagctcataatctctcactgttacttccaccggatctccaaggggtgcaacttttctcacataaatccctacaccctttgtgattcccatgtccataatacgcctttttacaggcccttcgccgtggagccttttaacagtaactgtctggccaacggcaacttgacgtaatgttttcataacaaactccttttcatgaaaatatgtaactttttattaattcacaatccccgacagactctcatgtctgtcggaggctgaaaatctccaaggatacatgatgcttgtttacaccataatcttattggccatgtctttaccaatcgccacacgtgaatcttttacatttacgatcagattaccgtcattctcagaaacaacggtcactgtacctcctacaacaaagccaaggttttccaggaatttgcgtatctcttcttttccaccgactttccggatcacgttcggctccccttcattaaccatagacaaaggcatcattacactctcccttcacgttgtcatagctatatctattaaatattgtttctcacttacgtaaattagtatattctaatatcttttagtagtcaactactttttttatttttttctcacaatgattagcagcatttatctcaatcaaaaatagccacagcaatccgttaaaagcaataacag

SEQ ID NO: 54 - DNA, 19010 bp, Unknown
  gut microbiota DNA sequence
ttaattattcaactgtcaaactcccgaggaaagtaattggccttgtatggaagaaatgattgttgattttccaggattatagggtataatagacacagggtctttttgaaaagacacagtaactgccgggaagtaagacagttacaagacaccaacatatccgtgtaaaacgggccaaaggaggatattatgaagagacgtattgctgtactgttagcactttcattaacagctgcactgccgtgtacagttatggctgaggacacagctgaggaggcaacagaagcacaggaaactgatgcagaagcacaggatgaggctgcagaggagaagtctgaaggcgtaatgacttatcaggagtacatggatgctgacctggattcagaggttactgtagagacttatgttcaggcaaagcagagctggtgggaagataaggcaaccgtttatacacaggacaaagacggtgcttactttgtttacaatatggcctgctctgaagaagattatgataagctggttcctggaacaaagatcaaggttacaggatataaggctgagtggtcaggagaagtggagatcacagatgcgacctttgagatcgaggatggagaatatgtggcagaagctcttgatgttacagatcttcttggaaaagatgagctgatcgaccatcagaatgagtatgtatcttttaaaggcatgacagtagaggcttctcagcttgatggtgaggatgtagctttcctttacaactatgatggatccggaagccagggtgatgacctgtattttaatgtttcttacaatggagagacatatacatttactgtcgagtcttatctttgcgacaaggattctgatgtatacaaggcagttgaaggtctgaagatcggtgacaagatcgatatggaaggcttcctgtactggtatgagggtgtgaatccacacatcatctctgttacacctgcagaataattgaggcggatatctcgcttatcaggtgatagcagaaggataaaaagatatacttgtaaaaagaatctaacaaacaagaattaagatgataataagaatagaaatcccgcagctgtggcagttatgtcaggctgcgggatttttgtcattcagaaaaggtgcaggcaggctgttaacgctgcctggtatatgaaatccctgtagggattacttgcttttgcaaaaatagcggagcagcagatatataagaatcaggatccaggcggctgccagggaaccaagaagcagcatggcggtgccaggcagtggtcccagatattttttacctccggaagcgctatctgcctggtccagatgatacagggaagaaacgtcactgtacagcttctttatgaaatcatcattgacttcctgcttcctgcggacagatttggtaacagtttcgatcagctgtcctgcagcatctctaagagaagcagagccgttgaataccggggtgataaaggtgttagccatgttgttaagaagcagcctggaggcctggatcttaattttatagtgggcgttattatcctcaccagctctggacagataatcctggtactggtcactgttctgagctttggatgtaaccggaacatacccttctgtttcagaataggcagtctgcacatcattggtcagaagatattgggtgaacagccaggaagccagtacctcctggggatcttttttgttaaagatacatatcgaaggcccctgagagatcatggaaggatgatcagggtcaaactgtggaatggtcatcacttctgtgtcaaagtctaccagtgcactgtcgctgatatcacacaatggagcattggtacccatccaggtagagccggcagtggaatccacagcaaaaatacactggcctgcattcaggaaattggctgggtagctggaaatcttaaatgtggagaaagcacctgttttggcatgggctgctatagtatttaacagttctttggttgtgtcgttaaacagatcgatctcaccatcagaagtggaatatcctgcccctttttgcttcagcatctggatcatcatattatccgtagacttgtatatgaaaggaatcatcacatcctgtccgttgatcagaaactttccgtctgaatcctttttcatagctgcttcggacacttcccatacaaaatcccaggtcagagtttcgggaagagtatagccaagggcttccacataggtcttatttacatagcagacttcagtggagcgcatgaaaggcagtgcataataatggccgtcaaaagagcattcatccaggaattttgggatgatctcatcactggatggagaatcaaagaccagttcgctgccgcccaggccgtaattttgatctgcgatcaggtcatccagagggactaccgtaccttgtccggtgagataagtggcaatatggtcagggtaagtgatacatacatccggggtagtgtctgtggcaatattggtgatcacatcattgtagattttgccgtaatctgtatacagacggatgtttacagtaatattgggatacagctcctgaaaatcagagatggcttttttataaatatcggtctgggttttgttggtatcatttttggcccagaacgtgatctcataatccttggaggtatcaaaggcttccggtacagagaaggaagtttgttctttggagccgtggcagcctgcaaaaagaggcagacaggctgtcagtgtaagaagaagcaggggctttgtatgtaatttcatcctttgattcctcctttcgatacaccggacatgatctttttgcggaatacaaggaataaaaggatcaagggcagggaaatgaccacaaccgctgccatcatggctgggatattttcccggccaaagccgttttcgcggatttcctggatcccgttggaaacaagatagtaatccggattatctgtgatcagtctgggccatacataggaattccagcactcgatcactttcagtactccaatggtaaccatagtaggcttgcagatggggatcatgactttgcaaagatatttcagatctgatgtaccatccaccttggctgccctgtacagctcgtccggaacctgctggaaattttctttcagcagataaatatagaataccgatgtgatagagggcaggatcagtccggcaaaggtattacgcatatccaggtttgtgatcgtaacaaagttggtgatgatcacaagttcattgggaatcatcatcagggaaagaaacagggtgaacatcaggtttttgcctggaaaggacagtctggcaaaagcaaaggccgccaatgtgatcacgatcatcatgatccctgtggttacaattgtgaaaaacagggtgtttcccagataccgtgccagtggaactgaggtaaatgcatctttatagttctgaagggtaggcgacagagtaaagaaagcgggaatatgctcactgttataggaattataattttttactgaagttagaagcatccagtaaaatggaaaaagtacgatcagtccccagatgctaagcagtgtatacaggcatatctggctgaatctacgtctgcgcctggcagaaactttgatttttatatagtcaatctgatttttcatggttatatcctctttttgctggaacttacaagcaggttgacgcaggtgatggtgagcacgatcacaaaaaggatgatggctgcggctgaagcataggatggataaccgcctccattgccgtatagcatgtcataaacatatcctacaatggtattcatacctgctgcgttcagatccgtaccaaacagggcaactgcatcgctataggccttaaaagcaccgataaatccggtgatcaccagataaaacaccgtaggtgagatcatgggaagggtgatccttataaaagtacggaatctggaagtgccgtctacccgggctgcattatagtagtttttgtctacagaagccagggcgcctgtcaggatcaggaccttaaaaggcataacaacccagatggtgtaaaagcacagcacaaacatttttgcccaataagggccgtcaatgaaatccacaggccctttgccgaaccaggccagcatcaggttgatcaggccgtctgtgtaggctgtttttttgaaaaggatcataaatacaagtcccactgccagagtgttggtcacataaggcaggaaataaacggtttggaacaggtttttcagtgccttgatactgcttactgccatggagagcagcagtgacaaaagtgtggacaaaggtacggtgatgatcacaaggataaaggtgtttttcactgcctgcaaaaaataggtgtcgtgaagcacgtaggaataattatataagcctgtgccataataggtctgggaggcagagttataaccctcttcaaaggagtaaataaatacatcgatgagaggatataccataaaaacgccaaggaataatatggcaggcagaaggtacagccagcctttataatttctttttttcatagcagcctcctgtcatgccagatctgcagggatccgcacgtcggtcgcccggtcaaacagaaagaccttgcctggttttaatgcaaaatgaaccacagaagaagaaagatccaccttgttttctgcactgataatggatcggatggcctgattttcgcaggccggatgtgtggataccacactgatatccctgcccatcacttctattcccgaaagctggcaggagagaggtccatcctccctgaggataaatccttccggccggatccctatatatagctcctgatccggcagattctttgcagaaaggattttctgatcgttcagataaatgcctccgtctttgctgaagcccttaaatacattgatctgaggagttccgagaaatctggcaacaaaaagattgcaggggtcatcgtatacctgctgaggcttgccggtctgctgcacaaggccatctttcattactacgatacagtcagaaatgctcatggcttcttcctgatcatgggtaacgaaaacagtggtgatctttgtagccttctggatcttgcggatctcttctcttgtctggagacggagacgggcatcaaggttggaaaggggctcatctagaagaaggacatgaggcatttttacaagtgcccgggcaatggcaaccctttgctgctgcccaccggacagctctcctggcttacggtccatcaattcctggatctgtaccagacgtgcagcttcctgggcacgatttaacatttcctgcttggacagcttgttttttcctttcagattctgaaggggaaagagaatattctgcagtacggtaagatgtgggtaaagggcatagttctgaaagaccatgcctacaccacggttttcaggaggcaggctggtcacatcctgatctccgaaaaaaatctgtccttctgtaggtgtttccagtccgcagatcatattcagggtagtgcttttgccgcagccggaaggtcctaaaagtccgatcagctgtccgtccggaatctcaaagctgaaatgatccacagcagtaaccggagtatggacgcggcgtgatctggaaggaaaggttttggtaatgttttttaagatgattttcatatgggaactctcctgtagaaaaatgtgggtaactgtctggaaaatatagtaaatgtacggaacagttataaatatgaaaagaaagggaaggttgtgtgcatacaacattcccttttttcaaatatctggtatatggatctttgctgatatacagatcacattatcggataaagttggtcattatcttcttttctgtttccgggtggtggatccctgcttttttgcctgcctcaatacaatttaaaagccaggtcatattctgacccagattacgcatgatctgaagaccttctgcatctttacgtacttcatccggggtattgccgtgaaccataggccaataattggaagaaaccactggcatttggtgataggagaaatatttcagcagtacgtccagggtagcggtggtgccggctcttctggcagatgcaacagctgcagcaggcttgaacagcagatctttgcctgcaagggagcaaagcttatccataaactggatgatctggccgcttggggaagcccagtataccggggagccaactacaagcccatcggattcttttaatttctgagcagcagcttttacgttttcctgggaaggatctccagcctggaaaatctctgtttcaatgccatttgcatttaaaacgccggctacttcacaaagtgcggtgtaagtacagccttcttttcttggactgccatttaaaagtaaaactttcatttgtgatacatcctttcttatatatagtggcaaaatatttatagtctctgtgcttaactgaaaatagcacctgcagcaccaaacagaccggcactggcagcgcccatgatcacacttgcgatcagtacacccagcataactgccagaacactggatttaaaatccatatccagaagactggctgcaagggtaccagtccatgcacctgtaccaggaagggggatgcctacgaaaagcataagtgcgataaaaagtcctcttccagctttttcctgaagctttttcccacctttttcacctttttcaaggcaaaaagtgaaaaacttaccgatcactggtttatcctttccccagatcaggatcttacgggcaaacagataaataaatggcacaggaagcatgttcccgataattgcaatgatgtaggatggcacaagaggaagaccaaatccaacagcataaggaatggcacctcgaagctcgatcaggggaagcatggaaatcagaaacacaataagataatttttcatggaaatctccttttcataatattttctgccaaagatctgtgtggcagcagtcttttcctttatgattatctgaccgctattatacgccagggacagtgaattttcaagtgaaaaggggcaggatcagccttatgtgtctgcgaatacaaggcgaagtgccattgccatttcttcaggagattctctggcaccacccaaagaccagtggatgtaggaattataaagtgcaccgctgaaagcatgaagtctgtaaatatggtccaggctgtcatcctctttcttccagcgatacatcacatattgatcaatggcattcaggaaaaggtgaccatatccgcatttgaaaagattgtccagaaattcatggtgttttttaacgtaggtaaaataatgggtcagattggatacatcatagtaatttcccttaatgggaagggcttggatatctttatcatagaagatcagggcatcctccaggtaggcttcaaaaatatcttccttggaagagtaattccggtaataggtcattctggaaacaccggctttcttggtaagttcggaaaccgtgatggaagaaaaactcttttctttcagaagctgattaagggcagctgcaatacacttccgcgctaataagttggatgggttctttttatggatgttcatgaacaaatctccttacattgtcacagtttgaaaaaaagaattgaatctttatttggaaagtgttacaattcgtcacatatgattatttgtaatcaaaagccagcaccgaaggtgttttggaatgcattttcctgttaggtaattgcaaggtactgaacggttaggattattttgattatatcgaatgcaggaaaatttgcaagatgttagatgagaagttaaacctatgataacttactccttagagaagagtagtcttcctggtggagagagcagaagggttttggaagggagcttaaggtatgaaaactgccgtaatgacagacagtaacagcggtatcactaaagaagaagcagacagggtggggatatttttactccctatgccggtgatcattgacgaacaaacatattatgaaggaatcaatctggagcaacgctttttttatgaaagtcttatagaaggtcatgatgtatctacatcccagccttcccctggagatgtgatggatatgtggaagcagatcctgtctaagggctatgatgagatcatccatattcccatgtccagtggtttaagcagttcctgtgctactgccattggacttgcagaggattttcagggaaaggtacaggtagcagataaccatcgtatttctgttactatgcgtattgctgtaatggaagcactgcatatggcaaacgagggcagatctgccagagagatccgtgaggatctggaaaaaagagcctatgattccagcatttttcttgcagttgatgatctgaaatatctgaaaaagggaggcaggatcacgcctgcagctgccgctcttggtactgtgtttcatatcaagccggtacttacgatccatggagagaagctggatgccttcgccaaagcacgaggcatgaaaaaggcaaaagccattatgctgaaggcactgaaagaggatctggaaaaacgttttccggagattgatcctaaatatgtaaggatcggggcagcaggagcaggtctgagtccggaagagtccagagaatggcaggccatgctccaggagatgttccctgaggtacaggtttattacgatcatttgtccttcagtgtaagcagtcacaccggcccgggagtatacggtatgggattcagcattgtgcaggatccatccattggttaaaaagtgcgaatgtaattgcttacacttttacttgatcataaatttatgtataaaatttggttttatgacttgatttttggttagaaattgctatcatatgagatgaatatatatgttttcagtgcctacgcagattaattgtggagggtaaaagagaatcaggtggaaatcctgagcgatccggtcactgtaagcagggagcaatgccagtaaatccattggacgacagtctgagaagggggcaaagtgatgaactgcaagccaggaaacctgctggaaatatccgatgaaaagcttccgatgaaagcactttcactcaaataatcagatcaaaaggtggcaggggatttttatgtgccctggcacaagtatttttatgttgcaataaatcacctgttgcagcttaaataccacagagaaagattaaggattgaaggaagtctgttttcaaatgaaagcaggctttttttgtgtgtagaggagattattttgtaatgttcttatttcacaaaaattccacgcaaagcacagaaacgtgtatatccgatgtaagcggactcctgcctctacaggtggcgagtacctaattttatcaaaggaggaagtagcaatgaggaaaaagtcaaatgctcttttagcaattttgctgacgggagcaatgaccgtaacatctatatctcctgcgtttgcagcagaggatttttcagcagatgcagaggtacaggctgttcaggatgtggtcgaggaggaatctgacgatgatgtatccgatgtgcaggatcagtctgatctgggagaagcggaggatgtggaggatgtatttaccagcagtgaagagccttctgatccggatacagtggatgcgtgtttcggattgacggatggtaatacagcagaatatgtacaggatgatcttctgctggcagacagttctgaagaaaaatatcaggacggaacctatactccggaatcctttactttccagggaggttcaggaaaagttacgattacctgcccgaaagtaaccattacaagaggaaaagtaactgcaactgtggttttttccagcagcagctataataagctggttgtagatggagaagagtattttcctgtttcaggtacagaatatacaggatctgtttttcaggttcctgcggttctcaaccaggatatggagatcacaggcactactgtggcaatgacaactgctcatgatattacttatacgattcatattaagctgaatgtgcctatggtaacgccagctccggacagactggaagatggtacctaccaggcagctgtaaaggcagatagcggatttccggctgaagcctgcaccctgcttgtaaaagatggagagatcgatgcagttgtcacactgaaaaacggggattatgacagactgtatgtgggggatgcgctggatgcggtcaatgaaaaggatgacaagctgatcgcttacagaccatcggaggatggcacaaagcatattttctggccgttggctgtagataagctggatacattgttccaggtagctgcccgaaaaacagacaaaacctggacagaccattatgtgaaaattctttcttcttcagtaaccaaggtaagcgatgaagtccaggcaccggatcaggctgccgaggctgcaaaattcctttacaggaattatgtggatgatgtgatttccacaacaggcggtgttacaaaagacggaagtacttatcatgttgcatattacaacagctacaagagtgctgtttctggcatcagcctgaaaagaccaagtgtaaaagagtataagagcggatggttcttctcagactggagcatttttaagtctactgttaaacagcagcctgcaaaatcccagacgtataatctggatacatcaaagagaacccaggagcagcaggtaactgccacactgaagctgtatgatccttcggtggaggatgcagccatcaatgataacagtgcacagcctctggctgagtacacatacaagcttgtgcttgcagcaaaaccagatacctgtcaggtgactttccgtgcagtaaatagtaagactggcgaggtgattccggaagcacagatcacagtcacaaacaataccacaaaggaagaagtgacaggtacagagggcatctatcagctgaaatccggacagaaatatactgttcaggcacaaagcgaaggctatattgcagctggcacaaagggggatgctgttgcaaagcagacttcctttaacgctgccttcgatgaaaccgttgacctttccctgactgcagaggcggacagcaagcataatgttacctttaagatcgtagatgcagaaggcaaggaagttccggatgcagtgcttaccgtaacaggtgaaactcctgctgaggatggaagctataccttatgggataactgtacttatttttatagagtaactgcagaaggctatcaggtggtaagatcaaaattcatcaagcctttggaagatcaggaggttgttgtaacccttacagcattgaaaaattaccaggcttcgattaagatccgggcaaaatccggacatttggaagttgtgaatccaaaggttctgtctgttacttataagaaaaacggagaaacatttactgtggagccatcagaggatggtacctacccgatggtggaaacagtagcatatacttatacatttgccgctgataactatcagagtgcaaccgcaaactggactgcatccggaacagaaggtccggttgaactggaaggtgtgttaagcaaggaaactgaaaaagcccttcttgaggataccattgcaactgcaaaggagctttatgatgaaatgacagaaggggatggtgccggacagtgggcagcaggaagcaaagaaacactggatgcagccattcaagcggcagaagaagtatatacaaaggaaaatgcagcagacgatgattataaaaatgcaaaggatgctcttcagtctgttgtatcaggccttagccagaatgaaaatgcggaaagcataaatattacagtttttgtaaataagaatccaggggaagcacctgttaaaatggcaatgaacgtgacagcagatgatgcttctaaggtgacgcctaccgactctaaaagaaaagataattacaacaagtcaagtgacctggaaaaacgtgcaaccgtgatcgatgcactggttgatctgcataaggaactgttcggcgaggaatatattgcaaatccaacccaatatctgatgtgcggaagccgaggcgcaggtacaggtttccttcttggccagaagagttataaaaattttgttggattccgtgtaaatggaaaatatgtggcaagtgatccaagaatgtgcagactgaaagaaggagatgtgctttccgttttttcagcaacaaaagtggaaaacccggcatacctgcagtttgaacagcaggagaccagggtaaaccagaatgaggaatttacacttactcttaccggcgattcctattacatggataaagatatcagcagaacagtaggtaagaatgaatttacacctgcagagggctacgaaatcactttggtaaatgctgaatctggtgctgaagtcactggagaagcaaaaacagatgcacagggcaaggtaagctttaagatcagcacacctggcacctatgtggtaaaaacagttacaaatgaaaatgtagaaagcattgttctgccttatgcccagatccaggtaaaagaaaaagcaccggtaattctggaagatggtacataccttgtaaaagtgatcaataacaacaaaatgtttaatgtgatcaacaacagctgtgtccttaaagtggaaaacggaaagatgacagcagagctttctcttcacggaaaaggctatgattacatgtatgcaggaacaaaagaagaggcagaggcagctggtgaggctgcatgggcccattattacgaaaaagaaattgcagtggataacggagataaggttgaaatgggcccatggtatacctattctctggctgtttcagcactggatcaggaaattgctttttcctctcataataccagggacggcaaatggtttgaccgtaagcttactttccttacagaaggtatccagaaaatcaatatcccacagcctactccaactgtaacaccgactccaacggtagagcctactgctgcgccacagcctactgcagtaccgcagccaacagaggcaccaaagtctgtaactgtagcagccaagaaactgacggtcaatacatccaccatgtatctgaaagtcaagaaatcagataccattggcgtgatcgttgcaccatccaatacaacggataaggtaacatataagtcctccaaaaaatctgttgcaactgttgataaaaacggaaaagtaaccgctaaaaaagcaggaaaagctgtgatcacagtaaaagcaggaaagcttaccaagaaggttgcggttattgttggaaaatatgcaaagaaagttacaaagctgaaatttgcaaagaaatcaatgactttgaaaaagggcagtatgcagttcctgaaggtaactgtgaaaccaaagaaagccactacaaatctgaaatggaagtcttctaataccaaggttgttactgttgataagaatggaaaagtaactgctaaaaaagcaggaactgcctggatcacagtccgtggcgatgggaagaaagcatctattaagatcaaagtaaaatcaaaataaaagatcaaagaaatcatctgaaatagtaaaaatccctggagccggatatatcctatcggctccagggattttatgttctaaaacatattgctgaggaagatctccacacctatggcgatcaggatgatgccgccaagtatctctgcttttccggaaagctttgtaccgaatttcttaccaagcttcagaccgcccatacagatcatgaatgtgacggcagcaatgatcagggaacagaccagtgccatgacccagccataatcggaaatggtaaagccaacagaaagtgcatcaatggaagtagctacaccttgaaccagcaaagccttaaggccaacgaccgtaccgggatgctcagaatcatctggccgtataccactgatcagaagctgccctccaatgatcaccagaaggatcaaagcaatccagggaataaacttacggaaagactggaagtaattggcaattgtgtgtacgcagatccatccggtcataggcatcagggcctgaaagcctgcgaatacaccggctatggtaagcattttaccagctttcatgtccggttctgccagaccattggcaagggaaacagaaaaggcatccatggccagtccgattcccagaagtgcactgttaaaaacaaatagtaaattccattccatatcagtatctcctttgtttaatgatagatttatccataaaaaatcccatatacagtgcaaaagttgtatatgggcaaaataacactccctcacaggaattaattgtatccataccatagcaaaaaagatgagagctgtcaattatttttatcaataaaggacacgccacgatatgagcataaaaatgggatgttaatcccgcaatatgcgaatagagggaaggattgtgggagtgcaaagcacggaacaatccgtgtaatcatgattttggcaaaagaagaaatggatgtagttgacaaatggtttgatgggacttacactaaaaactgcaaatgataaaaattatcaagtatgaaaagaggaaatgcaatatgacattaaaggacttacctattggaaaaacagctactgtacagtccgtaggaggagacggggttttacgacagcattttctggatatgggactgataccacaggctgacgttaccatggtgaaatatgctcccatgggagaccctgtagaactaaggatacatagctatgaattaaccttgcgcctggcagatgcacagaagatcattgtggaaaatgtacgggatgcaaaagttgcaccgcctaataaaagaaagaaagcgattcctcaccccggacttggggaaggcggaaagttccacagcaaaaaagaagaaacaccgcttcctgaaggggagaagctgaccttcgcccttgtgggaaaccagaactgcggaaaaacaactttatttaatcagctgacaggttctaatcagcatgtaggcaatttcccaggggtgacagttgaccgtaaggatggcgtgatccggggaaatgagaatacgcttgtgacggatcttccgggaatttattctatgtcaccttattccagtgaggagatcgtaacaagaaattttgtgttggatgagcatccaaaaggaatcatcaatattgtagatgcaaccaacatagagcgaaatctttatcttaccatgcagctgatggagttaaatattcctatggtgcttgcactgaatatgatggatgaagtaagggaaaatggaggttccatacttgtgaaccagatggaggaaatgctggggatcccggtagtgcccatctcagcggccaagaatgaaggaatcaatgaattgatcagccatgctatccatgtggcaaagtatcaggaacggccaagacggatggatttttgtgatgcaaatgaagatggcggtgctgtacacagatgcctgcattcagtcatgcatctgatcgaagatcatgcggaacggacacaaatcccccttcgttttgcagcaagcaagctggctgagggagacccgatcatactggaaagactgcagcttgatgaaaatgaaaaagatgctcttgagcatattgtttcacagatggaaagtgaaagagggctggacagggcagcagcgatcgcacatatgcgctttgactttatagaaaatgtatgtgatgaaacggttgtaagacccagggagagtaaagagcacttaagaagtgaaaaaatagacaggatacttaccggaaaatatactgcacttccctgctttgccggtatcatggggctggtgttttggctcacctttggtgtgatcggcaaaggactgtccgatcttctggatatgggtattaccagtttaacaactatggtagatcatggacttgaggcatggaatgttaataaggtgcttcattctttgatcattgacggcatatttaatggtgttggaagtgttttaagctttcttccgatcattgtcactttgtttttgtttttatcattgcttgaagatagcggatatatggcaagggttgcttttgttatggataagcttcttcgtaagatcgggctttccgggcgaagcattgtgcctatgctgatcggatttggatgtacggttccaggtgtaatggccagcagaacacttccctcagaacgagacaggaagatgaccatattgcttacgccttttatgagttgttctgcaaagcttccgatttatgctttttttgcagctgcttttttcaaacagtatgctgcacttgtaatgatccttttgtattttgggggtatttttataggaatcattatggcactgctttttgggaaaaccatgttcaaaggagaagcggttccttttgtaatggaacttcctaactaccggatgccaggagctaagaatgtaggccatcttctttgggacaaagccaaggattttcttcagagagctttcacagttatttttgttgcaaccattgtgatctggtttttacagacctttgatctgcacctgaacctggtaacagactccaggaacagtattctggctgtggtttctggctatattgcaccattgtttgcacctctcggatttggggactggaggatttcaaccgcattgatcacaggctttatggcaaaggaaagtgtggtatctacgctgtctgtgctgcttggtaaaacagcatccctggctaagatactgaatccgctgggagcagccagtctgcttgttttctgccttttgtatacgccatgtgtggctgccatagcctctattaaaagggaattggggacacgatgggcagcaggagttgtggttggacagtgtgtgatcgcatggattgtggcttttgttgtaagaataattggaattgccattggattttaaaaaaaatgactatttttcattttttaataaaataatattgactattggtcattttacgctatactatttaactaagaaaatcgttaaggagatgacataaatggtcaaagtaggaaagtggatagccaaacataaggtacttgttctgctgatcgggctgctgcttgtattcccgtctatgatcggaattgcgaagacaagggtcaactacgacctgctcagttatctgccggagacactggagacagtgaaggggcaggatatcatggtggatgaattcggaatgggtgctttttccatggtagttgtggaaaacatggagatgaaggatattcagaaactggaagatgaattcagtcaggtagagcatgtgaaagatgttctctggtatgatgatgtggcagatatcagcctgccggtggagatgattccccaggatcttagagaagcctttttcaagggagacgcaaccatgatgctggtgttgtttgataataccacatcatcggatgatgctatggatgcactgacagagcttcggaagcttgccaataagcagtgctttatcagcggcatgacaggtgttgttacggatattaagaatattgccatgaaggagctgccgatctacgtggtgatcgcagctgtgcttagtttggtggtattggagcttacatccggatcctttgtggttcccttcctgttcctgcttagtatcgggcttgctattttgtataacctgggaagcaatatcatttttggagaaacttcctatattacacaggcactgacagctgtccttcagcttggtgtaacaatggattattctattttccttctgaacagttatgaggaaaataaaaagagatttccggaagataagaatcgtgccatgggtcatgccattgccaataccttcaagtctgtagccggaagctctgtaactacagtggcaggctttatagccctgtgtgttatgacctttgccctgggtcgtgatctgggtattgttatggcaaagggcgttgtgatcggtgttatctgctgtgtgactattcttcctgccttggtgcttttctttgataagccgattgagaagacacagcataagcttttgctggcaaagatggataagccgtctgcatttattacaaagcattataaagcatggatcctggtatttctggtgtttttattacctgcaatttacggaaacaatcatacaaagatttattacaatattgctgaatcccttccagctacattggacagcaatgtggctaacgatgagctgaagaatgtttttgacatgagtaatatccatatgatcatgatggataagaacatggattccaaagaaaaacagaaaatgctgaatgaaatcgatcaagtggatggtgtgaagtggagtatcagcatgaattccctgatcggtcctaccataccggattctatgatccctgaagatattaagaaaatcttcaagggaaaagattatgagcttgcatttatctgctccgaatatggttctgctacagatgaggtaaatgcacagatcaaagccattgacaagattgtgaaaagttatgacaagagtggtatggtgatcggagaggcacctcttatgaaagaccttcaggatactacagatgcagacctggtaagggtaaatgtaatctctattggagctattttcctgatcattatgttcctgtttaagtccatttccctgccaatcattttggtagcagtgatcgaatttgctattatgatcaatatggcgattccgttctaccagggcatcagccttccgtttgtggcaagtattgtgatcggtgcgatccagctgggagctacagttgactatgcgattctgatgaccacccgttatcagagggaacgtcagcatggcaaggacaaaatggaagccatcagcatcgctcataagaccagcatgccgtctattatcagcagtggactgagcttctttgctgcaacctttggagtatcctgttattcccaggttgagatgatcgggtctatctgcacactgcttgcacgtggagccattattagtatgatcgttgttctgtttgttctgccggctatgtttat

SEQ ID NO: 55 - DNA, 35648 bp, Unknown
  gut microbiota DNA sequence
cttttcttgacagcagacagacagcctctacatgctctgtaaaacaaaacatctccactggctggatcttcctgacagcataacctttccgggtaaggtatcccaagtcacgggctagggtttccgggttgcaggaaatgtataccacccggtcagggtttaatttcacaagggagcttagaaatttctggtcacttcctgcacgaggcggatccataaatacaacctgggcggtctgtccggaagcagccattgcttccatatattcccctgcatctccttcgcagaagcgtacattggaacttttattttcttttgcattgatcctggcgtcttttactgcatccttattcagttcaactcctgttacccttcctgcttttttcgctgcgatcaggctgatggtgccaatgccgcaataggcatcgatcacactttcttttcctgtcaggtctgcatattccacagctttctcatacaggatctccgtctgctttggatttacctgataaaaagacctgggtgaaatacggaaggtacagccacaaagactatctttaatataaccctttccgtaaagcacaatatcacggtctccaagaaccatgcttgtatttctgtcatttacattcaaaacgattgttgtgatttcaggatgtgcctttttcagtgctttcacaaaattattctttgacggaaaaaccggtgaaacagttacaagaaccaccatgatctctttactggtaaaacctctgcgtaccagtacatgacgtaaaagtccatatccggtatcttcatcatatgtcttgatcttaaaggatttcagcatgccacggatggtacggatgatctcctggcttttctcatcctcgatcaggcactggtcaatagatacaacccgatgggatctgggctcatatataccggaaataatatttcctttccggtcacggtcaaaaactgcatgaactttattccgataaaaatatggattcttcatccctatgatcttctgcacttttccatattttcccagcaattcctgtacctgcttctgttttttggcaagctgcttctcatagggtacgccctggtatctgcatcctccgcatttttttgcatatgcacagcttaatactttttcttcgctcatttttcctccaaaaagcattgcagacttttataaaaactccgcaatgattctaatatttcgatcattatattttctcgatagtattccgcagcttctgcatcttttcatccaaagctgccacttcctccgaatagtccctcagttccttggctgccttttctgcaccagatacgttttttttgtacattaactggtactccagcacagaccagaaatccatggcaacagtacggatctgtatttccactcgttttgtctcagattcttcattgaaataaatagggatatccacgatcaggtgaagactcatatacccgtttttctttggcttttcaatataatccttctctttgataactttgatatcttgctgtttttttaggatctgtgccacttcatatacatcatcaagaaaaagacagacgatccttacaccgatcagatcgttcagcttttttcttgcggtctgcagatctgtatccagtcccttcctcacaagcttggcatatatgctttccggctttttgatccttccggtaatgcttttcataacttctctctgatatttcatggaaagctgttcatcaatgatctttgccttggcttctacaataccgatggcatactgtccctgcaaatagaactgatccttctgcatgtctttgtatattttcctgatttctgctgcttctttttccccgattatattcttatcttctttattccccataaacgatacactccttgatccaatcctacataactgttcagtatcatcacagttactttctactgaatagttacaataatacaataaaatatcctcaatgccaatgataaatgatgaaataatacaggatccttgtgcttattatccatatgtttctgtaaaatcctggtaaaatcataaaaatgccacattccttattactgaagaactcttttcagtattaagaagatatggcatttatacatttcatccggaggtatctttgcaggagttttttacaacatttactggtttatgcagtttgctttttatgatcataaaagcgacggaccatccataccgccagtactgaggcaagcaggcctatcaagaagccggccagtacatctgtaggataatggactcccagatacagccttgaaaaggcgatcatacaggccaggaccagggccgggatcccgtatttctttggcaaaagcctgaaatacacaaaagcacttgcaaatgaagcgcaggtatgccctgatggaaaagaccagtctattggcttggtgacaattgggatcaacgcactgtatgtatcatatggtctgactcttgcaaccatatttttcagacatacattagtgatcagcgctccgatcacaagggcaattgctgctgccgcgcctgctttcctggttttcttcatgatcagcaggacaactgccaaaaggatccagaaccatcctccgtctcccagaaatgtgatgattctccagaagccattcatccattcttttcggatatgctcctggatgtataaaagaatagagatatctgcattttgaattatattcatttttctgaccctttcttttcttagtacgcaaaaagaatatcagaaaacagattacactatttaccccaaaatgtaaagcttgtaaaacagcattgccggatttcaagtcgagcagccgcgagacttggcgcgtgattctggtcagcgtaagctgacatattctttacagaatcactgcgcatcctcgcggagcgtttatctcagtcggagattggactcccactgagacgaacttgctgttactcaccacctgaaagaggtgggagtcttctcgactgagataaaatcatcttttcacgaataaaaccttttaaaacagcatttcacggattgcttcattgatcatctgtttgtgaagggcaccatctttatccttatccgggatttccaaaagcacagcaccaggaatatgctttgccagatattctccatattcgtaaggatggcacagatcattcctgcaggccagaatggtaacaggaacctggatattcttcagcacctccacattaggaataggcgtcttatccggcaggatctgatatttctgccagtatttaacacaggctttatcttcaaaaggagaagtaaacgcattacaggtataagcagacggttcctttacgatctgccacccttcggtggtataaaaccgctcaatgcctccctcctgcagacaggctcccagatcataatacgctttctgaaccttatctgacataggatgatctgtccatgcattccggatcagaagaagcttttcaaccttctggggatatcttacagctagattcagacatactgcagctcccatagagattcctgcaaagtacgccttttttatttccagtctgtccattaaatcacacacatcatcagcaagatgatcaaagtcaaatttctcccagcaggcttcactttcgccgtggccctgctggttcagattgatcagacttaccccttcaagcggctcataggtagactggatctgctttacgcttcctcccatgccatgcaggaatatgaaaggtatcccttcaccgctgatctcatattccaggtgaagaccatgatttatccatttatacattaagaatctcctccaggaactttttgcttaccggtatctgttcttctgaaaggccatgcatgatcagtgcaccttcatatcctgtctttttcagaagatcaatatacagtctgaaatcaagatctccctgtccggcagctacgaactctgtgcttcctttaaaggaaatgtcttttgcatgtgccaaaacaatatcccttccaaggatttcaaaaccttccttcagaaccttttccatgtctgctgcatcaccgtcatggaacaggtttgcaccatccataatgatcttgatccggtcactgccggaagcatccatatattttcttgcgatctcaggagaacagataatattacttgcctctgtttccacaccaaggatcacatcgttatcatctgcatattttaaaatggtctctgtggttctcatcagatcgtcccaagaagactgcttggtattgtcctcatgccatttccatttgctttctttattcttggatccagtgcaaagtgtaacaatgggaatacccagatatctggcgatctgacactgaagcttaaactggtcacagcctttttttcgcgcctcttcgtccggatcgatcatattaaaggtaccggaaagtgcatccagatggatgttatattttgcagtaagtgtacggatctcttccagtttggtttcttccacatgctccggcagggaaggaagacctgcattggaaagattgaactgggtatgtgtaatgccatttgcagtcattcttctgtatgtttcttccagatcaccgatctcataggttctggaaaaaataccgatttctttcatgatcataatcctcccttaacgtcttttaatgcgatccatttgccaccctgctgtacagactgataggttgcgatcaatgcacgcatcaccatcattccatcatctgcagttgcccctgtacatggtgtgccgtttaagatactgtctgcaaagccttccagctctcttctgtaaaactggccgtcatatgctgcaggtgtggaagaaacattggtttctttatcatagcattctacaatagaagaacggaattcccatggattaaaggtcttagcatagactgttccgcctgtaccgtaaatctcacagccttcatgccactgctgtgcaattgcaatggtaagatccaaagtaccaatggctccactggcaaaattacagtcaatcagccaggaatgaaccttttctttatgtacatatcttgcggaaacgcagtcaatatcccccataaaataaagagctgtatcaaacagatggcttccatgtcccaggaggtaataatgatccagcactgcctttggattgcctgccggtttcttcattgcatcactggaatacaaaacaggcatcacgttatctgtaagggtataacggcctacactgtcacaataccagcctttatatgttgtaatctcgcccattttttcttctttaaatttcttggcatactgaaggccttcatcatagcgcttcatatgccccacctgaaggaacagccctctctcctctgccatttcttttaattcctggcattcttcaatggaaactcccatgggcttttccacaaaaacatgctttcctgcaagaatcgcctgttttgcacatggtacgtgaaactgatccccaataccaatgatcactgcatcaatctccggatctgccagcattttgctgtaatcgtcatatacctttttaggggaataaatagcagccattttttcacgaagctctgctgccacatcacaaattgcttccagctgaatgttatgtgctttcgtgcatccgatcagatgggcagcctggcagatgattccacagccaagtacaccaacctttaaacaacgctcgtcttttttcacatttgttttcattgtatcataactcctgtcctgtttattttttactgtccattaaagaggttcggattctttttgacaggttcattgtatgatttttgcatgcgtatttcaagcatatattatgcgtgtttatgcgtgtttcattgtttcactcatatgattttatttaaatatctttttttcatctcttctggaacccttctggaacatacaagatgggtgatcctttccaggggacaaacaatgtaatttgcttctttatccagcttggaattgtcacaaagtacattcagttccctgcagttttctgccagatacttctttaccggagcttcatcttcataaggatagggtacagatacccctcttttagcatctacagcataagctcccagaaaacattgatcaaaatgatagtccttcaactgggaaagcaccagttcccccaccgttgtctgagaacctttattgtagtggcctccaagaaaagtaacatctgcatttggacgtttccgcaattcctctgcaacaggaaagctgttggtcactacccgaagccggatggatacaggaagaagcgatacaaacaaggtattggtagtcccaccgtcaatggcgatcagttcgcccgggtgcaccagctctacagccttccttgccaccagatacttttcatccttttccacatttttcctggcatcaatgcctggtgccggccgtttccagggaatagcccctccgtatacccttttcaggatcccctgctcttccagttcagaaagatcccgtcgtatggtatcatgggaacagccaaataccctggtaagttcctctacatttactttgccggatgcatacaaaatattcaggatctgctgatgtcgttcctcttttagcattgcactttgcgccattttcacagttcctttcctgattggttttctattgcctgccgtttcttaagctgttccataactgtaggaaaacgctgataatcagtatgtggaagagcctgtgctgccaccatcatatttaagaaatcatccacagctgcaaactggatatacaccatttcctctatgatcctatctatatctgccagacatgacctctctagcagaagcttttgtgccccttccagagatgaattgcctgcattaatgatcctgttccgatccatatccggatacataccaattgcaatggcagattcttttgatacatgctttccaaaagctcctgccacatagaaatttgcagcctggtccatggtaatgccggattcccgcagcatgatctccaccatagtatgggctgctgcttttgtacggataaattcctgaatatctttctgataaaagaaaagcccaggtgcatattccactgccagcattccctctttttcctggatcctgctgtttttctctggaacaagatttccccggatatccacccagccgcaaagaaacatctcagccagcagatcaatgatcccggatccacagatcccttccggcttcccttctccgatcacatgacagtagatctgtcctttttcaatatgtaccctgtccactgcacctttggatgcacgcatgcctgtttttacaacaccgccttccaaagccggcccggctgctcctgcaccacataaaagaaactcctggttcccgatcaccagctccccatttgtacctatatcaaaaaagatattgatatctttggacttatatatttctgtagcgatcatcccactgataatatctcctcccagatagttggatttggaaggataacagtacacatagccttttacagggattcccagctcctcaccttttaagaagccaggctggtcagcccgcaaggcatgaggtgtgtaaaatacacaaaacggatccatgcccagcagaaaatgaatcatagttgtatttcctgcaatcaccatggatatgcagtcctgcatctgtacctcactgctttgctcaagttccttcatacattcttttaacgaagcaatggtttcctgccgtatttcttccagtttatccggagcatccttgcaataaaaaatcctggaaaggatgtctgttccaaagcggatttgccggttataacagcttacttctctgatacactctccggttgtacaatctatcagccgcatcaccactgtggtactgccaagatctgctgccagtccatagtgcctgtgactggtatcacctttttccagttctgcgatcacccacccttctccatcccaggataaggagacagtaagcttatattctgcatcctcgcataatgggtatagttttcttaaaatctttaaaggcatgtaggcctctattcccaactgcttcagaccatccagtattcttttttgatctgaccggttttcttcttctgtgggaaggggtaattccagatatattttctttgaaattccatccatatataataattcttcgaaaagagaactatcgttctctcttcctctctttctttcgtttttctgtatcataccacaatccattccatagaaaaagagcctgcaattcttttgtcttcagaaccacaaaccctttttaaccttttatctttctttataactattcagcattttatatccttgcagctgcaggttgctaaatcgttatttttcttctcttttatcaggaaagggatcatccagaaaacgtgcaacatgaaactcccctgtttctgcctggtaaagctgtaataaagccaaaccaatacctgctgcaccgtcaaagcatccgataggagtacttttcttaccaggagcgatcctatcaagggcaaagctccatttcgcctgatctgttccatccacagattcaaaaatgccatgctctgccagctcttccccgcatttttctgcctgtttcagatatttctcatctccaaaggcagcccaaagcccaagatacatattcaggatcccagctgtaccgcagcacagattataagtattccagtagccttctgaccggatccttggagcacctacagcctccagcccttttacaagactttccagtttctctttatatttaagatcaccggtagcttcatacatcttgtaatagtaacgtactgtacctgctggtccgtggcagtaccccaggtagaacagatttttcctgtccggaaacccgtgaggaagcagcttgccgtttccttttttcactgcaacagaatccatgaattctgcaattcctttgttacctttcagatatttaggatcattccctgcttcatacagtttcataagaacaaagccaatgcctgctgtacccattgggaaattggggtcaatataattatcatctgccccaaaataggaaggatctactcccggataccagcatccgctcttatcctctcttctttgttccaacaggttttctcctgccagaagtgcaaattccttccactttggattcttatatacccttgctgcataaataagaaacaggatggtgcctccatctcctacgattccaggaaatgtagaccaggtataacctttcccgtttttgccaggtctggcatcttcctgcattttggaaataatggaagcgaccgtatcagcgtatatcttttttcctgttaccagatacagcctggtaagtgcaaagccagctccgctccaaccgcttgagaaagcatattttgaaaagttacgcttcagctcaggttcgttctcccaacggtatttcagataaaaacctgcctcttttgcttcatcaagatatgtactgtcttttgtcacatcgtaaagtcccagaagaaaacacaggatcccggaagcgcctgcatacatgcagatctcatcataatagataggtcttcctttggctgcatcctcaagagaccagaagatgccttccggtccctttctttttctggtattgataaaattcatagtccttttagcaatttccagatagtccatagttatgatcactcctgtgtaaatttcccggtttccacattataagtggttgtttccggaacaccatcaagcaccgggaatgccttttcttcaaattctttctcatccaggtccttattcagatcaccggtagcctgcagatctgtaaatgcatttttgaaagtatctcttgctgctgttacacctggattgaaatccagtcctttgataatgcctgcatttgtttccacatcaccggatacatatcctccttcaatctggatctttgccgcttcttccggatttgcacttgcaaaggctgcgcctttctgtacagctcttgcaaaggctgctgccccctccggattattcttgatcatatcctgagttacaagagccatgcagcaatattcatctttgaatttctcatctgtaccagtgtcaagaagttttgttacatcataattggcttcaatcatggttcccattggctcatgaacaccaattgcatctacagctccattgtccaaagccattgcaagatcactcattgcataagccacaaaattcacatctgcatcagcaccatttacaacaaatcccagatctgccagttttctttttacttccaatgtactggagtctgatagacttggaacaccgatcttttttcccttcaggtcttccaaggaactgatccctgaatctgcctttgcataaaacttggtgcagcctttgtgtacacctgttacaaaggaaacagcaagaccgttggaaataggagtgataaagttgcaggccaagccaaatgcagcatcgatttttcccgcagtgatcaggtctactgtctcagaggaagcagccactgttacttcacatttctgtccgatggcttccagctcttcctcgaaatatccgttctcagcagctacctgcatagcaacaccacacactgtatctttgcttacctggatacgtaccactttcgtatcatctgcctgacagatcacagttcctgctgcaagcattgctgcaactgtaacagctgctgtgatttttttcagtaatcctttttttctcataatctttttctcctcatgtatataataattttctgtaactatgtgaccatttaatgcttttttgtaaactgctgccttatctttataaatagtaatccggatcctgtaaatttcctgcaaaattaaggatctccagaatttcttttctgtaattcataaacacatcctgtccacgttttcttggtctggacaaatcgatattgatcacctgctctacttttgcaggtcttgctgacattaccactacctgatcggacagataaatggcctcgtccacatcatgggttaccatgatcatggtcatattatgttttttccagagatccatgatcatgtcctgcatattcattcttgtaaaagcatcaagagctcccaaaggttcgtccaggagaagcaccttgggatgccccaccagtgccctggcaagtgctgctctctgacacattcctcctgagagctggtgtggataggattttgcaaaatccttcaagcctaccagttccaggaactgatccacatcttctttcttttctttatattcccctctggctttcaggccaaatgccacattattacgtatattcagccagggaaaaagattggcctgctgaaatgcatagcctctgtctgctcctgccttcgtgatcttctctccatccaggtaaatcccgccccggtcaggaagattcaggcctgcgatggctcttaacagtgtggtttttccacatccggaaggaccgatcaaagatacaaagcttcccggcttcacagtaaagctaagatcgtttaatgccaccacttctgagccgtccggatttataaatttcttctgtacgttatcaatcctgatctggcctaccatttgatcactcctctctgccataccaaaacctgatctttgattttaaatacaagggtgatcaccattgtacagatcactgcgatcaggatcagccctgcataaacatttgcataaagcatcatgcttttttcccagttcagataccagccaagtcctgcgtcagcgcctaacagttcagcggttacaagggtaacaaaagcactgcaggttgcataaaagattccaaggaaaatgcttggcattgctgccggaactgccaccttgaagatcctgttcagtttgccggatccaagggtagaagccacttcaaagtaagaattattaacattctggatcccgctgctggtcatcaatgttattggaaaccatactgccagtgcaaccatgaatacggatgctgaataagtagttgtaaacagtgacaataccaggggagaccaggaggtaggtggaataggccctacaaacttcataaacggtgagatccaatagcttgcttttttattaaagccgatcaggatacctgtaaggaatcccaggatcccacctgccagaaatccgcggagcagaagctgtccggatgccagaatacattggatcaacaattcataatcagtagcaaaaacgccaaacaccctgtccagacaagggaaaaacaataccggaagtaatgcatatttggatgtgatcagatttatcactgtgatcagtactgctgttcctgcaataaggggagccttgtagcttatcctttcatccagctttgcgctgataaatgaagcaataaacaagattccgtaaacaacagccagaagtcccagaaaatacaggaaatatgggtggtctgccggtggctgcaattctgaatccggtattacaagatctgtaactgctcccagagccagacctgcaaacggcagagtttttattaatgttttattcatacgtgttcttccttttcctattacgtaatgattaattctcttatatgatgatcaattctcttatatgataatcaattctcttacgcaatgcttcagtcttctttgtacatatttgtggagaggtatttaaacgcattatctgccaggatcactactatatttttcccttctgcttcaggtctttttgctacttcagtagcggcttttactgcagctgctgcagactgtcctagaaagatcccgtctgtttttacaagctttctgccggttgcataagcatcttctgcgataatatcaagacactcatcataaggcagatgttccggcgaaaagaaaaccggaattttgtctgttggtacgtcatcaaatgccagcacgccgtcaatagtatttgcttccggatgatctaatgattttctggactgttttgctggctgcgcaccaatgatctttacattcggatttttttccttaaaatatcttgaaaggcctgccaaagtaccgcctgtaccaacaagagctaccacatagtctacctttccgtctgtatctgcccaaatctccggtcctgtggttttataatgtgcttcagggttgtcttcatttgttccctggtcgatgtagaaatagccatgttcttttgcataggcattcatcacaacagacagttttcccattgtaaggcctccacttttcagcatttccagaaatccaggtacatctccggcctgaagcagattcactccataggctttcagaatcagggtacgttctatagatactcccggctggatcactacagaatattcatatcctctagcattggcaaaggctgctgtagcgatccctgtattgccgctggtaaaatcaaggatcttaccgcctggcttcaaccttccgtccttttctgcctccaggatcatatttaatgctgctctgtccttaacgcttccggatgggttaaagtattccagctttccaagaagatgggctttcagcccaaggcttttctcataattctttaattctacaagcggtgtatgtccaactaattctgtgattgactgatgtatatttgccatgtttctttcctcttttatgatttctttttttaattctttcttttactgttgatttgttttttgctcttgttttggtttgcttgtttcaagtatgttcttatatttcctagttttttgatatgttttatatgttttatgttgcttattatatcaaacttttccggattgtccaatacattccatttattgtccgttatagtttttttctatttcaataataccaaatgtataataaacgcaaatcagggtatgtacggcttttctcaccatacataccctgatattctttatgtatccttacttacacaattgctgaatcacatttttcatcaaatcttccgccttttaatccgcaaaataatcaatctgcattgcatggcggacatcctgcatagttttggcagctgcttttctcgcttcctcgctgccctttttcaggatctcatatacctccggtatcctctgctcccaggcctttctgcgctctctgatcggtgccagttcagcctgtactacattgttcaggaatttcttcacctttacatctccaagcccgcctctctgataatgggctttcaactcatccaaacagctgtattctggcaaaaattcctggaaatgctccggtctgcagaatgcatccagatagataaatactggatttccctcaaccttacccggatcctgcacccgaaggtgattcggatcagtaaacatagacatgatcttcttcttgatctcttccggctcatctgaaagataaatacagttcccaagagatttactcatcttagcctttccgtcaatacccggaagtctgaggcatgctgcattatccggaaggatgatctccggctctgtcagggtctctccgtatacagtgttaaacttatgcacgatctccttacactgctccagcattggaagctgatcctcgcctaccggaactgcagtagcatgaaatgccgtaatatctgcagtctgacttaccggatatgccagaaaacctgcaggaatgcttgtctcaaaatcacgcattttgatctctgccttaacggtaggattccgctgcagtctggatacagttacaagattcatataataaaaggtaagctctgccagctccggaatggtagactgtataaagatggtggatttctccggatcaagcccgcatgccagataatcaagtgctacctggataatattctgccgtaccttttccggatgctctgcattgtctgtcaacgcctgcgcatctgcgatcataatatatactttatcataatttcctgagttctgaagggcaactctccctctaagtgaacctacataatgtcctacatgaagtctgcctgtaggtctgtctcctgttaaaatgatcttttccatttgtcctgtctccaatcctcttatttgtcttttctcaccaatcatctgcaagtaccatagccgaaaatctttgtcctcagccttattttattcctgtatcaggtatacttctgtgtagtacacacccttgctttccccttctgcatggcttcctacataaatatcaatgcaattctccttgatcgcaccgccgcagtcttctgccacatatacctgcccgtcgatcacaaccttggagccatatgggatctgggtaggatccacagcaatggtacggttggtcactgcagtaacaccggtagatgtgatcccattggaccatggaccacagcagatactgcatggacaataatgtgtgatacgaaaagtgccaagagacttcagggatgcatctgctgatacggaaataggagtgcctacctgtacgccatctgcggcggcaccgctgccattgacagatgtcacaccgtcaacagcctcagcgaaaacaccttctcctgcacttttgtggatgcttcctgcctggatgtctccgtttgaagtagaagtatctgcttttgccgtaaggctttcatcctcataaccttccagcacattggtcggtatatatcctgtgctggatgtgccttcctcattttcaaaaatgatccggctccagatcccatctacaatgccggttctggtgagctgatcctcttccaggacttcacctgtcacttcgccgtcttttcttcccggaaaatcaaggacgtcacagtccctggcaacagtaaccgtgtcattcacatcttccagtgctgtgccctggccaagctgtatatctgaaacaaagccactgatctgttctcctgtatcggatgtgtattctaccttgctccagccattatcacatactgcaacccgttccagttctgtgccaaagacagccgtatcaagcacatctcctgtctctcctggcttggaatgtatctgggcactcttggatgtaatatataaatcctctgcatccgccagcgctgtcacagtgcctcctgccccgtcatccaataaaaagcgctgcagtgctttatcttcctgtttgtatttatcaacaatcccatcataatccagtacctgagctgaaacagggatgggtgctaaaagagctgtacataagccagccagaaatatttttcttttcatggtcagtctcctctctgtcaagaaacccataagcttgtcttctgtccctactctgccttatcatagcacagaacagtgtctcattcaattttctgacccatgttcacagaatttttataaaatcagctgctttctccatcattttccagaacctgaatggccctctgaagctgattatcctcttcatggctgtaatcacttttgttcaaaagattggaatccagcttctcttctacatccggggtgatccctgtcttatggatattattgccttttggagtataatatttggaaactgtaagcttcactgcacttccatccgaaagagtacgtatggactgtacgatcccctttccataggtagtagtgcccacaattgttccgatcccgtaatccttaactgcccctgcaaaaatctcggacgcactggcgctgttttcattaaccagcactgccagggggatatcaagggcatttttcccgtcacaggtttcttcttccctgtttccgtttttatcctcagtataaacgatcaggccttccggaaggatctgccttaagatatcacagacagaatccagcagtccccctggattatcccgaagatctacgatcatcttctccataccctgatccttcagatcctgaaatgcgattgtatattgttcctcagtaacccctttaaattctgtgatccggatatatccgatcttagaatccagcatctcatgaaaaacagatggcagttccacatctgtaataggaactgtaatggtaagaggctcatctgcattttctctgtgcactgtaaggataacattcttggcatcgctgtcccggatcatggatgccacttcagaaacagagctttctgtaatatcctgtccgtcaatagcactgaccacatccccttccttaagacctgctgcttcgcctggtcctccctcatagcactgaacgatctgcacgcctccttctttattctcctgcatcacaacgccgatccctacataggatccctgagaactggtattttcctcctgatattcctttgctgtatagtatctggaataaggatccccaaggccatagatcaatcctgcatacagcccttctgccagttcgtcttcatccttatcctcaagataataagtatcgatcagttcttccaagtactccagcttctggaccctggcactatcagaaagcactgtcccatctactggtacctgtgcatatttgtatcctgcatatcctcctgctgccactgcaactgtaaaagctgtaccaaaggctgcacctttccagaaattattatctgccatcattcctcctgcaaaagagggattgacgcatctgcatcaatcccacattctaataccttatactttcaaatgctttctggttgtccagaagcttcccaaaagaccgatcccgatccccagtgccagaccgataggcagaagtgtcatgtagatcctgcctactggtatgaactcaaccacacccataagtacattaaacctggtcagtacataagtaactgcactattataagcaaaatacaggatcacaaggggaatagccgctccgatcactccaagcaccataccttccagaaggaacggtgcacgtacaaaagcatctgtggctccgatatatttcatgatcccgatctcatccttacgcacagttatacctacggacactgtattgctgatcaaaaatacagagatcagaagaaggatcacaatgatcacaatggaaataccggataccagcttgttaatagaaccaagcgtcttggctgcctgctcagactgactgacctctcttacgtgatccaaagtctggatatacgctacgatcactgcctgtttggaaatgtccttcagatatacctggtagttggaggaattcaccagcggattgtcatccttaaatccgtcagctacatctgtatctccaaaatattctttcttcatcttttcccaggcatcatctgcagactcatactggatctgtgctacttcaggacgttcctggatcaacgcaccgatctgctggatctgctcatccgtagtcccttcatcaaaaaatactgtgataggaacctcctcttccaccttatgtgcaatattattcacattattcacaatagaataaaaaacgccaaacaatagtatacaggcggacatggtaagaactgatgcaatggaaaacatcatatttcttttaatattttttacaccctgcttcagggtataccagatcgtactaggcctcatgatattctccctctttctcgtcactgatgatcacgccattatgcatggtaactacccttttcttcatggcattgacgatctctttgttgtgggtaactaccagtacggttgtgcctctctcattgatctcttccagaagcttcatgatctcctcagaggtcttagggtcaagattaccggttggctcatctgccaggagaatatccggacggtttacgatcgctcttgcaagagccactctctgctgctctccgccggacagttcgtctggaaatgccttatatttccctgcaagccctacctcctgcaaaacctccggcactcttttacggatcactctggtaggacggttgatcacacgctgtgcaaaagcaacattctcataaacatccctgtcctttaaaagacggaaatcctggaacacaactcccagcttcctgcggtatttggctactctgcggtgcttcatcccttccagacgttctccgcttacaatgatctcacctgaagtagaatccagttccttcagtaaaagcttgatcagtgtggacttcccggagccgctgctccctaccacaaatacaaattctcctttatcaacatgcaggttggcatgattcacagccggaagaccctgcccataagacttggttacatccattaaatcgatcataatggtctcctttgttatgcgtaacttttatgtaacattattgtaatatatcttttattaaattgcaactgctattttccggtaatttattatacatgcacccttttccaaaagcaaggcatttcacagcttctacataaagaatcctcctggacccgttgctcgcataaaagaaaattgtctaccgctgaaaaaacggtagacaattggtatttccttctgaaaattactgaaagccacataaatgccggcattagtactccagcgtttccatgtatttcatatatcttacaaccataagagcaatcttaaaggtaatggcatcttcaaatacacgaagatccagtcctgtactcttctgcagcttatccagtcggtatacaagagtattcctgtggatataaagctgtctggaggtttctgacacattcaggctgttctcaaagaatttatcaatggtagtcagtgtctcttcatcaaaatcatccggtgacttaccgccaaagatctccttaatgaacatcttgcacagtggaatcgggagctgatagatcagacgtccgatacccagagagctgtatgcgataacatccttctccgggaagaaaatcttacctacatccaaagccatacgtgcttccttgtaggatcgtgacacttccttaagctccttcacaatggtaccgtatgcaacatgtactccgtcttctctggaaagtccaagtgtgtccaggatcgtctgggccagcttatccatggtctcatagccttcgccctcttccagttcctttacaatgatcacactcttctcatctacggccgtgataaaatctttgctcttaccaccaaaaatactcttaatgctctctacagaactatgctctctctcctgtggaagttcgatcagcataaccacacggcgcacatcagcatcgatgtgaagcttcttggcacgattgtaaatatctacaagaagaagattatcaagaagaagattcttgataaaactgtctttgtcaaaacgctccttataagctacgatcagactctgaagctgaaatgctgccagcttcccgaccatatacgtatcctcgtcctctccatgagctacaaggatatactccagctgatagtcatcattcactttgaaatactgataacctctcacaagctgactctctgccggcgaatcaacaaatgcctgaacatcccctgcctggatctcgaaatcagtacatgtggatgcaagtgtcttgccatctgtatccatcacacaaaactgtgtcctggatatctctttaagtccctcgagggtattctgtaatacctggcttgatatcattctattcaatcccttctcatgtaaaagtgttttaagttattttaatacaaaataaccaaaaaagaaagaggaaatcagaaaaaatttacaaatttttattcaaaacttctcactttttctctataaaaccttccccatgcacttcccgtacatcacatacgatcacaaaagcatctgggtctatcatatccactttttcttttaatgtaacgatttcctttttattgactacgcaaaacagcatcagcttgtcctgtccggaatacattcctactcctttcaggccggtaacaccgcgatccatttcattgatgatcatatgggaaacctgatccgctttctctgtgataatataagctccctttgaaaatttcaaaccttcgatcatgccatccgtcacttttgtaacaagataaactgcaataatagcataaagagccttgtgtataccaaaaacatacataccgatcacaaccaccaggccatcaataaactgcatgatctgggcaatggaataatgccgcattttccgctggatcagggcagccatcatatctgtaccgccggtagtcccctgtccaaggaaaaccagtccaatgcctactccctgaatcacaccaccatataccgcagcaagcagaagatcatttcccgccaggttaaaatcaggaatacagcctggcagcaccgccaaccagaaagaaagacacaactctcctaccagtgctttttttacaaactgaaagcctccgatcctcattcctaaaaagaacagcggaatgtttaatgccatgttagtgatccataagggaattccgccaggaacaaggctttctgtccactctttgacaatgatggctactcctgaaaaaccacctgtaaccattcctgccttatcaaacgcagatattacagcaactgccatcaggcaggtacctacaatgatcagcagataatccatatatttgagtttttttccccaaggactcatcttcattcctccaattccaattgttttgtgagatagcggcctacaattctggaaaaatcagtaatatcccggatatatgcaaaatccttaccgaagattttcttttctgtagccagatctttttcctcacctgcaaatactcccagtacgctcacccctgcgtttctcagcctgcggatttccccggcagtatcattcactgcatattgtcccatatacggcttaggattctttgcatttggacggtttacaattacatcataaggtcgtccatcgcttaaaatgatcataatctttttttcttccctacggcccaaaagcccataaccggctgctttaatggccaatccatccctgttgttggaagatgttacataattgaatatattttcacttgcactgtcagggtcatcatactcccgtagcctgtgtaaaatcgtatagtcccagaatgtacaatagctcatcacacggtgagggatcttcacatttcccagtgctttactgatcatatatgcctgtaatgccacatggccctgccgattcatctgggaaccactggcatcgatcagtacatctacaacaaaatccgtttgatccccctgctgctcttttttgaaaagaagtgcatccctgcttctgccgatcctccataatctggcaggcaggatctgtcccctgtcagacaggatctcctggttttcacttcgcaaaatcaaggatttacgcagcatttctgtaagctgggcaacattcctctttacaactctgtgtttatcatgatacagccacacatttttgtttttcaggcgtactgcatattcgtactgataattccgcataaccggatttttcaggatcccttctgtaaaatacagactgcagtctccgtggatccctttgcacatcaactggtttattttcttttcttcattttctttcagataagttttcccaaaattaagttccacatacctgtgggccttttccaatgcttcaggaggaaggattttgatcttatgcctggtctgtctttgctcttccatttcctcggtaacctgggaatcctccattccggctatctgatcagccagctgctgtgcatagtcttccaggctttcctcataaagttcttcatcaagaaggtctttccagtcaaactctgacagttcctccattgtgacagccatcacctgttcaaaactgcccttttctttttcaaagtcaggctcacatgccttattgtataaccggtcaatagcaaatgccaatgcttctgtatcttgggaattgcctgcttccttcaccagatccatgtactttttcatggaggaaagcactggtgcttcttttttgtgctccaacctgtccagcctttttctcagaaccataagcctgagcatttccgggatatttccagtacccgggatcaccagatactcctgatcaaggatatccaggatagcctctctttgcatatttcgaatacctggacgttccaggcagattctgtctccaatggcttcctctatacaaagctgtgccattttcgtaagaagctgttcatctgccccaaaatacagcttcttcagcagataaagccccagatattttttatcataaaattttgcaagtgctccctgcttgatcccatcataaagggccagcggtctggaacgcctgtataaagaaatatccggcttcatttcctgggcatagtcaccactgactgtccataaaagatttcggatacggttttccatttccagctggatctcagaaccctccccttcagaaaagcctgagatctcatttgtatgttcaatccttgacggatgcttattcataaacatcttcctttgtccagtccctggggatcctggtatttacaacatcctctacgatctctttttcaaaaatgtcaaatgttttatttacgattcccatctgcacagcctgccatggagaaagtccggtttttatgatcttcactgctcccaaaaggcctcgtaaatccagtgacttggtagaaatctcactattggcagttttcagctgaagatcaagaaaaagaccgataaactggtctacagctgccttctttgcatccgggaacatttccctgaaaataaatcccagggtttcctcattctggggaggcatatcgatcaccataaatctggaaaccagggcttcatttaattctctggtacctgcatatccgtaattcatggttccaataaatctggctgccggatgaagatcaatcttatcgtaccctggcacatcaatggatcttcggtaatccagagtagcatgcaacacggaaacagcatcatttttcgccatattgatctcatccaggataccaaagcccccatgctgggcacaccggtaaatactgcccttccgaagttttacctgattgtcctcaaaagtatctgtaccgatcagatctccactgttggtattcacatgaaaagatacattgtagatcggtctgccgaaaatataggcaagattctctgccagtatatttttaccagtggccttaggccctgtgagaagaagattttccccttggagaagggccgccatggccatttccagggtttcttttccatagaaatggattgcaggatgctgcacacgcccaacagcatctgcagcaaccgtgtattcttttcggaattccaaaatctctttgatcaggtcttcagaaacagcctgttctcttaaaaaatcaaattcattcatataagtatccaaccttttgctcccggatcagacttcaaaaataaggtctccataagaaggcattggccacatctctttatctacgatcatttccaattcatcaaccggcttccgtaattcgtccatcgcaggtacgatcttttccctgaagaaaacagcccgttcccgtccttccgggtaagactctacctgtgcaaccagcttgcctaacttattcatggcactgttggttgtttttaaaagcttactggtctttttcagaagatctgactgcacgcttacgtctgtgatccctgctgcttttacagaattaatggaatcagcaagaaccgtcgtatacctgatcactgccggaataatctgtttggtaacaatatcgatcatggtcttggcctcgatattaatcgctttagcataaatctcatactggatctctgcacgggattccagctctgttctggtaaatacccggaaattttcaaacagctttatggatttctctgtagtcagtgcaggaatagcatctaccatggacggaaggataggaaggcctcttcgttttgcttctgcttcccattccggtgcatagccattgccgctaaatacgatcctctggtgatcagtagcgtattctttgatcaaatcatgcactgcaagttctaaatcttctgcagattccagtctatcacatgcctctttaaaagcctcagctgcaatagtattcaatacaacattgcaggaggaaatcgaatctctggaaccaaccatacgaaactcaaacttattacctgtaaatgcaaaaggtgaagtacggttcctgtctgttgcatccttcatgaagtccggaagtgtacttacaccggtattcatcttttccccgctcttactgtgggtagcagttcctgtactgatcagctgatccagcacatcctcaagctgttctccaaggaaaacagaaatcactgccggcggagcctcatggccgccaagtctctggtcattccctacatctgctgctgactcccgaagaagatctgcatgctcatccactgctttcagaatacaggtaagtacaagaaggaactgaacattctcatgaggagttttgcctggatccagcagattgatcccgtcatccgtagtcaaagaccagttattatgctttccggaaccattcacgcctgcaaatggtttctcatggagaagacagcgcatcccctgacggcttgccactttcttcaagatacgcatcatgatctgattatgatctgccgcaatatttacaggtgcataaataggtgcaagctcatgctgtgcaggagcaacttcattatgctgtgtcttagcagaaacgcccagcttccagcattcttcatttacttctttcatataggcagatactctctggcgaatggttcccagataatggtcatccatctcctggcctttcggaggcatggcaccaaataaagtcctgcctgtataaacaagatcctttctctgtttaaacttttctttatcgatcagaaaatactcctgctctgcacctacagagggagtcaccttcttagatgtatgattaccgaaaagacggatcagacgcagtgcctgtgtattcactgcctccatggaacgaagaagaggagtcttctggtcaagtgcctctcctgtgtaggagcagaaagcggtagggatacataaggtcccgcctgctgcatcatggcgtacaaaagccggtgaggtacagtcccatgtagtgtagcctcttgcttcaaaggtagctctaagacctccggatggaaaagaagaggcatctggttctcctttgatcagttctttaccggaaaagctcatcagcaccttaccattctccataggtgctgtaataaatgcatcatgcttctctgcggttacacctgtcagtggctggaaccagtggctgtaatgggttgcccctttctcgatagcccactccttcatctcatgtgctaccacatcagccacttccatagacagctctttgccttcttctatggtctttttcagttccttatatacctttttgggcagtctctcctgcataacggaatcattaaatacatcacatccaaaaatatccgtcactttcacaaaatcttccattaataatctcctctccactaatcacacatttctgtctatgggtatttcacagttgtccgtaactgttcagtacccttttctcagatcctcaagaattcttggaacctgtcagatataggttcaatgctctgtgcagattccggatctcaacctccttgtgatctccgccgtattccccgtccagcgtccatgccacagcctcatctgactgaatccggatcctgcttgtcttaaaggtatagatcaggtctgaattatccttaccggacatcagtcctgcaatgatctcctgcatatccatcggattcttaggcgtggtgatcaaggtcacctcaaacaggccgtcattcatatccacatttttgccggtcagattcttaaatcctccaacagatctggaattggtgatcatcccatacataaaatcatcttcaaagatttcatcctctgttgttactttcatatggtaagactgaatatcaaacagacgtttgaccccctccagcagatatgccagatgtcccagtatattcttcagatcctggtcagtctcataggccacatccgtaaaaagtccaaatgcggcaatataagtaaatgtctgtttattaaacttcccgatatcacagcggtacacattctcttccatgatcatctctgctgcagctaccatatttttgggaataaacaggcttcctgcaaaatcattggtgcttcctgctggaatatatcctaccggaaccttgcttcctgtctcaaccagtcctgcaaccacctcatccagtgtgccatcgccgccgctgcataccacaagatccaccttgtctgcatacttcctggtcatttcatatgcatctttgggatattgtgtggcacggatgaccacttcataaccacccttgttaaaaatatccacaatatccattaaagcggttttgatcttgccttttccagcttttggattaaatacaaaaaaaagtttcttctccaagttcaggccctctttttacatattttctacatattcatgttataatataaaaaaaagagggaaaaaagtcaatctttttgccctcttttttgctttgcaggatctgctatacgttacgtacagcatccttcatagatttcacatactcctttacgtaaggcacgcaatcctttccatacctggcacacagcttgacgatggcagaacctacgatcgccccgtcggactgttctgccattttagctgcctgctgcggtgtactgattccaaagcctaccgcacagggaatctgtttttctgcttttaccagatgcaccattgccccgatatctgtggtaatctggcttctagtaccggttactccaagagaagacacacagtatacaaaaccttccgcctcttttgcgatcattgcaatcctttcgtgggaagtaggtgcgatcagggagatcaaatctattccatatgctttgcacacgctgtcaaattcttccttttcttcaaatggtacatccggaaggatcagtccgtccattccgacttcagacgcttttttgataaatctttcagttccataggaaaaaaccacatttgcataagtcataaacaccatagggatcctggttttcttacgtatccgaaccaccatatcaaaaaccttgtctgttgttacgcctccgcctaatgctcttacattggcagcctggatcacaggcccttctgctgttggatcggaaaatgggatcccaagctcgatcaaatctgcccctgcctcttccattgcatatacgatctgctctgttacctcaagggatggatccccgcaggtaacaaagggaataaatgcttttcctttaccaaatgctgcttctatattcttattcatggatatcctcccctctgtatctggcaattgctgcacaatccttatctccacgtcctgaaatcgtgatcactacacactggtcttttctcatgtccggtacgatctttcttgcataggccactgcatgggcactttcaatggcggggatgatgccctcgatcctggaaagatattcaaaagcatccactgcttcatcatctgttacaggtacatactgtgctcttcctgtatcatacaggtgggcatgctcaggcccgatccccggataatccagtccagcggaaatggaatacaccggagcgatctgtccatatttatcctggcagaaatatgacttcattccatggaagatccccagttttcctgttgcaatggtagctgcagtctctgcagtatggatgccccggcctgctgcctcgcagccgatcagctgtacttccttatcttcaataaaatggtaaaaggtaccaattgcattggagccgccgcctacgcaggcaagcacagcatccggaagctttccttccttttccagcatctgctccttaatttctttggagatcacagcctggaaatcacgtacaatggtagggaaaggatggggtcccattacagagccaagtacataatgggtatctgcgatccggttcgtccactctctcatggtttcagaaactgcatcctttaaggttgctgtaccggaagttacaggatgtacctttgctcccagaagcttcattttgtatacatttaatgcctgtcttttggtatcttcctcccccatgaagacttcacattccatccccatcaaggcggctgcagtagctgtggccaccccatgctgccctgcacctgtttctgcgatcacgcgggtttttcccattttctttgcaagaagcacctgccccagcacattgttgatcttgtgggctcctgtatggttcagatcctctcttttcagataaacctttgcaccacccagatcttctgtcatatgtgctgcataataaagtctggatggacgacctgcatattcattaaaaagctctgttaattccctgttaaattccgggtcattcttgtaatgctcataggcctcttccagctccagcactgcattcatcagtgtttccggaatgtactggcctccatgtattccaaatctgcctttagacatatttcttatcctcctgcttgtatttcaaatgtttttgccattttatagctttctcaccagttctactgcctgtctgatcttttcaggatctttttttccatttgtttccatactgctgctaagatccacagcccaggggcttaagtaatgcacagctttttccaggttatccactccaagtcctcctgcaagaaaataaggtctggaaatcccccctgccagcatccagtcaaaggttttcccagtgcctccgccgccctgatccagaaggatataatctgcgctgcttgcttttgccttggcaatatcttcttctgttttgacggaaaaagctttgatcaccttttttcctgtttcatcctgcagctgccggatataggcttcctcttcctgcccgtgcagctgtgccatctggatcaccttctgatctaaaaggtcagccaccagcacaaatggtgcatttacaaacactccaaccccgcagatagatggatccagctgactaatcagcttctttaactcatcagaagtaatcgatcttctgcttttagggtattccacaatgaatccggcaaaatcaggcttgcagctgtttactgcctgtatatcttccatagttcttaaaccacaaatctttacttttggcataaggggcctccgtttaagtcttccagtgcctttcttttatctgggctgcgcatcagcgtttcgccgatcaatacagcctgaatatcattttcccgaagcctgtgaatatcttcggaggtacggatcccgctttctgatacaaaaacagcatcaacaggtgcgattttccgaagccggatactgttccctgtatccacctgaaaggttttcagatccctgttatttactccaatgatcttagccccgcaatccaaagcacgcagaacttctttttcatcgtgagcttccaccaaagcatccatatgaagctcctttgtcagctgataaaagttacgcagcttaacatcatcaagaagagaacagatcaaaagcactgcactggctcccagtgcctttgcctgatagatcatatattcatccactgtaaaatccttgcgaagtaccggtatgtttatttcttctgcgattttttcaaggtaaccgttttgtcccataaaatagaaaggctctgtaaggcaggaaacagcacttgcccctgctgcctcatattcctttgcaatatcaagccagggaaactctggagcgatcagccctttagatggagaagcttttttcacttcacagatataagacattccctgtactttaagtgcctgtaaaaagccaggtttttctttattttctgttgtatgctctgccctattacgcatctcttccagagaacactgtttcttttcttcccggatccgctcctttgttttttcaccgatttcctctaaaatattcataattcccaatctcttttcaatggttagtttcgtatataaattcttccagcttctttacagcagcgccgctgtcgatcaggctttcggccatccttacaccttcttctatggttttggcctttccggtaatgtacagggatgcacctgcatttaagcatactgcctgacgcttgggccctttttccctgccctccagaatatctctggtgatctgtgcattttcctcaggagtcccccctgccagttcttcctttgcacagctgttatacccgaactgctccggccggatctgataagactggaaccatccattacggatctcgcagacagttgtaggcgcactcatggaaatctcgtccagcttatcctgtccgtataccaccataccttttacaacacccagcttagccataacctgtgccaaaggttcaaccaatatttcatcataaacacccatcagttccatatttgcacctgcaggattgcttaaaggaccaagaatattaaatactgtgcggattcccaattcctttcggatcggtgccacatacttcattgcaaaatgataattctgtgcaaacaggaagcagatattgatctttttcaggatccttgcactttcttccggtgaaactgtgatctttacacctaatgcttccagcacatccgccgcaccggatttggaagaagctgcccggtttccgtgttttgccactggcacaccgcctgctgcgatcaccagggctgaggtagtggaaatattaaaggagttggcaccgtctccgccagttcctacgatctccagtacatccatatcatggagaagctttacacaatgagcacgcatgcctgctgccgatgcagtgatctcgtcaatggtctctcctttcaaagacagggctgtaagatatgctgacatctgtacaggtgttgcctctccgctcatgatctcattcattaccgtttctgcttccttataagtaagatcctctttttttgataatttgataatcgcttctttgatcatggttcatcctcctcatttttttgtctgatgctgtccagaaaatcttgtttttatctgatgctgtccaaaaagttttcaatcatctttttcccatccggtgtcatcacagattccggatgaaactgcaccccaaacacagggtattttgtatgctccacagccattacttccccatcttcagacttggcagtaacccttaattcttctggaagggtttcttcttttgctgccagggagtggtatctggctgccttaaatacttcaggaagtcctgcgaacaaacggttctcacaggtctggataatctctttttgtttcccatgcatcaattcttttgcataggttacagttcctccaaaggcctgacaaatggcctgatgccccagacaaacacccagaatcgggatttttcttccacaagtacggatcacctccacacatactcctgcatcctccggtcttccgggcccgggggaaagaacaatggcctctggcttcattttcatgatttcatctactgtgtattcatcatttctgatcaccttaatatcactgtttgcagagccgatcagctggtataaattataagaaaagctgtcataattatcgatcaacaggatcattggattccctcctctgcctgggcaagtgcacgaaccaccgcttttgccttatttttacattccataaattccttttcaggtacactgtctgccacgattcctgcaccggatcggatacagatctcgccattctttttatacacaagacggatggcaatacatacatccagatttcctgtaaagtccatatatccgatggcacccccataaataccacgtttacttttttccagttcatcaatgatctgacaggcgcgaaatttaggtgcgccggaaagagttcctgctggaagaatggcatccactgcattcactgcatctttgtcatcccggatctgcccgatcacagtagaccccagatgcatcacacaggaataccgctctacatccaagtatttttccacctgtacagttccgatcttactaatctttccgatatcgtttcttcccagatccaccagcatattatgctcagccagttctttttcatctttcagaagttctgcctccaatgccatatcttcttccctgtccttccctcttggcctggttccggctaacgggaaagtactaagcttgccttgatccagtttcaccagagtttccggagatgcacctgcgatctctatgtcgtcgctggaaaaatagaacatataaggagatggattggttgcccgcagcacgcgataagtatcaaacagacttccttctgcctttgccctcataggattggacagcaccacctggaaaatatctccttctttaatatactgctttgctctttctacaatctgacaatattctttttccggaagttcaggctggatttctgacagcaaatgaataggaggaaattccattttatcttcctttttgatcagatctgccatgtcctgcagcttcttttgggcttcctggtaagaaatatctatattttccgtttttacccctgtgataagaagcagcttttgtctgtaatggtcaaaggcgatcacctggtcaaaaagcatcaggtccatatccctgaaatcctgctgtcctttagatcccagcttcagcttcggctcactgtatcggatatagtcataggaaaaatatccaaccagaccgccggtaaatgtaggaagaccttctactttaggacttttgtactgatccagtacctgccgcagggtttctccaggatgagttacatgacagatcttctcttcctgatttccgttttctccggtatgccggatcttcatttcaccctcacagcaggtaatttccatcaccgggtcatatccaagaaatgaatatctgccccatgcttcactttggcttgcactttccaacagatagcagtgatggcttgcttttttcaacatgcgcatcacttccacaggtgtatacttatcggaaaataattcccagcataccggaatccttttgtagtctccctgtgatgccagttgttttacagtttctaatgatggatacataggaacacctcctgatcagtttttgattatgtgaatatcatctgacagctctgtctgaaagtatgttttcagatatttatataaataaaaaacgcccttgacagaatctgcttctgtcaaggacgagtatcattcacccgcggtgccaccttgatttacggacggaccgtacactttgaggaatactatcatattcctggcaactgacgtatgccttcacgtcacagaatacttggccattaataaatgcctttccctgtgccctctgcggtccatttaacagcctgcattccacccggctctcaccttcccggactctctgtgcgcgctgagctgtttttatctccgcttcaacggtttatcttgttaaattgttttttataaattaccatgattttttttcattgtcaagcattttgtttcatttttcatttaatttttacaacggctttcacaagatctgtcttgttatgtacagcttcatcataagcatcctgaatgtgctccagatcaaactcatgagtaacaatactcttaacattgatagcaccgctggatacagctgcaattgctttcggataaatattcttataacggaatacggacttgatagtaatttccttatccataatctgtgcaaaattaaagctgatctcttcctgtgcggaaatacctaccaacgtaatagtgccacctcttcttacaataaacggagtctgtgctatggttactggtgaaccagcagtctcaaataccacatcagcaccacggccatttgtaagctcacggatctttgccagtgcatcctccttgccactgtttataactgcagtggcaccaagctccatagccttatccagacgtgcctgcaccagatctgcaacgatgatcttaccggcaccgtgtgccttacatgcaagcagtgttacaagtccgatacatcctgatcccaggatcactacagtgtctcctgtacctactgccccctgctctgccgcataaaatcctacagataatggctcgatcaatgcgccttcctttgtagaaacgttatcaggaagcttgaagcacatatcctcaggaaatgccatatattcttcattacatccctgtactggtggcgttgcaagaaaaaccacatccggacatagattataatggccagatttacagaattcacattttccgcaggtgatacccggttcaagtgccaccttgtctcctactttcaggctggtaacatccttaccgatttttgcaatggttcctgcacattcatgtccaagcatgtaatcctgggaaagatctaccttgtaagcaccacagcagccattatggtaataatgtacatcagatccacagattcccacatactctagcgatacaagaacttctttatctccgatctccggtactggaatctcttttacaatcatcttgtctgtgcctctcataaaagcacctttctgcatcatttttacatgactcatatgtaaaacccccttttgctttttaataaaagtatagtattggcttacacttatgtcaatagttttatataagttttttctgtttataagattattttcgtattctatcttaat

SEQ ID NO: 56 - DNA, 83702 bp, Unknown
  gut microbiota DNA sequence
ttcactgcctgtacataatcagcgtcttcctcaaacagccatcccgggaaaaatctttccccctggatcgtctcgcctgtataacatttttccttaccgtaggcataggaaacctttgctttcagttccggatcttctttcattttttcatccagcagcttctgaataggctccagcacagattccttggtttctcctaccagaagtcttctgtcataggtggccctacagtattcaggtacaactgatgctccaggatatgggctggacttcacatctgtaagctccaggattccttttcccagaaccggatgctctgtaggcgtaagcttcctgatttccccgatcagttctgccatcttatatactgcgttgatccctttttcaggatttgcactgtgtgcaggttttccaaaggtttccagtacgatctctgcacgtcctctctggccgattttcagattcaggtctgaagcttccccgatcaccacataatccggtttcacatattcgctgatgcttctggcagctaccccttcaaagcattcctcgtggacaactccatccacataaatctctcctgcaaaatctctgtcaaaatcctttgcaaaatgacaggcagccactgtataagctgccacagcccctttcatatctgtggttcctcgtccgtacagctttccatcacatgtctcgggagcaaaaggggcatgggtccattcactttcatttcctaccggaaccgtatcaatatgtccgtcaaataacagcttctttccaggacgttttccttttatctttccaatgatatttccgtatttatcaatataaacctgatcaaatccatttgcttccatgtaagcttttaattcctctgccacaccattttcttctccggaatagctcctcctggaaacaattttcttacaaagctctacaacttcctctttccatccatctgctatcatcatttaatcgctcccttctttttcaggttctttacctgaaagctcttttgctgcccgtaataccgcccggatgatagccgtatatccggtacacctgcaaagattgcctgacaggccgtccctcacttcatcctgggtgggctttggattttcttttagcaaaacatatgtacttaaaaccatgccaggtgtacagaatccacactgtacagctccttcttccacataggccttcttgatcacatctgccatcctgtctcctgacaggccttctatagtagtcaccttccttccttctgcctgtgcattcagagtcacacagctgttcactgtcctgccatccatgatcactgtacaggctccacattccccgatcccacagccttctttggttcccttgtatccaagaatgtggcgaatggtatccagaagtcttcctgcaggatcagtttctatacacactgcctgctcattcaatataaattgtatcacttttttcattctgcatcagtccttatcccattttattccacaaaagctgttccaaaagcaagttcacttaaagttcttgtccccagccgttcacagacagctgctttgtattctatattgtcatccactttccgcacctgactgcggattttctccccaagctgcgccatacaagcatggaataattcactatccggtttatggcccttgagagattctgtcacttccttctgcagtctgatatcagccagcgcagcccctatggaaagccgaacatcttcgatcttttgatcctttgaaagcttcatcgccactgccaaagtgaatctggacatacatccgcttttctttcggcctaccttctgaaatgaataccggtaatctgttgacataacaggaattactacctgggtgatgatttcatccggctccagcgtattctttttccctgcaggtatcccataaaaacatccgcctacactcatttcctcatgtctcaaacatggtgggcaggatttcagcaattcttctaccggaatttctctggtgcctgacggtcccatgatccgtatcgctgcttctaatacacaaagcgccggaatcgtatctgcagccaggcagctattcgccagattacctcctatggtagcctgattccgtatctgcggccctgcaatattttcacaagcctgatacaggagccctgcttcttttcggatccattcagaatgaagcagttcacagatggtcgtcattgctcccaccataatttttccatgttcttttcggattccctgtaattcctgaatgcggctgatgtccaccaaatatttgctttcataccagtcctttgaccttgcttttactgccaggtcagttgccccggcaacgatcacagcatctttcccatatttctccagctgctccaatgcttctttcaaagaagaaacggtaatgtaatcctgatacttcatcttccatccccctttgctcctccacatgagaacaaaaccttttccaggctggcaggggagctttttacttttcccagttctcccagtgcatggtttactgcatttgtaaaagctccaagccctggatccagagtcggctctcccagtgatctggctccaaaaggtccgcggtcattgggattttctactgttacaggcaaaaccctgcccacatctttgattccgggtatcatatactggtcaaaattctcattctttgcatatccttttactgaattgatatcttccatcaacgcataaccctgagccatgactgcaccgcctacgatctgtcctgctgccagcttaggattcatgatccggccagcatcatgggcagacaccacattcagcactgttgtttctcctgtacaggtatcaatctccacttctgctccgatgcaggaataagtatattcataaaaggtgtcaccaaatcctgtcttttcatcgaacacaggatccggggttttataatttcctgtaaaggcaggtgtccggcctgttgaaaaagtaatcccggcagcctctttaaaagataatttttttccatccacatccaccatgtccaacaggaaacggattttcctacggtcacactgaaaggtttctgataatgcgtccctcatacattcatgtatctttttcgctgcatccaaaatggcattaccgccaacaaaggttcctctggaagcattacagattccggtagccggagcatctgtggtgctttcgcttaccgttacctggtcatcactgaccatcagtgcttctgctgcaatctgccccatcactgtatgaagcccctggccgatttccgttaaaccgatattcaatcttacacttccgtccatctgcacttccagataacaccgtccaacatcagggacaccagttccgtagctgtttccgcggtaggaaagggaaagtcctactccccttctttttgtttttcccggattttcctttttatactgccaatattttttctcgtaatccagcttctgtgctacctgatccagcacttcttctgcaccgatatcctcaaaatcaatgatctgtccggacccagtggcatctcctctatgcattacatttctttttctcagcaaataaggggacattcccagcttttctgccagttcatctaaagcacattcccttgcaaaaatcccctggggatttccaaagccgcgcatagagcctgatgggatattatttgtataaattgcctttgccccacaataaacattgggaactacataaggacctgcccctaaggatacagctttaaaagccactcccggagacatgtttgcataggctccggaatcggtcattgcaagtgcttcaaacccttgcagctttccttcctgatccgcagatacatgaacatcgaatttaaagggatggcgtttgtggctctgctgcatagattcttcccgggtcagcagatatttcaccggcttatggcatttcagagcacaggcagctgcacggacagccatcacctccggactttccagcttgccgccaaaagaaccgccaacagaggtagccacgatccggatatcagccaacgggatctgaagacttttatgtatagacatccttggattgtaaatagactgcatggaaccaatcaccgtaacctcccggtcccttcttcccggatatgccactacgcattccggttctatatatgcatgttcctgccaggttgtctcataatgagtctgcacagatacattttccggtccaaaggcattatcaatgtttccttttttgataaaacactgggaacacaggttatcatttctatatggatttaccaccatatccgaacgataggcctcttccaggtccgtcagttcatgaagcttttcatattctatttttaccagttgtcctgcctgttttgcatgttccatggtatcagccaccacgacggccagaatatctcctaccgtgatcacccggtctacagccagtacatactgatcctgcttgtcttctcccataagaatgtctcctggtatgtcctggtatgtaacaacacaggatacgcctggtgcctgttccgcctgagaagtgtcaatatttttaacccatgcaaatgcatatttggaacttacgccgtatgcgtactgcatgtctttcatctccaggtcatttgcaaaaatggtttcaccatttacttttttgtatgcttctactctttgcttgctttttgttacggaatgaaataccattgtggatcactctttcattttgataatcgtgtaattggtaatcttatcgataatcttgtaatgcgaaaaaggcgcagtctgtggttttcaccacgactgcacctttgctgttctttatattagtctttttttctgaaactgacaatttttaatatcatattaagaccgaattatcaaattgatacccttgtaattttaccatatcccaatctatttccttattcttcccaaatcccctatagatttttacagcgattctgctataatatgattacagtgtcaaaagcacggaacaatccgtgtaatcatgattttggtgttttcacaccaaaatcataatacataataccaaaatgaaaagttcataatgcttttgaactacaaaaaggaggataaagccatgatgtataaagcaaaaggtgtctgtgcacaggccatcgaatttgaaattgatgacaataaaaaggttcacaatgtaaattttatcggaggatgctctggaaatacccagggtgtttcaaaattggtggagggcatggacgctgaagaagtgatcagccgtcttgaaaatattaagtgcggttcaaaaccaacttcatgtccacagcagcttgctttcgcattaaaagaggcacttgcctaaaagcagcttaaaacccgtctgtgatctgatgaaatactaagaccacaggcgggttttcttttatctcactgatccggtctgtcccatttatcacataatgactggatatctctcgcaaatctgtccagatccttattgggagttccttcatttttgcggatcacagacatcaatctgtgtccaagagaaaccagcttcgcataagcctgagcagctttagaagccttgggagacttggatgctttctcaatgcggatgccctttgcctcatatacaagggcattttctttcagatcatatatggttccactgaaaggcgccatggtatcgtaccccagttcttccttcagtcttcctgcaaaaagctctgttacgctgtcctctccatgagtaatgaatacttgtttcggtttctgtttaaaagctttcgcccagtcaatcagtccatttacatctgcatgaccgctgatgcccggcatctggcggatatgggcagccacatgaaccggctcaccgaaaagcttcagctcctgcgccccttccagcagtgcccttccggctgtccccacagcctgatatccaacaaacaggatcgtacactcttcacgccacagattatgtttcagatggtgcttaatacgccctgcatcacacatgccgctggcagaaatgatcaccttgcagtcttcatcaaaattgatagctctggaatcatcgcttgttacagaaatcctaagacctgggaagcttaaaggattgatccctttttgcaccaatttcaaagcttcctcatcaaagcagtcatgataatgttttccgaaaatggtagtagcttcatttgccagcggactatccacatagaccttaaaattatcatgtccagtaacaaggccttcctccttgatctgccgaataaaatacagcatttcctgcgttctgcctactgcaaaagaagggatcaccagattaccgcctctgtcaaaggtttcctggatcacctctgccagaagctttacatattccggacgttctccatgacttctgtctccatatgtggattccatcaccacataatctgcttccttaagatatgttgggtccttgatcagtggttggtttttattgccaatatctccggaaaatactattttttcttcttttccatcttcttccatccagatctcaatactggaagaaccaagcagatgtcctgcatctgtaaaacgaacctgtatcccgggagccggctggaaaatttctccatattgtcttcccacaaaattcttcagcactgccaatgcatcttccatggtatatacaggcacaaaatctgcttttccctggcggcgtcccttacgattgcgccattctgcctcaaacatctggatatgtgcactatcacgaagcataatatcacacaaatgacaggtggcttctgttgcatagatcggtccctgaaagccttttgcatataatgcaggcaacattcctgcatgatccatatgtgcatgtgtcagcagtacaaaatccagttctcccggggctaccgggatttcctgattctcatagtaatttggtccttgttccatcccataatctaccagaaaccgttttccggctgcctccagataataacagctgcccgtcacctcatgggtcgcaccgataaatgtgatcttcatatacaagccccctttatgtcctgcctgattttatattgacaccaacttgaacctttcctatctggtatcactatgtaatattatacacgttttttccggtaattaacagattatttgtatattatttatatatttttagaaatcattccaccccataaataattaatgaaacataccatcccttttgtaaatatattccatatagtatattctttcaattctcattcctttacacgattatagtatcagaactgaagcagtaaaatcattttttctgtctgtgtcatggtatttagatttttttctaaatagttcttgacttttccataaagttatcatatattctatttagaaatatttctaaatgcttttaaaaggaggaacaaaattgtcttttgccaacactttcaaggcactatccgatcctgtccgacgggaaatcctacagcttctgaaaagcggtcggatgtcagcaggagaaatcggaagtcattttgacatgactggtgcaaccatctcctaccatctgaacattttgaaaaaagcagatctggtatgggaagccaaagaaaaaaattatgtatattatgaattgaatacttcagttgtagatgaaatcctgctatggctgaaggatctgaaaggagaatctgacaatgatccgaaataacagaaaaactcttttacttacaagccttcttactatcagtcctatacttgcaggcctgattttatggaatcagctgcctgagaaattcgccatacacttttcaaacaataatggagccgatggatggggcagcaaattttttggagtatttgggcttcctttgattctgcttgccctgcagctttttgtttccctggcaaccttggcagatcccaaacgaaaaaatatcaatacccgcattggcaaaatggtcttctggatcatccctgtgctttccatatgcgttaatattttcctttattcttataatctgggatatgacctggatatcggactttgggtcagccttatgattggctttctctttattgtcataggtaattatctgcataaggtgaaacagaattttacgatcggcatcaggctcccctggactctgacaagtgaagagaactggaaccgtacccaccgcatggcctcctggatttttatccttggcggtatcattatgatcattaacggttttgtccagtccgattggcttcttttttccatactgatggtgctttttgtgattccctgtatttattcttttatactctacaaaaaagggatctgagccgccctgaacattctgcccttaggaggtttttatgtatataatgaaatgggcctgcaaaaaagcgggccgtccccttctttctctgctggctgtggcagccgcatccctgcttatttactggtggcatattctttccccatacatgcacctgcctgcagttacagatgatcagctagatgcattggatctgtccggttatacaaagatcctgttttctgcacacccggatgatgagctgatctggggcggaggccacctgctggatgataagtatctggtagtgtgtatgaccggtggcaacaacccggttcgcagcaaagaatttcaatctgtggttacagaagccggaggcaaatatctgatgctttcctacccggataagcttggcaataaacgcagttcctggaaatactggagagcagccatggaaaaagatgtggcaacgattcttaactacaaagactggcagctgattgccactcacaatgaaagtggcgaatatggccatctgcatcatcagatgacacaccagatcattgaaaaagaatataaagaaaccggatgcaaggctgaattatactggtttggtacctactacgtaaatgaccggattccatacagcttgcgggaaatggacaaagaactgtacatccgcaaaaggaaactggcaatgatctacgaaagtcagcgcaataccatccgtaaaatgtatcatatgttcccctatgaatactggaaaaatgcagcaaccggagaattatttcctccaaaatagcaaaaaaagaatgggatacggttttcactgactggtgataaccgtatcccatttttatactaattcaatttttatacttattcagcttctataactatcccgttcatgtcctgcactgcccggatagaacatggattcaagaatgcctcggcattcttgctgcgaggtgcgtgtcatgcaattgcatgacacgcacctctgcaatcctgccggaggctatatcagctgggggattgactcccagctgatactattttgtgcctacagtaactttgtccagatgccagatgtcatccacatactcctggatggttctgtctgaggagaatttgccactgtgagctgtattcaaaagtgccatcttcgcccacttcttctcatcacgataagttgcttccaccttcttctgtgcctctgcataggagcggaaatcaccaagaatgaaatactggtccggtctggaactgttctttgtgttcagaagagaatcataaatatcacggaacagctctgtatcactggagaaagtaccattgatcagctgcatcagtacctgacggatctccggatctgtattatagatcatatccggatcataacctccattgttctcataattgatgatctgatcagaactcataccaaagataaatgcattctcagcgcctacctctgctacgatctccacattggcaccatccatagtacccagtgtaggagcaccgttcagcataaacttcatattacctgtaccggaagcttccttgctggctgtagaaatctgctcggaaacatctgctgctgcaaagatcatctctgcattagacacacgataattctcaataaatacaaccttgatcttgccgttaatggatgcatcattattgaccacatcagcaacagagttgatcagcttaatgatcttctttgcacgggcataagctgcagaagcttttgcgccaaagataaaggttctcggatacatatccatctccggatgtgtcttgatctgattgtacagatagatcacatgcagaatgttcaaaagctgtctcttgtactcatgaagtctcttaacctgtacatcaaagatggaatgaggatccacctcaatgccattatgctccaggatatattttgcaagacgctgcttgttctggaatttaatattcataaattcctgaagtgctttctcatcatcagcataaacagccagttttttcatctgggacagatctgtgatccagtctggtccgatatggtctgttacccagttggcaagcagctggttgccatgaaggaggaaacgtctctgtgtaataccattggttttattattgaatttttcaggcatcatctcatagaaatcacgcagttcctgcttctccaggatctctgtatgaagcttggcaacaccgttgacagaaaagccggctgcaatggcaagatgagccatcttaacctggccatcgtaaatgatcgccattttcttgatcttctcatagttgcccggatatctgttctgaatctcaatgataaaacgacggttgatctcctcgatcatctgatatacacggggaagcagtcttgagaacagctcgataggccatttctccaaagcctcagacataatggtatggttggtataagcaatacatttggtggttactgcccatgcttcatcccagccaaggccttcctggtcaatgaggatacgcatcagctcggcaactgccatggtaggatgtgtatcattcatctggaatacaaccttttcatgcagcttccgaatgtcattatgtttctttttatattttgagattgcttcctgaatacttgcagaaacaaagaagtactgctgtttcagacgaagctcttttcctgacatcttgttatcattaggataaagtacatttacaatatcctttgccaggttctcctgctctactgctttcttataatcacccttgtcaaaagaatcaaaaccaaattcctcaatcgcagctgcatcccagatacgaagggtattcaccaaatcattcttgtatcccacgataggcatatcataaggaatcgccttgactgcctgatagccttcatggataaatctattctgtcctgttgcaggatcatattctacacgtacataaccgccaaaatgcacttcctttgcatactctggacggcgaagctcaaacggataaccatttacaagccagttatccggtacttctacctgataaccgtccctgatctcctgcttaaacataccataacgataacggataccgcatccataagcacaataaccaagagttgccagagaatccaggaaacatgctgcaagtcttcccagaccgccattgcccagtgccggatcaggctcctggtcctcaagaacattcagatcaagtcctaactcctccagtgcttcctttacttccccgtaagcgccaaggttgatcaggttgttgcccagggcacggcccatcagaaactccatggacatgtaataaacgatcttcggatcctgctcctcaaatgcgttctgtgactccagccaattatcaatgataacatctttcacagtgtagcatacagcctggaaaagctgctcctgggtagcttcctccagccttttgcgatagagaaattttacattatctcgtacactcttcttgaaggcctctttctcaaactgcttgttaatcatgttaatcctcctgtactttaactactgccagcgttacctgctctttattgatattccactcttttgtataaccctgaacttcgcccagaatgatttgatctgccagaacctcgcctttgatttcatcctgatgcgctttcatcacatccataaccttatcattatcttttgcataaaccaggatcttatccataacctcaaatcctgcttctttacgcatggtctggatcttgctgatgatctcacgtacaaaaccttcctccagcagttccggagtcagattggtatccagtacaactgctgtatcgccgtctgtctctgtcatatagccctctgtctgggcagtctcgatcagcagatcttcctctgtcagttcaaccttatttccgtcgatgtccagaacaagaacaccattggtcttcagttcattcattgccttgcttccgttgatctcagcaagtgccttacggataccgcccagaagcttgccgtatttcggtccaaccgtacgaagctgtggcttaaagctgtaggaaataaaggattccacatcatctgtgaattttacttcttttacattcagttcatctgcaataatatcagtaaagaatgtatccatcttctctggagccttcacatacatggtaccgataggctgacggttcttgatgtttgcagtatttctgcaggcacggccaagaacaaccactttcagcacttcttccatgttatcttccagttccttattgatccactcttccttcactgtagggaagtcgcagagatggatactctcaggtgcagtcttatcaatacttcttaccagattttgataaatatcttctgtcataaacgggatcagaggagctgctgtcttggaaatggtcacaagagctgtatataaagtcatgtaagcattgatcttatcctgctccattccttttgcccagaaacgctcacggcttcttcttacataccagttactcatttcatctacaaagttctgaagtgctcttgcactttccggaatcttatagtctgccagatcctgatctacagtcttaacaaccgtattcagcttactcagcagccatttatccataacagagagcttatcatagtccagagtatacttcgttgcgtcaaattcgtcaatgtttgcatacaatacaaagaatgcataggtattccaaagagtgctcatgaacttacgctgaccttcctgcactgctttgccgtggaagcggtttggcagccatggtgcactgttgatatagaaataccagcggatcgcatctgcgccgtatgtttccagtgcatcaaaaggatctactgcatttcctttggatttactcatcttctgtccattttcatcctgcacatggccaagaacgattacattcctgtagggtgctttattgaacagaagggtagactctgcaagtaaggaatagaaccatcctcttgtctggtcaacagcctcggaaataaagtctgccgggaactgctgttcaaaaagctctttattttcaaatggataatgatgctgtgcaaacggcattgctccggaatcaaaccagcagtcaattacctccggtacacgatgcatggtaccgccacatttcggacatttcatggtcagatcatccaggtatgggcgatggagctcgatggtcttagctctttcatcccctgtcttttcaaataactcctgacggctgccaatagactccatatgtccgcactggcattcccagatattcaaaggtgttccccagtatctgttacggctgatgccccaatcctgtacattctccaaccagtcaccgaaacgaccttttccaatgctttccggaatccagttgatggtattattgttgcggatcaggtcatcctttactgcagtcatcttgatgaaccaggattctcttgcgtaatagatcagcggtgtatcgcaacgccagcaatgaggataatcatgttcaaacttaggtgctgaaaacagcttgccctctttatccagatctttcagaaccataggatctgcatctttaacaaatactcctgcatacggagtttctgcagtcatatcgcctttaccgtctacaaactgtacaaacggaagcccgtagttccgtccaatacggctgtcatcttcaccgaaagcaggcgcaatatgaacgataccagtaccatcactcatggatacataatcatcacatacaacgtaatgagcttttttgccctgttttttcacgtattcaccggtgcagtcaaacagcggctcatactctttatattccagatcttttcctgtaaatttctcaaggatctcataagcaggtgcttcttctgtggcaagcttgccaagaacagtatccagcagtgcttctgccatataataagtataaccgtctgctgcctttactttgcagtaagtatcctgaggatttgtacaaagagccacgttggatggcagagtccacggagttgtagtccatgccaggaagtatgcatcctcaccctttaccttaaaccttgcaatagcagaacgctcttttaccagcttatagccctgggaaacctcctgagcggaaagcggtgtcccacatcttggacagtaaggcacgatcttaaatcctttgtataacaggcctttatcccagatctgctttaatgcccaccactcagactcaatataattatcttcataggtaacataagggtgctccatatcagcccagaatcctacagtagaggaaaaatcctcccacattcccttatatttccatacactttctttacactgtttgataaaaggctcaattccgtattcctcgatctgatcctttccatcaagccccagcttcttctcaacttccagttctaccggaagtccatgagtatcccagcctgcctttcttggaaccatgtagcccttcattgcccgatatcttggaatcatatccttgataactctggtaagtacatgtccgatatgaggctttccgttggctgttggcggtccgtcgtaaaaagtatatgttggtccctctttacggttttccatgcttttttcaaaaatgtcattgtctttccaaaacttttcaacctttttttcccggtctacaaagttcaggttcgtatctactttctgatacatcgcatttcctccttttgctcatccttgagaaatgtgtaacagggaacttcaaaaaagcctcttattacaacttaaaaagcctccgtccgtaaaaggacgaaggcgaagtgctctcgtaataccacctgttacaatgtacagggccatatgcccgatacccgttcccgttaacgtgggaaatccgtcatcccctactgtatctgctgccagacaccctcagggacgcaactccggagtgatcttctgctatatctgactcacaccaggcttccaccctccccggctcgctgaagctttcaatacagcttactgtctccatcatggtttttccatatgcttttctattataagtgcatgaaattccctgtgtcaagactttttaagcaagttttccacctgttctttactgaaaaaaagtgttataatgaagcaaaatttcggaaatgctaacctgtaagctaagatgaaaggaatttttatgtttaaatcaggaaaaaaaatattaaaacgtcttttatgtgtcactttatctgccggaatgcttgtcgcacagcctgcatttgcctttggagaagaaggagaaactgctgctgaatcccccacgcctacaccggatcctcacacagaggcctattatgctgccccggaaagcaattccatccccggctggccacagggtccccaggtggaagcccgttctgcagtgatgatggacgtgtacaccggtgccatcctttattccaaaaatccggacgagaaaatgtacccagccagcattaccaagatcctgacagcacttcttggctgtgagaacttaagtgtacagaacaagctggtgatgtcagaaactgctgcacatggcatctcccccggcgattccagtatttacgcagatactgacgagatctttactgtccatcaggcattgatggctctgatgttggaatcagccaatgaaattgccctggctatcggagaatctgtttccggttctgtgaaaaagtttgtagagcttatgaatacccgttcagcggaaattggctgtactaatacccactttaacaatcctaacggtcttccggatgagaatcatgttaccactgctaatgatatggctaaaatctcacgggcagcctggtacaatccactgttccgcaaatacgttacacggaagatcttcgagattcctcctaccaacaagttcgaggaaacccgttatctcctgaaccatcacaaaatgatggaaggccgtgactatgcttatgaaggtgttcttggcggcaagaccggatacacggaagcagcaggaaatacgcttgttacttatgccaaaagggggaatatgacccttctggtggtggttatgggtaccattaacggtggctggtctgatacagcatccctgctggattatgggtttggcaattttgagaagatcaatctgaaacaggataagacccctgtagttactgcggatcttgcctgcgacaaatatattcttcaaaataatggcaatacctgcccgtttccctataccagaactgtatatgttaccgttcccaagggaacagatgtatctgtcctggaaaagcagcagatcttaggctccaacgctgccggtcctcttcttttaaacagcagctattattataatggtcagctggtaggatggggtgtacaatatgaaaaagaggtcctatcggacctcctgcttcctttttaactgtcgcttcaggcggagagaatcccgtttttcacggattttctccgcctcttctgtacctacccggtatagagttttcacagcaaaatatttatcttcttctgttctccgtatacggatctttccctctatggttccatgttcctggcaaactgccaggcaataataaacctttgaattattattcatgaaccatcgtaccttccgtctggcaggacaatggcacacaggacagcaggtgcttaaaacctccctgtccttcatcactcgctctctggaaaagaactccctggaaacatacttattccacatggaatattccatatgaacttcttcttttctggacttgggattctggtaaacgtccagggatggattctgacggatgcaattatcgtcaatatactgaagcacatatgctgtataatatgcatctgcaacagccctgtgaaattccatctggcttttgatcttcagctgctgcactgcggtctccagtgcccgtctctcgccatcttcctcataacagatcccgtatagcttctgtacatcataataagtaacaggacctttgatcagtgacagcatattataatatttcatattgcgctgcagctccataacatcctgattgccccaggtaaaaaaggcataatcctttccgcaccattgaagaaattctcgcactgccagcggaaaaggcaggccatctgtcaaatctttataatctacatggatcacctcatggatactgtcatggatccagttgtacacctgcggtttgatcaaccgttgaaaactgtctatgatatttttatctttatcaagctttacagcccctatctcaataatctcaaatggtagtcttgcattttcaaattttttcccatccggactttgattccattcaagatcaaacacaatataattcatggtatgattccatctttccttttgccgtttctatcatctcttctgcgcgtaaatcaataaggaaagaataaagcaaaaaagctattccgtcaaccctgtgcctaaagcttgccctccagccagtacaactacgttactgttcacacaacatctattataagcgatcttctccactgaaggcacccttgcggagcgtttttataaaaaaagggcatgcacccaatggtgcacaccccatattaaaaatatcagccttcaatggcgatatgtttcttttcttctacttccggttttgcttccttcttcggaacgaacaatttcaggataccatgtttgaattcagcttttacatcctcctggtctacatcctcacctacatagaagcttctgctgcaggctccggcataacgttccttacggatgtaacgtccggtttctttttcctgttcatccttatcaagacctttctcagcacttatggtcaaatatccattttccagagaagccttgatctcatcctttgtaaatccgggcagatctaccatcaattcatagccattagacaattccctgatatctgtcttcattacgtgattagctttcctgccatacagcttcttctctgtatctttcagtgctttatcatcataatagaatggaaattcattaaagaaatcatcaaataagttttctccaaaaacgctaggcattaacataagtcatctctcctttttattatacatttatgttttttacctgtttcattggaactcgggtatctgttgggatctcatagaacctatttctttgttctctttttatcctcttcctttgttctatgtgtaatataacacatgttattagcactgtcaataggtgagtgctaattattttgtgaagattttgtgaacgctacaagccatgcaaaatggtgaaaaaagacgccctgctagtttacttgcaaaggcgtctatttttgctattttatagggcgacagctctacagcgagggaagtctttcccgagctgtgcatggcgtatgccactacttcacagaggtttttcacttactttcgcacggaggtttcttggtttgaccacatttttacgacaaaatcttggtgctttctctgtaagtcccattggattttctctgtattctgtccaaaaaaaagatttgaaaggtatcagccagaaggttctcactgacagtctaagattaatggaagaagctggaatctgcccaataccaccgcagatactgtcggggtccatatgcacccgggcgtcaaatcccacaaaagggcggccagagtcttgatcgaatatttgcttgtatcaggaaatagatattacttttccaatgaacagaatttcatcattgtttctgtcatagatcagaaatgcaaatgggcgggtaagctccacggttttgataatcggttcattttccaccgcggcagacatacattccatggtaactgccgtcactgctgctgccttcgtgccgttttcatccaactccagttttgttttctgcagtatcgtatccacatttacattttggtctgcaataccggagaaatcagaattgctggaaaatagattgtccagccccatgcttgagagcatatcgtttagaacagtgctcgtctcaaaattaagttttggcatcttgcaatcaacttcatcatattctggattggatttcagaagtccgccaatatccagatcctcaaggttgaaatcgccttcatcatttggcaggatgcctatgaaacttagcccgttggcataatccctgccaaaagcagtagccttgtcattttcataataccggtctcctgtacaggtcatgtattttgttttttctttttttccaaaactttcttctgtatcagaaacattccaaggttccccgctccatccggactcaaaatacagggaattggtcaggcacagtcccatattgtcattgatcagatccggcgtaatgatcttcgggatcagcccttctgtatttttgtcacaccaggaattgataacatcacatgttttctccgtggcagaaaaatccacagcttccacttctgccccaaaactatccgataccgtattcttgaatttctcctgaagtgttaacccattatccaaccaaatcgcatctgctatctttacttttgactgatatccgtaactctcatcttcagtattatatgccttaattttgtccagatactcctttgcataggcggcaaaatcattggttcccaggtaatcatccaaaatttcttttgtctctcctttcgcaccttctgcaatcatgccgagtgcaaagttcaagcttgtcggactgaacatgatgtttttaccgaaagcttccgctgagagcatgtctgtcatttttactgaattttgtaatactgtagttttgttaatattggtttcattttgcatgtattcatctgaagtaaggatttcgctggctgctgcggtatcaacatatacgttgacaactggcatcactgctgccatcgctgtcattataccagccagaagttggtttcttctcataaggcatttcctcctttggcattttctataatttaacatgctagtcttcttgctgtgtaatttcagaaaaccaaatatctgaagcctatttcatgacagccgaaatttaagccgaatcaagtaagtccaactttcggtgatgcgttgactgtatgtatttcatagagtctgattctgatgtttccccaagtcatattttatgttctcacagctgaaatatcccctgtccagaatgaatccgatcttcttataaccatatccaaatgctttatccagcatgaactgaagctgggagatatttcaggaaattcaccaatactatcttgcaggaacattacctgatacattaaaagtgtcttaacacgctttctttaatattattttgtcattggaagtttatttacattctataattattttctcacatctgtcataaccaagctgggaactgttcagacatagcgtataattgctggcttttccccatttctgctctgtataaaagttataatttgtcatacgtcgtttatctgtgtctgccatcattttgaccgcttccttctcccctacattatataagcgaataatgcgctgtattttttccggcatattcccatgaataaacacattcagtacatcgtcccggtctttcagaatataatctgcatttcttccaataatcacacaggactccttctgggtcaaatcaagaataacctttctctgtgcctcatataccatatcctctactgattttcctgtaatgtcacgcccggcaaatgcatacgcaaatagtccttccttcggagataactcagcattttcctgaatatattccggtgataagccggatttttctgcaatctcattaataacatttttatcataataggcaattcccagtttctttgctacctcttcaccgataaaacgtccgccgcttccaaattctctgctgatcgtaatgattctttttgtcatctcagactccccccttaattcaaaatatccactttatttttcctgattctctttaaaaatacatatcccaccaggcatgagatcacctctgtaatcggaaatgcccaccagattaatgcaactcctgcctgaccatttctgacaaacagtgaaaagattccagccagcggcagaatgataataagctgtcttaacaaagaaataaccaatgattccaaaccgccattcaatgcctgataaatgccctgataagcaacattgattccggaaaacagaaaactgacagagatcactctcatcgcgctgataaaaaagtctcttgactgtcccgcattaaacaatgttgcaaacgcaccagggaagatttctgtgattgcaattcccagaatcattaatacaatggtatagataagcccatatttgattccatcctgaattctcttcttgctccgcattccataagcaaatgcaatgatcggtgtgatcgcatctcgtaaaccaaaagcaagaaacaggacaaactgctgaactttatagaacaatccataagctgtctgtgctgacggattaaatttcagtatcagattcatcacataaaccataatagacatcaacgcctgtgcaataattgccggaagtccgattgcatagatttcttttataaccctggcatctggcttcatgtatttcaccccatgctggaattccttattcaatttgatatgaaaaacaaacagtaatactgcggatgctacctgcccaattacagttgcgtaagcagcaccttttactcccatttcagggcaaggcccaataccatagatcataatcggatcaagaataatatttactaccgcaccaacaacctgtccgattgtagaataaagagaacgccctgttgcctgtaataacttttcaaataatgaaaagaaaataattccaaaagaaatcacacagcatattctcagataactaactcccatctcaagtacttctgcatcaactgtttgtgatgaaatatatactctcacaccaaagataccaaacaataagcagagcacataaatgatcactcccagaaacagactgtttcctgctacctttgctgcttttttactgtttccctgtccaagtgtccttgcaagaagtgcattggttcctacaccggttccaactcccaccgcaaccataagcatttgaaccggaaataccaatgttaatgcatttaatgccgcttcactacctactctcatatttcccacaaatgcactgtctacaatgttataaaccgcctgcaatgccatggataagatcatcgggattcccatttggatcatcagcttactcactggcatcaccttcattttattgctttccgccattttattttagctcctctctttttggcacaaaaaaagtgtgcaccttgtcatataagctggacttacgctgaaaggctacacactttttcatggcaaatattatattttaacaaaaaacgagcagctagtaaactggatttacgcttactcgctactcgtttggtgcaattatatttcctgtttttcaaaaagtcaaacaaaatttttcttacatttttttttgcaatgccataaggaggccttatgaattccagaaacaaactggcagaaaggccaatccgacctttactgtacacaatggcagttcccctaatgctgtcattgcttgtattaatatgatcagtgcagctatccgccaacttatattactggttccctgcctctggattttcgtagagatttctgacatttcacatagctggtatgcattctggcttcttcttttgtcagacacaatctcaatcttgcatctgagtaaaagtataacgtacaaaagaaccatgattatctcctgtcactattacaatatccccactctcattacatgtggattccagaattggatatcttccattttcttttacataggcttccggactatctgcttctgcctcgatcagagtttttttactatactgctctcctccacaaggattgatttcctcaataaagatttcatactcatgcatatacgattcctcctgaaataatttttataaaatgagcagcggcatatgttgctttcctgcaccattgcgctgctcatctttatttttattataaaactatttcattttgatttcaaaagcgttttttgccaaaatgcctgttctgtttttagacagtattacctatgtatttacacagagtcagacttctttactgagataaaactatcacttataccaaatcctcaggcatttcaccttgatattcgatggatctgctattagttttcctatattgagagtcatagtttttgtctttccaggctttatgtttactttgaacgtcttggtacgggtcattggttcgttgatggtcatggtaaacttaagcttcactttggtgatggtagatttggatttgttggtaaatttagtcctgtaataggttttaccggaggttggataatatttataacctgtcaccttcacctgcagttgtttcaaagtgggctttggtgcagactttttacctacgatcacagtaatcgtccttcgcttgccatttaccagagcgcttaccttcgcagtgccaggtttctttgctataataaatccgccggctgcatcaacgatctttttattgctggattttacttttttgatcgtaatgcttccgccacctgttttgaaaacgtaactggaaaacattgttgtgtcccctaccttaagggagatggatttggcaactgtaataactgtttttgacacagtaaaggaaaccttccgggtttgattgccatatttgaaaataagctctgctgaaccggctttataaaaataaacacttacatcaacactatcaccagatcctggagtaattcctgtaacctttccaactgatgaatctgaaatgcttacagaatatttggatgtgtccttcagtggatctaatacatatggatcatccactgttaccagaaatgttcctgtagttttatcataacttttttcaggcggataaatagttatgtccgcatttttccgattttcccgaacattgactgtaatgttgaaatccacatacgactcagaaatatagctatcgtaatatgtaaatatttccataaattccagttcatccgattcattaaaagtaccagagccctggagtacattgctgccatttggatataaatatgtgctgttgtcacccagccatacgcttacccggccaggagtcagttcagtattggggaaagtcatagtcacatctactctgtaatccatggactcctctgatggaacctggtatccaagataataccgaaatgaatttccactttgcacatccatggttcctgtcccactaagcttaaatccgtcctgggtattctccctgatgatcgccgcctgtacccgatgctgcccaaagcaaagcaacataaatattgcaattacaaacaccaaaatatatttcttccatctggttaaatttcttttcataatcataaaaaatcccctcccttttatctttacacagactatgatattgcttacaatcagtgtatatagttgaaagggatttttctattaaccattcgttagtttttaataagatttaaaaaggagatggtacaccatgaatataagaactgccacattcaacgatcttgaacagatttcagaagtagaagctcagtgttttcctgctgctgaagcagcaaccaaagaagaatttgctgatagactccattattacggtgatcatttctggctgatgttcgatcatgaaaaattgatcgcctttgttgatggctttgttacagatgaaccggatctatatgatgaaatgtatgaaaaagcctctctgcataaccctcatggtgcctggcagatgatctttggggttaatacccttccctcctatcgttgccaaggttatgcaggacagctgattcaatatgccattgacaccgcccggaagcagcagcgaaaaggccttgttctcacctgcaaagaccgtctggtatcttattactccaagtttggttttacagacgaaggcatctccgaaaaatctgtacacggaaatgctgtatggcaccagatgcgccttactttctaatatttgaaacggccggaaatctccgaccgttttcacctaaaattaatcctgtggatgtaccaccactttgatagattcactggacatctgcataagaatagcgtcttccagatgttccagatcataatgatgagtgattaatttttcaatctccagccttccactgttgatcaaatttactgctctctggtgagtatccggattgataatagaaccacgcacagtaagctcttttttataaacatcaaataatggaagaggtgccgttccttctactggcggtacgctgaacagcactacagtaccgcctgcacctgccatttcgacggcctgctgtgcgatctttgggttccccacacactcaatgacacaatctgttccttcatttcctgtgatctgaaaaatcgcctgggccagatcttcatggataggatcaacagctgcatctgcccctacactaagaccaatcttacgtctcatctcaattggctcactaaggattacggtagatgcgccttttaatttggccagctgaatcataagctgaccgatagcaccaccaccgattaccagtactgtctgtcctggaataatatctgtcctgtcaatcccatggatcgcacaggccagaggttcagccatggcagccacatcaaaaggaacatctttatttaatttgtagcattgattctctggtgctacagaatactctgcaaaaccaccatttacattcactccaagagcaaataaatgctcgcaattctgcttttttcccatgcggcatgggcgacatttcccacagtacatattaggatccagggttacatgatcccctactgacacttctgttacctcagatcctaccgcagtaaccacaccagaatactcatgtcccaatacaaccggaggagttacatctgctgagcccttttctccatgataaatatgtacatctgttccgcagattcctgctgccatattctgtatcattacctgatgtggctccaattctttaaattccatatcacggacttcaaactttttttctttgtccgctcctaaaaaatatgctcctcgcatgtcctaatacctcccattactttaatgttctatgtaaataatccaggatcagatcctttacttcagtctgtgaaaatgctgcatctgcatggtctaccccatcaattagtacaaattctgtgggaacaccttccttttcaagtttttcatacagaatatcactgtgaaatactggaacctgtgtatcttttgttccatgaagcaggagaaatggaggcgtcgcctctgtaatgtaaaatcttggatccatcttctcgccgattgtcttttcatggcgcaggtgattcactcctgctgccactgactgcggttccagttttcctcgtaacaaaaactgctctttttcatcataagaatccaggctttccctgccctcaaaattcatcatatccacagctccgtagaatatcactgctgactgcactgctgagctttcatccaggtattcacctttttcaaattccttacgatttccggtggctgccacaagtgaagccagatgtcctcctgccgactctcccatcactgcaatcctgtcaggatcgatattccactcacaggcatgggctcgcaggtaccgaatcgcctgcttcacatccatcagcatttccggaaaaaaccaggttgccggaaggctgtaggaaacacttgccaccacatagcctttctttgcatagtaagacaactccggaagccatacattctggtctacctctgtccatccaccgcctgtgatccacaggatacagggctggggcgcgggcttatcatcatattcaaaaaatgctctctgatgaagaatgctcatctttaaaggaactctggttgcattacaccaataaggtttctgggagaataccagatctgtgcactgaaggatcacaggttcttttgtttctacttttatgattttcttcacattgaccaccttcccgtattatggtttcattctttttccacaacagaagcagcatgttttctggaagcataatccataccaactgcaaggatcagtacaacaccgttcattacatactgccagtaagtatccaatcccaaaagtgtaagtccgttattcaggataccgataatcagtacaccaaatactactgaaaacaatcttccggcaccaccgcttacagatacaccacctaatacaacagctgtaattacctcgaactcgaagccgcggcctgtattcggtgttccggacatcagacgggaaagcataagaagtcctgctacacaggcaaacacagagctcataatataggccatgatctttactttatcaacattgattccggaaagtcttacagcctcttcatttccgccaatagcatacaagctacgcccgaaaacggttttctttaaaataaaggcaccaagtacaaacatcagaatcatgatcagcgtaggaataggaagcattccaatatacccctgtcccataagtgcaaatccatcactgaagccaaatactggctgaccaccggagatcagatatgcagcgccataaaggatattcataaaagccattgttgcgatcatcggcgggatattatactttgtgatcaggaagccattacaaaaaccaactactgcagacatgagaagactgatcaagattgccaagatcggatgcacacccatttttaccatcatggttggacagagtacatttacaagttcaatagtggaaccaatggacaaatcaatcccaccggtaaggatgatcatcatcattccaactgccgcaattccacgaaaggaaatctgcctggtgatatttagaagattattcaggttcagaaatgccggtgacaaaatactgaatacaataaacagcgccacaaatgcaaatacaataatattttggttcatccatgattttacatttttcttattcatcttttatgcccttttctttataaaattctatttaaaggaatcatctgaaaatattattctgtcctaaccctgggatgccagggacattaccgcctcctgacagaattctgcttttgacagttcccctgttacacgaccttcgcagaatactacgatcctgtcggacattcccagaagctcctccatatcagaagaaatcatgataatggatttccctgcctgtattagttcattcatgatcccatatatttcctgctttgcccctacgtcaataccacgggtaggctcatccagtatgatcacatccggattctttgccagccacttggcaataaccaccttttgttgatttccaccagacaggtttttacagatctgtctgtcggaaggtgttttgattgccagtgctttaatgtattcaccaacaattttttttgcttttgtataatcgatcacatcatgtttcgagatctgaagcagactggggaaatatatattctcccccacagacatatgaagcatcagaccctgcttctttctgtcctcaggtgcaagagcgattccctgctcaatggcatcctttggatttttaacctttaactcttttcctttgtaagtgatggtaccgccggtttttcctgtaatcccgcagaccagctgcacagactcagtccttccggctcctaccaggccgccaaatcccaggatttcacctttacgaagctgaaaagatacatcctttacacctggtcctttcagatgctgtacatccatcacaacttccgtctgttcctgcttgtccaactttggatactgctctgtcagctctcttcctaccatcatggaaatcagttcctgacggttggtgtcacaggtgtttactgttttgatcatttttccgtccctcaggattgataccctgtctgtaatctcaaagatttcatccaacctgtgggaaatatatataatggtaacacctgaggctttcagctttttaatgatcttaaacatgatctccacttcattggtagtaagagaagcagacggttcgtccattaccaggatcttaaccttatgggacagagcctttgcaatctctaccagctgctgatagcctgttgtcagtgttcttacattcgcagtcacatcaatatttattccaagctgttcaaatattttctggctttcactcaccatagctttcatatcaatcattccgtgtgtgcggatcggacttccaaggaagacattttccgcaatagatatgtcgtttaccagattgaattcctggtaaataacagcaactccctgctcctttgcaatagcaggtgtcagattattagtatattcttttccatctatcaggatcgttccggatgtaggaatcacagcacctgtggtagatttaatcaatgtggatttcccggctccgttctcaccggccagcgcatggacttctcctgcacggaacgcaagactgacattatcaagtgccacaacacctgcgtatttctttgtgatatttttaaattccaatatatttttcgtactttccatatgccaacctcttgaatatcttttgctcgttgtaactgtccagtacccttgtgagatactgcctgctgaatcgttactgcctgttgtcttaaattatgcagggacctgcctgaggcttccttttcacgatattcgttgttgcctcttctgcctgtacaggtgccctgcatacacatgtttacttgctgagtttacttagatctatctgatcttcatatttccattctttcagccagtcttccatagtatcaacagttaccagctcatttggtgttacctgatctttttctgtgattccattattcagagaatcaaggataacttctacgataccatctccaagctgccagcctgcgccaaatgcaacttccgctttgatggggtcgccgtttgccatcagctgaagggcttcgatagtaccgtcaactgcaaaaataccaaatccttcctgcttgccggctgcttttactgcctggttagcaccaataccgccgccatcaccgatggacatgatcactttcatatccggatatgtttgcagccagttctctacgatggtcattgccttatctgcaactacacaggaatcctcaacaacaagttctgcatctggagcattctctgccagggcttttttcattgcctctccacgatctttacattcctggttctcatagaaagtaagaagaccaacctgtgcttttccgtcataattatcattaataaactgagctgcctgctcaccgatcaactgtcctgcacctgcattatcatttgtataggatacatcatatgtgttggtatgcacgccgtaacacataaccatgattcctgcatcctgggcatctttgatagcactttctacagaattgatatcaatagcagaaacgataatggcatcctttttctgctgaatgaaatcctcaatctgtgcaacctgcgtagacggatcattattagctgcaacaacggtaaaggtacttcccatttcttcacccttcttctgtacctcgtcacaaacctctgcccaaattggattggtcagatccgctactgtcataccgatctcatagctttttgcctcttcgctcttagcctcctctgctgaagctggaactgccagaacagatgtgccgattaacgctgctactaaagtccctctcaatacattacgtttcatgaatgctcctcctttgttttataaatatgttttataaatgtttcttgatatatttgatgatatcattgtatttatttactgtcaatcatcgaattgctgattctatttatgcatatttaccatatttctttatgttttatgtattctcaaagcagttatttttacaaaatgctttatatatctcttttcaagccacggttataaggttttatacatcacttttctctctcatttcagccttgcacagatttctttttcacttttttacatgagttttacatttatttacgattatttatataatttcttcttctttttcaccttatttagctatattttcttattttccatattcacttttgtaaatatatttgttataattataacaaaatcaagatctttcacaggagatgtattatggggattacaacttcagaattgaagcaattgaattgcgatatggtatatcggatgatttatgagaataatggcatcaccaagcaaatgattgccaaagagttgagattttcattgcctacaatttcacagaatctgggatatctgctggagcaggataagatccactgcagttcccacagagctgcaaccggcggcagaccggcacagttatataaattcaactataattccagaatcactatttctgtagagcttctcgccaacatgctgaatgtggctgcagtcaatctggcaggggagattatcgccgaatccagccttgacctggtttttacaaatgaccctctttattttgaaaccttcagttcctgggtgaatcattttattgcttcgctaagctgcaggccggaacagatcctgggcattacaattgccattcagggtgtggttgatgcagatcaggaacatatttctttcggcaccctgttgtctagcagtacttttgcaaggactgattttgcacagcactttcaatatccggtgtctctgatccatgatgcagaagcagctgggatcgctgagagctggcacagtgctccggatatgaatgctatctacctttccctgaatgccaacctgggctgtgcggtgatcgtcaatggtcagatcatgagatccagacatctgagcagcggtgttatggagcatcttacactgtaccccaatggcattccctgctactgtgggaagtgtggctgtgcagaaagctattgttctgctaataccctgatccgaaaatccggtctgagcctgcctttattctttcagaaggttcgtgacaagaatatcaaatacctgccgatctggcagcgatacctgcaggatctggcacttatgatcgatgatgtacggatggtcatcggtggtgatgtgatcatcggcggtctgctgaccccataccttacagatgaagatctggattccatcaaagacagcgtatactctcttaccacctttaaaaatgcagacttcactatcagtaaggggaaatatggcaagaaagccactctcatcggtactgcgctcacccgcataacggattacctgaagaaagagcgcctggttgactgaccagatacttaaattcatttatgtaaaaagaccgtcgctgtacctggcagcgacggtctttcacaacaacattcatacatataaacaacggctttttattcggcagcctcttcttccttcggctcttcttcaggaacaacattgtgtacctcggaaaccacaactacggtagcattcatatctgtacgcagatctacatccttatcctgtgcaatcggcagatccttaactttgatgctgtcacctatatgcatatctccaacatctacctcgatcttctccaccagtgctgctggcaaagccttataagcaatctcttccagcaaaagctgtaccactccatctgttactttatcatggttcagaagaacaacctctgcaacagaatgtactttttcattgcttaccagagcctggaaatcaatctcatctacctgtccttttaacgggttaaattccacgtccttaatcagtacatcatactttgtaccgtccacatccaacatgatctggctgcccttactgcttgttttcagcagcttatccagatccttcttaacgatcttgacgggaatggattcttttatttctcttccaaagatattaccggtaacaaatccttctcttcttaattttttggctttgacatccatgcttcttttttcagcttttaaagtattcatttatcttttcctccaaaaatctgatttgctcaatagccttcaccctgatcttccagggaggttttattaagtagctttcctttgttacaatcgtattataacactcatatcaatttcagattcaccaattttattttttttcatctgtaatttttgtcagtttttaatcttgtattttcccgccaccctgcttacgattttccgccacatctcccacgattttctttgtattactttcgtttttggtgtattgtattattaaatgcatccactttatttttaatcttattttaatctttcttcaaagtcactttaaggaaccactggtagattataacagtcaactgatacaaaactttgattgaaaggaaaaggaaaatatggaccagttagaaaaagtagataagttaagagaaagagcaaatgtcagctatgaagaagcaaaagaagccctggaagcaagtaactgggatcttctggatgctatggtatatcttgaaaagcatgggaaggcagagcctcctgaacaggaaaccgcatcctctgcctcccaggaaactccccagtatgtatcggttaaggaaaaggtagaagaacaggaaaaagaatcttctgaggggcttcttaccaagctggcaaagatatgcaaggtgctgttccgcatgagcaaagaaaacagtttctgtgtgaatcgtcatgacaaagaactgatccgcatacccgcctgggtactgatcctggctctgctgtttgcatggaaaatagtacttccggcagtggtcatcgccttgttctttgactgccgatattctttctcaggaaaggatgacctttccccggcaaacaaagctatggacaaagccagcgaaattgccggaaaagtaaaaagtgaatttgaaagcaggtaaattctaatcatgaatgaacatattctaattgtagaagacgaagaaaaactggccagatttgtggaacttgaactgctccacgaaggctaccaggtcagcaaatcatccaacggaagagaagcccttgccatggctgtggcaggggattttgaccttatccttctggatatcatgcttccaggcctgaatggtctggaggttttaaggcggcttctgcaggaccatcctacgcctgtgatcttactcactgcccgcgacgcagtcatggacaaggtagccgggcttgatgcaggtgctgtagattacattaccaagccatttgctatcgaagaattactggcaaggatccgcgtagccataaaactgcacaggaattttaacaaagcaactgtaccagaggcagaagacggtcttcttcgctggggacaccttaccctaaatgaaaagaagcaccaggttacttatgacaaccatcagatcagccttaccaaccgggaattccagatgctgaaagtccttctggaaaaccaggatattgtactgacccgtgatgttctcctggagcgtgtttgtggatatgattatgtaggcgaaaccaatgttgttgacgtatatatccgttttctccgttccaagatcgatcaggttttccaggtcaaaatgatccataccgtccggggcgtaggctatgtgatcaaatcggaagagtgaaaaatgcagaaaaataatactcagaccaaacgtatgacctctatcgcaagaaagctgcacaggtcattgattcgaaaaaaaatctccatgtatacaggctttgattttcttctttttgtgcttctgcttgttggctggctggccagcctggaataccacacctttggtaaattcatcctgtcgtacaaccgttatttccatattccatccggaagtacacactggtttcaggatcttgtttacattgtatccgatcaaaaagaaaagatcctgctgaaggttccccttgcggatctgatcattgtgctatgtatcacaacaggtatcctgtttttactacagcttctgtttatatgtttttcatatgcaaaagaaagcaaaaaaatccgtcagattctggctcccattaatgaaattgccctgaaagcagatgaattgagccgtatggctctttccggcgacaaataccagcagatcgaggatgctatttaccaccttcatccagaagaggctgaactgctttcttttggcgactccgaccttcaggggatcgaagctgcaatgaacaacctgcttctgcgtatgcgggattctcaaagacagcaggcccgttttgtcaacgatgcttcccatgagctgcgaacccctattgcagtgatccaaggctatgccaatatgctttcccgttggggcaaaaatgatgaaaaagttctggatgaatctatcaccgctatccagaatgaatctgaccatatgaagcatctggtagatcagcttcttttccttgcaagaggcgacagcggaaaaacacagctttctctggagccggtttcccctaatgatcttatgaatgaaatatatgaagaatccctgatgattgacgaaaatcacttatatcgtttccggcctggggatccggtgcggcaggtgcaagcagaccctgcccttctaaaacaggctgtgcgtattcttgttgataacagtgccaaatatacccccaaaggagccgagatccttcttcgtaccgggcagactgatgatggaaaaccttatctggaagtacaggattccgggatcggtatgtctcccaaagatgtttcccatatgttcgagcgtttttaccgttctgacgaagcccgcagctatcagggaacagggcttgggctttctatcgccaggtggatcattgaccggcataatggacgttttgaaatcctttcccgtacagaactcggcaccaggatcaggatcattctgccctaatattacttagtctctggattttatcactttaccatgatacaatgttcatcagacagcgctgccagacctggtggttctgattatgaatttactgcaaggagatactgatatggaattatttgaaggaagacccactgactgccaggggcgtcttgcaaaggaaatccgggtttatgattttcttgattcacttgggatcaaatatcagcggattgaccatgaagccctgatgaccattgaagcctgccagaaagccgatcaggtactgggaactgtaatctgcaagaatctgtttctctgcaaccgccaggaaacggacttttacctgcttctgatccctggagataagaaatttaaaacaaaagatctgtcttcccagattgggtctgcaagactttcttttgcaaaagaaaactatatggaagaatttctggacattactccaggctctgtaagtatcatgggactgatgaatgataaagaccacaaagtacgtcttctcatcgacagtgatgtggtaaaagaaccatatatcggctgtcatccctgcatcaacacctctagcctccggatcagcaccaatgatatgcttgaaaagatcattcctgctatggaacatgagcctacatacgtagaattgtgatatgttttttagccaaaaaagactgtggcacagcacgaaaaggctatgacacagtctcttttttatggaaaagaaacgcacagatcagcacagtcagcgacacgcaaagaacgattccaaagctgcctgccagtccctgcataatagcaattcctatattatttgaattaatgatctgctgataaggcagattgtatgcataatccagaaggagcatgctcacactgctcccggcaaaagcaaggatcagcgtattgctgtctgttcccatcatgtcacggcctacacgcatcccggccttaaacaattcttttctggtaagcacaggattctgtttgtaaatctcatcaatggcactgcaaatagacatagacacatccaatagtatcaagtcttttttattctcagcagaaaaaagtcccgggcccgtcaggctttctcgcttacgggatggagtatagcactgtaatttttgtaaaacaatatggtttccaatgttttgccgcacattttaccatgcctttacaaagcaaaagcgcctggtatgatttcttaacccaaaaggaacaaatttttccttggagaaacataccaggcgctgctgattgctgcttaagcagacatgtttatttttatataataattaaacgctaaaaaggccgcagattccccaatcctaggatcacatcccgtaattcttcctgtgtttccacctgataatccggtctctttgccccttctggaagcttatacccgtggtaattcacccagatggttttccatcctgcattcattgctcctgtcatatcattggcgatggaatctccgatcatataaacagtctcatcagtaatccccagccgctgttctgccatccggaagatttcactttcaggcttggcgcatccaactccttctgaaaccaacacatgttccattggaatccactgttccaatcccataatatggcatttatccttttgatgctgatccggaccattggagatcacccccatccgtatccctgcagctttacatctttccaatatttccgccaatgccggtgaaagcttcaggttctgctgtttttctttgtatctacgctgaaagtcttctgccatttcttctgtaaaaggaatctgcaggtcttccattgttttcataatgcggcatatccttgactggtgaagctccattcttccggcagaactttccaggaacatttcgtagcttcttttcccaaaaatctggtaaaacagttctggatccggcagctttttaccgcccattgcctcttcacatgccggctgaagcaaatcgatctggcggtataatgtatcatcaatatcaaaaaccaatgctattgtatctgtcatcaaatgttctcctttcccatttccgtatcatacgattatattatactcttccacaaacagcaattcatttatttgatgcgcttctgcacctacagaacctgccaccggcagcttcttacggatgcctggcaacaaaaataccgcaccggcttcctttcccgaaaccgatgcggtattttataccaggtgctttacttgcttcatattcttttcaattcagaaagtcttagttcacgccatcaccaaactggagtccgcttctgcctccctgttcaaaatcatcaaacaggttgtcaccgccctggacatcatcgccctgatcatcactgttctgtacatcgctgtcctggtcctcattactctgatcctggtcctcactggagccaagagtaacttctacagtactctctttgtaaccgcccttactaagtgttgcgatcgtaacctctacctgttcttccggttcatagtactcaagcatatctaccagatcttcaatagaagtaaccgtcttgccatcaaactttgtgataatgttctgttccttaataccagcagcctctgcagcaccgccttccgttacttctgcaacataaacgccttccggaataccataatactggcttgcctcatcactgactgtacgtccgctgatgccaagtacgccatggcttccctctactttatctcttgtcttcgcattcatcagactctcaatatcatctgtaacatcagagatcgcaatcgcataaccgataccttcaacctcagtagatgccagctttgcggaattgataccaacaacctcacccttcatgttaagaagagcaccgccactgttaccaggattgattgctgcatctgtctgaatcagattgataccgctctggttatcttcatcatcactctgaaccgtctgctgggaataatcagaatttgctctgcggttctttgcactgacaataccggttgtaacagactgtccataaccaagtgcattaccaatagcaattacctgctcgccaaccttcagatcatcagagcttccgatggttgcaacagagattgcatccatggtatcatcggaaatatcatccagtgatacggatacaactgccaggtcatttgccttatcatatccttttacttttgcttcataagcattgttatcaacaaagccaacagataatgtatctgcgccctccactacgtggtagttggttgcgatcagaagctctgtatcattcttcccgataataataccggagccgcttccttcaacctctctctcctgtggtgcgtatccgtactggctgaagattccgtaataatcctgtacctcctgtacagacttggtactgatggatactacagaaggcattgcctgctctacaattgcagatacatccacacttcctgcagatgctgtatcttttttgtcagaatcatcggagcttgacttcttagctttcagaagagtaagtgtatcgccactctctgcagcctgtacattgctggctgtattccagttgttcagataattaaatccgtgataagagcctgctgcaagtcctcctgcaagcactgcacaaaggctgatgcttaaacctttcttcatcattttctttttctggtttttcttttctgcttttttgttattttcattctcattcatttcatccatctcattaagttcattaaaatccttcatgatatatacctccttaaagactcatcgtctgtttcattcttaacgatttgctgcattctttaatgatctgctacattctttaatgatctgttgcactcatcaatatctgcttcatttccttttgatgtttcacagtatagggggtatttgtgtttactttgtgggaaaaatgtgttcaatttgttaaaaatcatttttctgtttttcgtccttttctgcctgcatgctcgcagctgattcctactgcagcaatcactttcccatgataaaaaatcggaagatttactcctttttgaacacccaaaaagctttcatcacctgaaacttcttttgtatccccttgtgttactacctgataaccaatctcatgaaaggaatctacccggctgtggtctgtgctggcaataataatcccccttgcatcaatataattaatatcttttccacatacactctttactgtatccacaatatactgggctgtttccctgtcaatgatctccatgttttcaccctcattgtgcttttataaatttatatgttctttatagcatatatttcttgtttttttaatcatattttattatttataccattttttcacgcgataaaactgataaaatataaacaaaagtaagatttgattcgtaagcccaagaaaaggagatctgaccatgaaacttgtaattgccattgattcatttaaaggaagtatgacttctaaggaagccggtatcgcagctgcccagggtatccgaaaagtttttccagatgctgatatctgtatccgccctcttgcagatggcggcgaaggcacagtgactgccatcacagaaggtatgggtggctcttttcgtactgtcacagtgataggtccaggcggaaaaccagctcactgccgctatggtatccttcctgccgcccacactgccgtgattgaaatgtcaggtgctgcaggcatcacactagtacatggaaaagaaaaaaatcctctgcatacaaccacttatggtgtaggtcaggtgatcctggatgcaatctcacaaggctgccgtaagtttatcgtaggtattggaggaagtgccaccaatgacggcggtgtagggatgctacaggcattaggctttgattttctggatgctgcaggggatcctgtcccttatggagcccaggggctttcccttctgaaaaccattgataatgcccatgtacttccggaactaaaagaatgtaccttccgcattgcctgtgatgtgagcaatccactttgcggtcctgaaggatgcagtgccatcttcggaccacagaagggtgcagacaacgaaatgatcgctcttatggatccatggctggcacattttgcaagccttgctggtaaaatatatccggatgcagatccagactatccaggctgcggtgctgcaggcggccttggctttgcctttcgtacttttttgaatgcttctttggaatccgggatcaagatcgtgctggaagaaacacacatggaagattatatcaaagatgcagatatcatcctgaccggagaaggccggctggatgcacaaactgttatgggcaaagccccccaaggtgtagcacaaatggcaaaaaaatacggaaaaccggttctggctttttcaggatgcgtaacccctgacgctgtcatttgcaatcagtccggtattgacgcattcttccctattctcagatccccgttttccctggaagaggctatggatactgaaaatgccaaagcaaacatgtctgcttctgtggaacaagttttccgtgtaataaaaacatttattgtaagtgctcagtaatcacatcctcacagttacaagtttttcccttaaatatcctttggatcgtctcttatttgaaaggattataaaatcgtccaaaacgcagggtaattccaaggctgattccaaataacacaactcccaaggcaagggccacaaaatccctgcgggcaaatggacgtttcatataccaggtacgctttttatcctttccaaagcctcttagttccatagcattggaaatggtattgatccgattcaggctggtaaggatcagcggcatcaggatgctgacagagttcttcagtctggcaaaaaacggctcgctttttcccagctcaacccctctggcttgctgtgcctggctgatactgtggtaatctctctggatatccggaatatagcggagggcaattgccacagaatatccaatcttgtaggaaacaccaatactgttcaggctggccgcaaattcgcttggattggtagcagaaataaacaaaatcgccaccggaagcgccacaaaatatttcagagagatattcagcatataaaacagctgctcctgggtgatatcatacctccagaacaagtgaaaaagcacatggcgggtcccatacagtgtggtgccctggttaggatcaaacagcaaaataaacaaattattcaaaaggagaaataccagcataaagatcatcataaaccgtacttcccgaaaatggatccggcttagtttaaaagcaaagagactaaccgccaaaagtcctaaaagtacccatgtattataggtgatcatacttgcaaaagtaaacagaagaaaaaatgccagcttggtggtacctgtaagcttatgcaccacactttccctgggaagataatttaatactgtcttagcagccatgactgcgcacctccctgtccgtctctataaatcgttctacaaaagcttctgctggagtgatcccacaccggttcgctaatgtaaaaagactggtttcctttaatgctgccttttgtatcagctccggatcacaaagaacccctgccgcacttctgtctgcgatcagctgtccgttgcaaaacaccagggctcttggtgtatactccagcatcagatgcatatcatgggtgatcatgatcacagttacaccttgtcggttcagtccccgcaaaaattccataatatccgtgtaatgtctgaaatcctggcctgccgtaggctcatccaggatgatcagtcttggatcctgcaccagcacacttgctatagtcacccgcttcttctgtccaaagcttaatgcagaaaccggccagtttcggaaaggatataagccgcagatcttcagggtagactccaccttctccctaatctgtgtctgatccataccacttccctgaagtgccaaggcaacctcatcaaaaatcatattcttagaaatcatctggttaggattctgcattacatatccaatatatttggctcttttccggatattttctccggtaatgtcccgtccttcaaaaagtatcttgcccttctctgcctgttcaaagccgcagatcaccttggacagtgtagacttccctgcaccattctgccctacaatgctgatcatttccccttttccaatagaaaagcttacgttatgcagtgtctgccgctcttttgtatatccgaaattcagtccctctacctgcagcagaacctgcggatcttcatttgactgtggctgtgatctggattcaaaccagtcagaaatcttccggatgtcctgttcgtcaagcactgtatgatccacatgagaaggcctcttctgtggcgtgatctgaacccccgcataccgcatggcggttacatacaaaggctcacggatcccattctccgccaaaaggctggtggcaagcagttcatccggatgcatatccgccaggatcttcccttcattaaccagaacgatcctgtccacattccgccacaaaacatcctccagcctgtgctcaatgatcagcacggtagtatctgtcttctcctggatctcatcgatcaattcgatcgcctgcttgccagtagccggatccagattggccagcggttcatcaaataaaagaatctttactctgtccaccatcacaccagccagagaaactctctgcttctggccgccagataattcatggggcgcatactccagatgctgccggatccctaccagatccgccacatgttctgtgatcttgtgcatcttatcctgtggagtgcagctgttctccaatgcaaatgcaatatcctcccctaccgtcagaccgataaactgtccgtcaggatcctggaggacagtaccaacatgtgcagaaagttcaaaaatactgctgtttggtgcatccacaccatccactatcagacttccggtgcactctcctggatttgagaatggattcagaccattcacgcaggatgccaacgtacttttaccactgccggaaggaccggcgatcaagactctctcgccaggataaatatcaagattgattccggtcagtgtaggctttttctgtgccctgtactgaaaggaaaaatccttaaatgaaataataggtttcttcagtttcctcatatgtatatacctcagttaaatgattcaaacataacatatttgattataacataaaaaaggctcttccacacccctaaagaatgtggaaaagctttcttcttgaaatctgtgcagttatccactgcactcacagttacaaaaactgcttaaaattagtatttctgatttttacgaagcgctctgtctgattattcctgatccagagagcctttctttgcaatagtcttggtatatgcgatcacaagcaggatacctacgatcacagctgtaaggatattagatacagcagcaaatgcgccctgtgcaaaaaccttgttggcaggctctgcataaataagaatatcaagaaccggtgctactacgatccaagctgccaaatgtgcaacaatattggaaattgcaaatgtggcaatcttgcccttgccaaaatcaccttcctggatatccagcttcttagcaaacaggccaactacaataccaacaaatgtggatgcaattacccagctccaccatgggctgccaccccatgacaaatcaatcaatgtatggccaatgaatccaatcagtccacctgcaaatggtccgtacatagcagcaagtaatgcaagtactgcatactgcagactgatatttgtgttaggtaccggacttgggatcgcaacaaaacgtcccagcacaaaaaacagtgctgcaccgataccaacagctacaactgtctgaatactgttgtttttcttcataactccgtcctcctggaaatgtaaaaatattttgtgtgtaactgtaatgatataaaacagttacttttgtctttactgtaaagacaatgttagtatactcccgtttttcggaacctgtcaacgtataaatccccaggcctgcagcagcccggggatttgaaaatttcagagaatactaaatagttatgctttttctgaattcttctgagatgcgaagtaggctctcagagaattgatcacgatagtaagtccaagaatgatcagcagtatggcaatgatcagctggagcccttctaccagaaaagtagcagaacctgctgtaattgccttcaccagaccaatcgtccgctctgccagcgcagtgccggttaccagaagcatgatgatcagcggtggaaacagcatcttattacttcttcctgtaaccttcataaatacacacaaggtgacaagcaccagtgcagataacagctgattggcagatccaaataatggccagatatttgcatatccgatccttgtcagaacgaaagctgctgccaaagtaaggatcgttgaaaaatatttattgcagaaaagctttctccatccttctgcatgctccatatcatccgtactgaaaagttcctggaagctcatacggccaatacgtgcaactgcatccaggcttgtcagtgccagcgcagatacacacatagtcataaaacactgcgccacgtaaaccggcacgccaaacatttcaaagaagcctgctactccactggaaaaaatctgaaatggtgtacctgctgccggagtgccatctgcagatgctgcagcaccggctacacaaagagccaggacagccagcagactttccagtaccattgcgccatatcccaccttcagcatatccttttcgttggcaactgtttttgaggatgtaccagaagaaaccagactgtggaatccggaaactgcaccacaggctactgtaacaaacaaaatcgggaacatatctcctagtgtatcattgtgaaatccagtaaatgccggaaggttcatagaaggatgtgctaccagcagtcccagagctgcacctgcgatcatacctataaacatataagtagtcatcgcatcacgaggctgttttaacaaccacataggtaatacagcagcaaagaaaatatatacaaatgtaatataagtccatgtatctttccctgctgttatgggaagcatcataccaatggccagtgcagcaactgtacagatcagcccggttacagtttctttccaaccatggaaatgcgtttttttctgaatcaaaccgaaaatcattgcaaatccaataaacagaagagaaatcgttccggcagctccatttgtcctggctgcatctgaaagagatgcaacaccatccgcaacaacataagcattaaaagtacctgcaaccatatctgcaaacgcagcaattacaagtaatgtgaaaagccagcagaaaagcagaaacagctttctccccagctttccgatatatttttcaatcaggagtcccatggatttgccatcattcttcacacttgtatacaaggcaccaaaatcagtaactgcaccgaaaaaaatacctccgatcagcacccataaaagcaccggcacccagccaaatacagcagcctggatagcacctgtcacaggccctgcacctgcaatagaggaaaactgatgactgaaaacagtccatccatctgttgggacataatcctgtccatcttcaaatttacgcgccggtgtttttgccttcggatcaatcccccatttgttggcaagccagcgtccgtacaacacataagcagcaactaacaaaactgcagcaactaaaacaataactaatgtattcatctgtctttctcccctctgtatcatacaggtaagataacggctcaatgcccttacagttaccagataagatacaattgatgtaaaaattaccattgttttagtcccaaacaattcaattgtcaatgcttttttgcgtatttcatcactttacaccaaaaaagagttaaagcaaaaaaatttttaatgatttttacaagctattttaacaggtttctctttcaataatatatggttccataagaacacatttttcctgtatcttttctttgcggatcagccgcatcagatactcaacaactgcttttcccaaagcctgtttgggctgggcaaccgctgtcagctcttttatggacagcttccccatgtcgctgccatcaaacccaagtatagacacctgttctggcacctggtacccatgtttgatcagtgcattcattgcacctattgcataataatccacgcagccaaacactgcgtcataatcaaacttatcctgcaaaagcttctccacactgtccattgcgcatttaacggaacgctctggcagaatttcataatgaatctcatcagataaaccggcaagctccattgcctttttgtaccccagaagccttttccttgaaaaatcgaaatccaggtcatatcctaaaaacaaaattttcctgcggcctttggaaagaagatattctgttcccatctgcccacctgcaatactgtctgactgcacagtaagaaatgcttcgtcagccgcacgatcaatacagacaatcggtatctgtgcgttccggtagctggataatacgttgtttccactacccatcaggatcagaccgtcaatattccgagccagcagtcttcgcagattctttttttccttttcagggctctgatcagaatcacatacgatcatacaatagccgtacttgcagattgtatcttccatcacacgaagcacttcaatggaataattgttttgcatatcccacatcacaacccctatggtttttgatagatttgtttttaaaccgctggccagaagattgggacagtaatctacctgcttgatagcatcctgtatccttttcagcgtttccgggcggactgttttcttgccgctcagaacataagatacggtacttacggaaaccccggcgatctcagctacgtcttttaatgttgacatatcttcactccagattatttctaattttatgaaaagggcacccaatgtacttggcatgccctttaccgatcaataactatatcatcaacccttgcttctatcaaagatttctgcgtctgctaaaggacctgtggaaatctttcttggctcttcattccatactttgtcattcatggtaaggttctcaatatcttttatcagatccagagatccgtcatggaaaccgccatcataaggggtgttcaggaaaatctcaagcatctcaatagcttcccactcaccaatggtctttccacccatgcacagaatatttgcattattatgacgtctggtcatctcagcctgatactgtgtactgcatagacctgcacggatgcctttaaatttatttgctgccatgctgataccgataccggttccgcagatcagtacgccgcatcttgcctcgccggaacgaactgcatttgccacctttgctgcaaaaaacggataacgggttgcctcaatatccggattatcatcagatccacaatctacataaggaatcccttttccttccagatactcgatacattttgatttcaaataatagcctgctgtgtcatttccaagatatactttgtctcccatatctgtgtcttctcctttatatttaataatgccaatcccttgctgtcagtatcttccccggcattctcttatgactctgcgtggatcagcttaacctctttgcccaggaatttacaaatcccatatactgcagtattgtgatcttcgtgatgttccagtcctgatactgaaagtacgcctactacaccaacaccatttacatagataggaaatccgccgcccatcatactgtactcatccggatccagatgtccatccacaaacagatcatcctgccctacagacttcatataatgaattcgcagcgtgcttctgtgtatcatgtttacagaattgatctttctctgaagccagatctcattaaatccgttggttcctgcaaacccatacctaaaaacctgatacccattgatctgaatatcgattgcaatgggtagcttatcctcttttgcctttttcacaagaatctttccaagcttccatgcatcatcattatcaaaatgctcaaatcgaagctcctcttcctgtttgcagagaatgtcatatttttctttatcacttaattttcccatatcaatcctctaattctactccgtattcttttgccagtgcctctttcataacctttgcattacagtcacggccggaccagaatttaaaactgatcacagcctgattaaccaacatgccaagaccatcaatagtctttgcaccgttcttctttgcctctttcaggaacattgtatgtggatggttgggaatcacatcacatactaccatctcaggctttacggtagcataattaatatctggtttctgatctacattcggatacaggccgatatttgtaacatttacaagaatatccacatcttccggaacatccagggtatgatcccagcaaatgtattccgcattggcagatgttttctcatttacaagctttaccagttcctctcctctgccagaacctggacggttggcaataaggatcgtctctgcacctgcatttgcaagctctactgcgatggcacggccggctcctccagctcccagcatcataactttcttgcccttcatctctacattttcatcctgaagggatttgataaatcctttaccatctgtgttctcgccatataattcaccatcttttacccatacggtattaacagcgcccataatggctgcatcttcagccacatggtccagatattttaatacctccactttatgtggaatggtaagatggatacctttcatattcaatgctggcagtgctttcattgcattctcaagatcttccggttttaccagaatggtaagataacggtaaggaatccccaggtctttaaatgctgcctctgccactactactgtagggttctcgtcgatcggacacccaaatacacccacaagctcttctctatatgatttgcccataaatattctcccgttttttcaaaacaccggggatgtatctccccggtgttgcattttgaacgaattacttactcagcgtctgttgtctctgtctcttcctctgttgttgcctcttcctctgttgttgcctcttcctctgctgttgcatctgcatctacattatcagctgttacaagctcaacctctgtaccgatagaagcttcaacttcctcgccagctgcgatctttccgcaaacctctactgcagtctctcccataagagccggaagctgacgaacagttgcagcctgtgtaccagccttgattgcatccaggttatctgcatctgcatcaaatccaacgataacgatgtcatctctgtctgcctgctggcaagcttcgatagctcctaatgccatctgatcattgtggcagaatacagccttgatatccggattagctgtcagagcattctccataacactcatagcctcagaagaagaccagttacctgtctgagaaacaacaacttcaaatttgtcattgtcatccataatgttgtggaagccttctccacgctcgttggtagcacttgcaccagcctggccctggatctcaacaacctgtccgccatctggaagctgatctacgatgtactgagctgcgatctcgccgccatatacgttatcagatgcaatgtggcaaacaatatcaccactgttggcagcacggtcaactgtaacaaccgggatacctgcatcatttgccattgcaacagcatcacctgcagcatcggaatcaaccggattataaacgataacatccggattctgtgtcagcaggtcttccatgtttgtaacgtcctttgcagcgtcattaccggaagaaagagagatcacttcataccctgcatcttctgctgctttcttgaaagcatcttcaagggtggagaagaactggtttgtgttatcagataacataagaccaagtgtaagatcctgtttctcgtcagcaaagactgcgactggtgtcactgttccaagtaccattgctgcggttaatgctcctgcgataagttttttcatttttttgtcctcccatgacattatatattttatacagcttctgctgcataagtacggttttatataaatttctattgaagtagcgcaaaatttacttcgtaaatattcgggtcccttcaattttgcttagttgttactttttctgtccataagtacagctgccaggataacaacaccttttacgatggtctgccagtagctggacacattcataatgttcaggatattgttgatcataccgataataatggcaccaacaagtgtcattgcaatgcggccttcgccacctcgtaaggatgtaccgccaacaacgcaggctgcgatagcatccatctcatagctttcacctgcagtaggctgagcagaaccaacacgagcacacataactgcacctgcaagacctgcaaggataccacagatcacatgacacattaatttgatcttgcgtacattcaaaccggaaagataagcagcatcctcattgccacccactgcatacatatggcgtccgaaagatgttttgttctgaacatagtacacaacaataaatacaagtgccatgatcagaaccggcatgtacaggaatccaaaaatcctgccagatccaaggaatttaaaggaagcagcacatgcaccctttgacattgctactgttgcaccatttgtaaataccagggtagcacctctgaatacagacagtgttgcaagtgttacgatcattggctgcagatcaaagtatgcaataaacacaccattgatcagacctgctacagcaccgatagccagtgttgccagaataacaacaaccagcggaacatctctgacaaccaaagcggctgcaatggcaccggtaaatcctacaactgatccgatggaaatatcgataccgcccaggatgatggcaaagctcacgcctgctgccagaatcgcattgatagaaacctgcttcagtacgttggtaagattaccaacagaaaggaatctgctgctgatcagtgagaaaataatgatctctgccagcagaataataacctggcgataattgtttataaattttaatcctttatttgttgtcttgctttccatttctcttgttctccctttaactaagaatcttatccatgatcttctcttgtgttgcctcttctctgctcagttctccctttttctgaccttcatggagaatcataatacgatcactcatacccagaatctccggcatttctgaagaaatcataatcactgcttttccctgcctgcgaagttcattgatcagaagataaatctctttctttgctccaacatcaatacctcttgtaggctcatcaagaatcagcaccttgggatcagacatcattgcttttgccagaatgaccttctgctgattgccgcctgaaagatttcttgttttttggaaaacagacggtgttttgatacgcatctttttcacataatcttctgcatattctctgtcttttttctcattgatatgaccgctgctggtaatcttgtctgatgaagaaagagagatattctcctttacattcatgatcaatacaagaccgtcaccctttctgtcctcagtcatataataaatgccattcctgatggcatcacttgggtttttgggatggatctgctgtccgtccagctccacggtacccttgtcgtaatggaaaacaccatataaagtcttggctagctctgtacgtcctgcacctacaagacctgccacacccaatacctcaccggccttgacatcaaaagaaatatcatgtacataatcattactcagattcttcacggaaaggactgtcttaccaggcttcattgcctcataagggaactgattctccagcttacgcccaaccatcatgctgatcagttcatcataggtaagctctgaaactttcttctcaccgatgaatgcgccgtcgcggaggatggtggccctgtcacagatctcaaaaatctcttccagtctgtgggaaatataaacaactgctttcttcctgtccctaagatcattgatgatcttaaacaggctgactacctctgagtcggtaagtgcatctgtaggctcatccataacgatcaccttggtatccaaaagaagggccttagcgatctcaaccatctgctgttgtgccacagataactcacagatcttctgatcaggcttcagatctacattcatggacttcagcatctctgctgtcttattgtacatctgcttaatatcgatcttgcccatcttattcttaagctctctgcccaggaaaatattctcatatactttcatcttaggaatcagattaagttcctggtggataatggaaatcccgtcatcctgtgcctgcctggcattggtataattgatctcttttcccttgaactggatagaaccggcatcacgctgatacactcctgtcaggcatttcataagtgtacttttgcctgctccgttctctcccagaagtgccataacctcgccttcacgtacttccagatccactccgtccagagcctttacacctgggaactctttgcagacaccctttaatttcaaaacaacttcgcccatttgtttctccttaattattctttataaaaccaagatacccggtcttaaaatatgctgccctttgtatgttacatcttcgtatacccagctgcctgtatgagagatcacttccggcttcccgtctatcacaataaaagtatcctctgccttaactccggcaatagtaggattccaagaaaaagcctgatgctccagtactgtctctgtattggaaaagtctgtacaataatccctggtaggataaccaagagcgccgccctgatggtgaagatggaaatcttccccatatccctcttcttcataaaccttcttaccagcctccagtacatccttggccttaacaccgggtactgtagataaaatatatgctgcatctactttaagcactgcatccagccgtttcttcttgtcctcatccacctggccaaaagaaaccaatctggtaagagataccgtaaggccatatttctgtggacagatggcaaccatcatatatttctctacacgattgtctgtaggaatggggtggcggtatttcttaagacgttcatctgctgctaccagcgtaaccggcatctgatatccttttgcaaaaaaagcaccgttcaccataccggctacttccatctcagagtcacccttcttaatctgtcggcagcaatcctcaagaatctgtgctgcttcaggtccgatcatgcggaaacgggcaacctctgcatctgtaagcacgtaacgcaggtgctggatatctgttccaatatcctccccatagcatccattgtcgctggctaccttcttacctgccagatactgctccagaacctttgcctcactttcatgccaaaggtatgggatcaattcaaatgtaccatctgtcaactcctcatccattacacggtatctctcacttgaattacaaaccacataattctgttctgcagtgatcatgatcttggatgccgctggtcctgacttatctacaaaagcactcttaccaccggtaatccagaaaaaattctcgttcttagaaagcaggaccacatccaggtgcttctccttcataagtcctctcactctgtcaagcttaacctgaacttcatctgttatgttcactctctactcctcctctcttataagcaacctgcgtaactgcgaaactgcctgatgccttagctgttataagacaaaagcacatctggcggctactaatttgcacaataaatacttctatcaatcgtttgactatgtactgattatataaattttattctcttttgtcaatcgtttgactttaatttttatcaactttgtgtaagtaacacaaattaaaaaccgcatatttagtaattaataccaaatacgcggtttcatcattaagaggacgttatttttaatgattatttttaatgattgtattttctgtaaaaccaacggcatccatagccagaaagatgatttcctgctgcttccatggtcatgccgctaagcaggtctgtatatttcctgccttcatccattggcatccatacctcatccaattcatactcgctgaaattgaaatatgcacggatctcttccccgtccaggtaacggccgataccaagcacatgggaatagcctgtgtcaaatgtccacacatccgcttttccgttaaataccggatgctgatcacgaatctcttccattttgcggagtgtatggaaaatctccatggaaaccctgtaattcttatctgtttttttcagcttttcccactgaaattttcccctgtgcagataacggctgtctgcacatttatcaggattttctttatagctgtagtcattcaactgaccaacctcatccccactgtagaggacgggaattccgctctggatcagaagatatgcatgcagcatcagatcacaagcaactgcccgtttcactttatccggattgttttcgtacaaggcagtctccagtccgcacaaagaagcagttgttccgcacagccgggcatcccccagccttggatcgtcattataaagctcacctcttgcatctgagtcataccctcttccggtaagcacatcgttcagatactttttatgtggcacttcctcaatgccaaactgcttcagccaatcatagtccagtccccatccgatgtcatcatgacatctaagataattcaggaaaacatattcctttggaagagcacatacctgatccatctgtcttctaagaagtcccacatcctttgtggcaatggtattccaggtacttgccatagttgtaacattgtaaagcatatggcattccggtttatcaacgctgccaaaataaggcagtaccttggcaggctccatcaccacttctcccagaagcagtactcccgggcatacaatctcactaaccaggcgcatcatacgtacaagagtatggacctgtggcagatttctggattttgttcccagttccttccatatatagggtactgcatccagacggatcacatcgattccgcaattggtaaggaacagcatgttatccaccatatcattaaataccatgcaatttgcataattaagatcccactgatatggataaaaggtggtcatcactacctggttgcaatccggcagccaggtgaaattcccaggtgcggtggttggaaaaacctggggtgttgtttcttcataccggttgggaatatcccagttatcataaaagaaataccggcttctggcctgtggatctccggctcttgctgcttttgcccaggcatggtcttcactggtatggttcattacaaaatccagacagcagctgattccctgctcatggcataaagaagtcagctccttcaggtcttcaatggttcccagctccggctttacctttctgaaatcagccacagcatatcctccatcatctctgcctttcgggctttccagcaaaggcatcatatggagataatttacaccacaggattttacataatccagcttttcctttactccctgcagcgtacctgcaaatgcatctgtgtacatcatcatacccagaatatcattgcctttgtaccagccgggatctttctcccgcttccggtcaattttccgtaatggcacagggcgttccacataattctgatacatacgctgtatcagataagcaaagccttccttttgtcccggatacagctgctcatataaagatctcagttccgcctcccggcattcatatcgatttctaaattccggtttccacttcatagggtcagacatttttcacactcctgtttcactggcactttttttgccatcaaatctttaaagctgcatcccaaggctgtttctcagttaccacaggcttataaggatcagccattgcctcttccattttcaggcacagatacatatcctgaagcgcatctgcaagagagtagatctcttttccactttttacatactctgacataccaaggagcaggcttcctacagcaatctcatcatcattcagtctggcattaacaaatggtgtcttataaaggaatttttccccaagcataatcgcaaaatgggaccactcctgattaccataaacgccaaggtcgatcctgttcagatcctgtgttacagggatattctccggtgtaagataacgaatggtaagatcatcaatctctcctctgtctccctgaacggacagctgacgggtacggataaaggaatgatactgtgccggatcagaaaagtcaaaaaatgctacctgtccgttttcaaattccagagtcacacgatctcttgggcatacaaaggtttctccgtcaaaagccattccctcacggccataagtctctgttacagagaaatggtatcgttttccgtacatggtacatttctgcccctttgtgccaagcatccagcggatcatgctgattccgtgatagccatgcaatgcagaaatattaatgttttccacatttccgatcagcttcatgtctgcaatggctttatgccaggatgcatataacggctgcaggaaatactgctctgccacctggattttaggctgatacttctcataagcactccacagcttctgcagatcctcctgactttctccgggaggtgtttctgtaagtacaggaatacctttttcaaacagttcaagcaggtaatctgttacgcagccacgcttgattgccaggacaacaaactccggtgcatccttcatcagcgtatcaactgtatttactactttgacgccaaatttttcactgaactttctgcctttttcctcatctcttatcagaacagctgtcagatcaaatttttccggaacagcttttgcgatacggatataaaattcggcacgccatccggaaccaattaccgcatattttacttttcccattttatgtctactcctcttttcgctcaggcagcacaaaaagggacttctcccttttcgtactatcttattctgtacaagaatctacgatcacggcacatcaaatccacgggatgcagccaggatcgcataccactcatcataggtaagttcaagcttcagtgcatccactgcatttttcacacgatccaggttcatggttccggtgatcggcatgatcttagccggatgacgaagaacaaatgcatacataaccacatccatgcttacctgatgtgcttcagcgatcttctggatctctgtgcgaagacgtacagactgctcatcctcacccttgaatacgctgccgccgccaagcggggaccatgccataaggcctgtctgattcatctgtgcattgtctacaacaccgttgaagaagttgtatgtagcttttacagagaactccatctggtttgcaacgatcttaaccggcagatacttctgaagtgcttccagttgtgctggctcatagttggatacaccaacattaagagcttttccttcttttacgatctgtgccagagcctcagcagtctcctgtgggttgctcagcacatccggacgatggatcagaagaagatctacatggtctgtacccaggcgttccagagatgcatccatctcagccaggatattttcctttgtggaatcataataaatatgggaatttcccttctgtcccggtaaaataatacctgcttttgtaacgattttcattttgttacgaagagaaggctcttttctaagtacctcatctccgaaaattttctcacatttgccagctccatataccggtgcatggtcgaatgtatcaatgcccaaatccatgcagccatgaacgaaagcacgaagcttatcaccgtccatccccgcatccagtgtgcgcatgcaacctgcaataatgcggctgaattccagtttttctgtcagtgcgatatgttccattatattattttcctttctactaaatagtttccaaaaatcaacctttcataccaccggttgtcagacctgctacaatgttcttctggaaaataagtaccagtgcgatcaaaggcagtgtgcagacaatggaagctgctgccatatctccccatggcagctgatagttgcttgggaaaagagcaattccaacaggtactgttctcattgcatctttgctcataaatgtaagtgaatacagatactcattccagcagttgataaataccagaagtcctacagaaaatgtagccggtttgatcagcggaagcatgatctttacaaatgtctggaaatgactgcatccgtcaattgctgctgcttcctcaaatcctttttcaatctgggagaagaagttggtcatcagccagattgccattggaagggaaaatccgatataggtaaggataagtccctggtaggtattcagcaagttcatatttttcaggatcaaatacagtggtgataatgttgcgatagtagggaacatggatactcccaggatcaacatcagtaagacagccctgcctttaaaatgaaggcgtgataatgcataagcagctgatgcgccgataagcagactgagcagtgtggcagaagttgccacgatcagactgttcagcatatatcttgcaaacggatgctttgtaaatacatttacatagaactgtccatgaaaatagcttggaatccatttcgcaggcatctctgcaatctcatttaatggtttcacggaagtcaggaactgccagataaaaggaagcagcagtaaaacaacgaatgctgcaacaaatatataaaatgcaacccatcctactgtacgttttgtttttttactcataaatacacctctactctgcagtcaaatctttcttcaggaagcacatgtaaatcagactgattccaaatacaataataaagatcagaatggcaagtgctgaaccatagccgaaattcaagaaggtcatcagctgcttgtatgcatacatggcaacactctctgtaccgttggcaccacctgtcaatacgcttacaaggtcgaatacacggaatgcatccagtgttctgaacaaaagtgcaaccaacaaggatggctttacgataggcagtgtgatcttaaaaaatctctggaatacatttgcgccatcgatttttgctgcctcatacagtccttcgtcaataacctgcagtccggccagaagcagcagagccatatacggtgccgttttccatacatccgtgatcaccatagccataaagcttccgctccttgtgctgagccatgctttatatccatcaatgataccaagtctgtaaagaatatcattaaacataccatactgatcattgtagataaatttccacatcatagcagatacagatgtgggaattgcccagggcacaagaatcgctgcacgcaccaggcctcttcccttaaatgcccggttcatgatcagagctgctgcaaaaccgatgatcagctccagtgccaccgttgcaattgtaaatttcagtgtgaacataatgtcctcaccggcacggctgtcggacaggatctttgcataattttcaagtccgatccatggaaatcctgtctgtggccttttcaggttcatctcatgaaagctgagccaaaaggtacgcagaatagggtatccctggatcagtcctagaacaacaagggcaggtgcaagcatagcccatgcagttcttgcctcctttacctgcgatttcatctttttcgttttcaaggttttattcctccattgcctgtctcaaaaacagggctgccgcaataaacagccgctgtgaataaatatgctttttattcgccagtgcgtatttagtgcagcagccccggtaataaccatcttgtaaagcggacattcgcaatccgctccgctacttgctcatgaacgcggtcgctttgcaatctgcgttcaaaatcactttccggtcagacttctgtgattactgaagtccttctgcctcttcctgaagtgcgtttaatgcgtcttctacaggtgtctctccagtcagagctgcatgtacgtttctctggattgaatcagataataaggagtaatccggagaagatggacgtcctttaccattctcgatgattgaatagaaatctgtgtagaatgggatctgctcaagtacatctgcatcagagtaaacagcttttactgtcggcggctgagaagagctgaggcagaatgctttctcttcttcctcagaagataaccatttgataaatgtcttagctgcttctttgtgctcgtcatcaatgtatgtatttacagcaaggtcaagaccgccaaggcagctgtgtgctgtatcgccttcattgtatacaggaagcattgtcatgccaacttttcctgcaacttcagactgctctgcatcgttgaatgtattccatgtaccggaccatgtacggcatgtaagagctttgccctcctggaatacctgctgtgactcggtctcagcatatgtggttgttccttccggagcatatgttccaatgtaatcatgcatcagctgtgtagcatcgattgcttcctgtgtgttgcatgtaggatttccgtcctcatcaagtacgcttgcgccgaaggatgcaaggaactcaacccagttgcaaaccatagcctcgctctgtgctccctgatagcagaatgcataatcaataccagaatcctcgccaagcttctcatatacatcgatccatccctgatatgtggtaggaacttctgtaattcccagatcctcaagtacatctgtacgatagaacagtgcagatgcgtttgtgaaccatggtgctgcataaagcttaccatcgtattttgcgccttctactgtaccatccagatatgcgctcagttcatcctctgtgtacagatcatccagtgcctcgatccatccggcagatgcaaactctgctacgtaaacaacatcaagtgccataacatcaatgctcgtatcctcagataccattttgtttacaaaatcatcatgaaggttgttagcgtcctgtggaagatgataggactgaacctcgatcttgtcctggctctcgttgaatgccttgattgcttcttctgtaggtgtgccaacaccctcatcaaaagcaaaagtaagtgtgatcttgtcgccggatgcgttttcctcatctgcaaagacgaaagcagactgagatgcagtcatagctgcgatcacgccaagtgctgtggctcttcgtaacattgttttcttcatgttatatcctccttagatatatgatattttatcttgcaccctttcgggaacagtttcttaagtatttttctgaaaaaggccgcagtttccctgtaggaaagcgcttacctgttttctgaaaaagtatcctgcctgataacagctgatgttacaaagcaggatgcctgtgctcatcagaaatgaacaaatctttctatattattactgcttaactatgatacccttggattatttcatactttataatcttacaattcttgtatcatcaaatctttttaacgctgaatctgcggatgatcttgtgaggaacatatgtaagtttctcagtggttttctcctggttttcaatcagggaaaacagctcttcagccgctttcttgccctcatcataataaggaatccgtaccgtagataatgcaggggttacatacatggaaacctcagaatcatcaatccccataacagaaatgtcttccggtaccttcatgccaaacttggcaatgcaagcctgagcgccaaccgctgtcatatcacagcaggcaagcacagcagtaggaagcaccatgctttcctcatagatccgctgcatagcctttactccactatcgtaggagaaatcaccgatggtaatataggactccggtatctccagtcctaacttatctactgcctcgcgaaagccctgaagccttaatgtcccagaagaataatcctccttaggtccactgatataagcgatgcgcttatgtccattggctgccagaaactctaccgcatcgatcacagctttcttattgtcatggatcactgtattgatctttgtttttccgtcagaagcctgctgagtaagaagtaccacaggaaaatccagatccagcatccatttcacacggtcactgtcaatgttcacacctgccagcaacactccggatgccctctgctcctgcattctctcaagcagcaccttctctttcttcctgtctccgtccgactcacagatcattactgtaaagcctttcttctgacagacacggttaattcctttaatgcttgtagaaataaccgaattagaaacgtcccgcacgatcacgccaatgatattggacttatctgttgccagtcctttggcaaatgtattgggtttaaaccggttcctttctaccgcatccagaactctttgtttcagttccgggcttaccgcctttgtatcgttgatcactcgggatacggtagcgatggaaacctttgcctcattcgcaatgtcttcaatcgtaactgccatgccttattcctccgcttatcaggaaagccctttccttgattaagaagttatcactctttcctgtttctgtcaataatattctaagcttttccttactttctgaccgttttcgtcactatgcatagttttgaatgtttgtttttggatacttttctggcttttcctgctgttttaggtaagcgttttcttagctaaagccttctatacttttctgtacacttctgcaatcctgccggaggctatatccttatttctaatcttcctcgctgaacagctccggaagcagcggcttcagtgcccttctgtgtaatcctacacagacgtaggcaggacaggaaaaccagaagagaagaatcagcggcagcatacgcagcataagtgatacagacatcataagtaccgaaagaactgaagcagtgagaagtgtagtcaggatcaccaggggaaatttggccagggccagcagaaaactgtttttcaactcatctttattccatttttctgttttagctgcaataaatgctgaatactgaaagatacctgacaggatcaggaaaagtaccacataaatcccgcagaataagatacgtcctgttccttccatggttttcaaaacataattcacattaaagccaagcccaacgcagcataccaggatcacggtcccgattggaatcataggcttcaggctttttttgaacacctggaagaaccgttttgctgaaaaacaaccttcaccgtgaacatgcatttcattcatactgtctgtcatggctgcgtaggaggctcccatggtcacaaccggcagggcgcataagatgaagagcagattgatctctgccagttccagaaggatagtcataaatctaaacaacggggagtctgtgccaaaaaatcgtttcattgtcttttcctctcttcttgtgtattttcctgggcgaactattttataatagggtgagatagtagccaggaaagtgctttcctgattatcttatatctatatttatccaattcctggtatgttgtcaagccgtaatcttggaaaggattcatctgttgctctttttcaagaatgcatcaagtgactacttttctacacggtcacgttcgtagtcttcaatgaaaatggcgcagcctgtttaaagactgcgccatttcctgattggcatttttgggtttattacttttattgtttttattacttttattatttttattgttacaggtttattttgttcctttcatgcgtctgtcaatgtagtctgccaaaaaatccacacttccctcaagccctaacttactgctgttcaggctcagatcataagtatgggaatctgaccattttgatttacagtgactgtcatggtatttctttctttttctgtctttttctctaatgaatctttcagcttctttctcgctttttccgtaaagatgctgcacacgggctactttactttccatgtcaccaatgacaaagacagaaatcagtccttcataatctttcagaatggtttcagagcaacggcctacgatcacaaaagactggcctttctctgctttatccagaagaaagttaaactgcatgtttgccacattgtcggccggtgaactgctcatcccattgatagagcggtacagaaatttgttgtgcttcatttcgtcatattcctgaagctcctggctatccatattatgactggcagccacttcatccaaaagattgtggtcatacagcggcagtccataacgcttcgccaagcgctctgcgatctcatgtcctgcacttccgaactctcgtccgattgaaataattaactgcttcatcttctcttccctcccatcacggtaaataacgtacatatatcataaccatggagatcagaatcacaagtatagtcgccggagccatagatttgcaatatcttccccacttgatcatatgaccgctctttgctgctgtggcaatacccacaacattggcagatgctccgattggtgtggcacttcctccaatatcggttcccatagcaagtgcccatgcaaggacggaaatctcaattccctgtgtagctgccagactgttgatcactgggatcatggtagcagcaaatggaatattatcaataaatgcacttgcaattgcagatacccagatgataatggcaatcattactttcagattacctccactgacatttccgataaagccagccagcaacgtaaggattccggtcttttccagacctcctacgacgacaaacagtcctacaaagaacagaagagttttgtaatctactttcttcagaagatcaagtgcatctcttcctgctgtaagcaatgtgacaagagcaatgaatactccaatgcaggatacggtaagcccggtctgggaatgtgttaccaaaagaaccactgcacacaggaaaatgatccagctggtcacaaatccgcctttactggtaatagcctctgaaggatccggataatctgccggattctttgtgacggtattagatgtcagttcctttctgaataccagatagaaataaatcacaactgcaacaagagatacaattgcgatcagacctgtattggtcacaaagtcagaaaatgacattcccagggatgttccaatgataatgtttggcggatctccgcacatagtagccgatcctccaagatttgcacaaaaaatctcagataggatcattggcacagggttaaactttaatagttgggacagttccaccgtaacagctgccaggaacaggatcacggtaatgctgtcgataaacattgcaagtacaaaggaaagtaccataaatgtgataaaaatcgggataatctgatatttgaccatcttggcgatcttcatacacagccagcggaaaaatccggatttggccataccttccaccataatcatcattccggcaataaatacgatggtttcccagttaataccgccagaggattcactggcctgtccggttgtgtgccagaatgcttctgtgaaaaaggttttcaggttcaaggtatctataatcgcacttgggctacgcatacagataccaaaaataactaccagggtcagaagagcacatcctaacgtcacaatgtgtctttcccaaacttctgtaataattaaaatgaacattgccagaaaaattattacagccaatatctgtgatatcattctctcttttcctccatatatgtatcttggatatcattatcctttttccgtatacagaagatcagtgctttcttccatcctgctgatgtatatatcttatgatctgacttcgtccacccacattgcagagaatgcagaaccgtcttttcttttccatgtaatgaaaatttactaaaaaacagagtgccgccaaaatgatcaggcatacctcaatgctattcgtttgcaaataacgtcttgcctcttccaggaactcacaagcctggcgaaggccggacggctcttctgctgtgtcctgagtgctccttgcaagttctggtgacatcagtgaaactaaagccgggctctgtcccagacgtccaactgtttcggcctgcacatccgcaaagtacgcccctgcaatgaccataacgatccccagtgcgaaacatatgaacttttgtatggtaatctgcctgttcattgaacccacctctgtatcctgaaaaattgcttcgtatatcatagcacaggaaaaaacttgtttcaattcttttcaaaaggtgaaaacgctgaaaaacgagccgattactacggataaaatgaacagtattaattatttttcaaaaaaatgatattcatatagatttgtcagctgcttgcctgtcataacggcataagttttcaaaagagaagatccgcatcctgctgcgccaacatataaacccggatagcttacgatccttgtaggaatggttctccaccagctgtcataccaggttttctttcctggtgtacgatgatcggaatctgccagcagcacatctgctgtacgaatcatatattcatagaattcctgttctccggtaaactcatacatagcagcaaaatgctccagaatccctgcagttccgcagcactggcatctgcaattccaatatccccaggaatgtttctccggggcacctgctttcacgattcccctggaaagctcttctgtccaatttcggaaaaactcctctcctgttgcttcgtacactgccctgaatgccagagtgcttcctaccgggccatggcaggtgctaagataatatttatcatacgtgggtcctgttaccggatggtcctgatacgggatcaggcgtccggtttcatctcctacagaaatattcattgcatactccagacctgcttttgcaagctttagataatcttcccgttttgtgtcctgatagaggacagcaaacatccaggcagtccctgtggtgccatgagaccagttcggaaaggtagtctccttaggaaagtctatcatggacagatccaaaagcttccagaattttcctcccagtggcgcatccagggcgtcttttccgatccggtctgcagccttgcatgcaaaatccagatactttttaatccctgttctacgatacacatgatccagaaatacgataaatcctccgtccgctgtcacatcctcctggtcactccagtgaagcccttgctcatcctccactgctgcctcaagcaatacatccgccacataaagcacataatccctgtattcctgctttcctgtcacctggtacagatcctccagaaaataggcttcgcctacaggaccattgtatgagcctgccgcccatcctggaaccgggatgatcccttttacctctgaatgaagagtatcataataccactctgctcctacctttgttgccaggatatgagctactgcttcctgcgcttcttgcagccagcggttatccccggtagcttcatacaggcgaataaggaagatcccaatacctgcggatccgtcatacatactctttgatgtaaacataggcacatcctccctgtacccttcctgatcgtcaggcaatgccttccatatcctgccgtatggagtttttacagccagggtatcaatccattctgctgtatcaatggcagccttcaggtaattatctgcatggttctttttaaatatatccggataaacaattcttggattcatagtgtatcctccttatcaagccacttttatgcgttgtttttctatttctgaagattatcctatttttcatatcaagtcaatatgttttatgcatttgattataccgaaataagataatcaggaataggtttgggctatagcgcaaaaatcccctatacagaatcggctcagacataagtctgtccaaattctgcacaggggatcattatttcatatatggttatgtggatggcgccaaaaggccacgtatctgtttatactctgcttactcaggcaagaatgggctccaatgcttttgcaagcttatccttctctgcctgcgcctcttccagatcttttccaagagttgtgtaataaatcttgatctttggctctgttcctgacggacgaacgataactgtctcattattttccagtttataaatcagtacgttcgctgccggaagccctgtctcctctggcttctcatagtctgcaacgctgactaccttatagcctgcgatctctgccggcggatcctgacgaagcttctgcatgattcctgccatagtatccataccgctaagtccggggaactcaaagctgtcaaccttattcaggtaacggccatactctgcataaatttcctcaagtctctgcttcagggaacttccgatacttctgtaatatgcagccatctcacagatcagcatggaaccgatcacagcatccttatctcttacataaggtcctgccagatatccataactctcctcaaatccaaagataaagcggtctacttctcctgcctcttccagctgtgcgatctgatcaccgatccacttgaagccggtcagtacgttacgcatctctacaccataatgagctgccacagcatctgcaaggggtgtggaaacaatagacttcactgctaccggatccttcggcatagtgcctttctcaatacgtcctgcacaaatataatcaagaagaagaacacctacttcatttccgcttaccaattcataagaaccatccgggcacttcatggcgatacccacacggtcagcatccgggtctgtggcaagcatcagatcagcgcctgtcttttctgcaagattaagtccctgctcaagagctgcaaaaatctcaggattaggatagctgcaggttgtaaagtagccgttcgggtattcctgatccggtacgatggtaatatctgtaataccgatatccttcagaacctgtgtaacaggtaccagtccggagccattcagcgggctgtacactagcttcaggcctgcagtgctgcaaagacctggtcttacctgacgggactcaattgcttcataaagagcctttttacagtcatctcctacaaaacggatcagaccttcctctacaccctctgcaaaagacatgtatttcgcaccggtaagcacatctgtcttctggatctcttcatacacgatggctgcagcatcatcggtcatctgacatccatcaggaccgtatgccttatatccgttatatttcgcaggattgtgagatgcagttaccataacgcctgcattacactcataatatctggttgcaaatgaaagagccggtacaggcatcagtgcatcgtaaatgcgcactttaataccattggctgccagcaccccagctgctgtttttgcaaatacatcgctcttaatacggctgtcatagctgatagcaactgtctgggagccgccctgtgtctttacccaattggcaagtccctgtgtagcctgacgtaccacataaatgttcatacggttggtacctgcgcccagtacgcctcgaagtccggcagttccaaacttcagtgccacagcaaaacgctctttgatctcttcgtcatttccattgatctttgacaattccggtttcaggtctgcatcttccagatctgctgccagccagcgctcatattcttccttgtacatatcaccactcccacttttcattttgatttgaaattaactgcaattacaaattactcttaacaaactacatttaactgtaatataacatattcttgttcactcggcaactgcttgaagagttttacctcgcagtcctcgcaattgcctcacagtgctgccgtattttgtcagcgatcatcaatctgctatttttttcctgcatttctgtcatgtaaattatctacagctatgtcaaccaaatcagatcacctcaaatatcagaattttttccctgctatcttctccctgaaacaaatccctggtgtcaatttcatcataaaacatcagctgcccctgcgtcatcagaaagctgacatattcttctgatggataatagaaaaacagcagcatgcttcttggattcctgtaatatgattcatatatccttgcaagaacagaccgtaaaatctccaaagcaaagggattaaaaaaatagcatctgtccacttccgccggaacctcataattctcagcactgcttagtacaaaagaagtacggctgcctgatacggctgctgatctgtttgccgccgcttcctgataaatccgctcatcatactccacaccgatggatctgcatctggtctgataggaaaggaaaaagcatacccgccccttgccggtaccataatccagcactgtgttatttttcctgatcaatccactgttcgccagacgttccagtacagtataagcagtcggttcatagggatacctgtactggtcggaatgtgtgtcgtccctgcctgtggtttttatttttaaaagcttatcccattgcgtttcactttgattcattggtttcattctttcttggtttcattctttctcagtttcatattttcatattaattacaaaatcagcgtaagcatattatacctaatttaaatttataaccctgataaagtcctcattaccaaatctacatctttattctccaattcctgaataatatgcagatacgttttctgtgttgtggtcatactggcatgtccaagccttcgtgcaacactggcaattgatactcccgcaaacagcaacagcgatgcatgggtatgccgaagtccatgtatggaaatctctgaaatgccgcatctcttgcaatgtcttgccagcacatcattcacagtagaattataaattttggtttcatcaataaaaatcggtttattttctggcaatccctttgtcaattctgcaaatttcaccacaatctgccagtcaatctgaatctttcttaccgatgatctatttttagttggcaaaaaacctccatcacctttataatcccatgttttgctgattgacaatgtttgtctggcaaaatcaaaatctgagggtgtaattgccagagcctccgaaaaacgcattcccgtctttgcaaccagaagtataaaccagtcccaattaggttcttctttgatatcaagatcagcaatcagtgtatgcagttcaaattgatttaaatattttatctttttcgcccttggtgtttttcctttaataattgcttttctagttggatctctctcaatcattccttcatcaaccgcatccagaattgcacctttaagctgatgatgaaaatccagagttgtctgtctttcatgctcttttgcataatcattcagaagctgctgatattttgtccgcgtcagttcagacaccttcacctttggagccagtttttccacccatttctgggtcatcaaatattttgccatagttgcttctctgattgcacctcttttatacacttcaacccactgtgcataatattcgcaaaaaagcattgaatttcctgtatcactaagcataagcattctccttttccttttaattgcttacgctgatacatacatgtatataattaagtccacttcaggcagttctcataagaggttctatttcttcatcaagaacttttctcaattctgccatcattcggttataatatttaaattttggcaatggcttttcctgttcttctttgtaacctgcataattacaggtggcctttatctcattttcatttggaattactccgtttctataatggaccgcagcatacaaaacatcattttttgatgcataccaggttacacaaaaatctgaaataactttattcacacaatcgtgcttcatattttctacaatattgagaattgactgtcctctatattttgtatcatccttctcaatttccgtaatcaagtctgacataagatctgctatcttcacattatccttacgcagttcttccacatactgttttacttcatcaatcttcttttgtctttcttcaggtgttatattcccctcatcttctgacggattcacaatattctgaatcaggttgataatatactcataatcaattttcgtgctactgtatgccataagttcataatcctgatccactcctgcatcttccgcattctctgattgagtatctgacttatcatcagcgatctcttctatcacatttttgtaatgccctgcataatcatcatattcagcttctgttatgccatatttttcaagcatgctgtcatcatatcttgtaaatgactttaactgtgcaaacaggctgtcaaatgactgaaaaattttcgcaaaaattttcttttctttcaaagacatatttgcaatctccgaaggtgtcctggcacaaactctaagtgcagaaagtgctttccgaaatgcaggttcaatctcattccattctgacataattgctttttcggtacttccagcagaatacagccttactgcatcatccacgcattttttgaaaagctttggtgcctggaaagtaacaatctgcccatatgttttatttttgtcaaaaatacgatttgttcttgaaaacgcctgaatcaaatcatgtggtcccataggctgccggtctatgaatatagtggacatacacggcgcatcaaacccagtcagaagccggtctaccacaataaccagatccagctgttcatttctgcttttgaactttgcatcctttcttgccaagcgtttattcaaattgccattatatgcctggatctgggacagatcatattttgtattaaacattttgttataatcatccagcgacttctgcatcttctgctgattaacatgtgaactttcatcattttctgtcacagaatatgtgatggcaaatttaggaaaatcaggaagcacctgtttcattttctcattaattgtaagagatgtttcaccgtttttgacctttgtcagtaaatcataatatttctgtgcaatctgaatagagcttgtagtaagcattccttcataagtctgcccttttccattttgaaatcccagcttataaaaagatttgttcaaaataatatccaaaacctttaacatatgcgcttcattaccatatgcattgctgtctgtctcatcttcaatatttttaggtccattgtgctctacttgaaatcccagcacagcattatcgtgaattgcattttgtatcgtatatctatgaagacagttgccatacagttctaccgttgttctaggtaaatctcccatctgtgggtatggattgtctgcaaatctgggagttccggtaaagccataccataaggaccttccaaaaaatcgttctatttctctttttgtttttggtgcaaccgctctgtgacattcatctactacaaaagcaatcttcagattcctgatttttctatattctgctgttccctcctgcaatctcttgctgatcagaatctgcattttctgaatcgtcgtaacaataacctggcgatcatctgatttcagtttctttttgagatcatttacattttctgttgcatcaacatctatcaaatcattatttgcatacgcctgaaatgccatcgttgtctgcatgtccaaatctttacggtcaatcagaaatattgctttatcaatagctggaatatccatcaacaggtttcttgtggctttataggatgttaaggtttttccggaacctgtcgtatgccatacaaatcctgacttgctttccttagatgcttcacgtatggattcaatcgcatgaatctgatacggtcgaagtaatatcagccttttcgcatcttcatccaagactgtatattttgcaatcatttcatgtgcttccggaattcggagcacgctttttgcaaactcaagataatctgacaccggattattgtctttatccacccagccactcataaattcaggttttaattctgtatcactggccgcagcaaaatacttggtgtctaccccattgctgactacaaacatctgaactgctgagaaaatcccagtaaactttccctcgccaatgtatttctttatctgtctgaaaccatccttataagaatgctgcttatttttcaattcaatatgtatcataggcagaccattgatcatcaatgttacgtcaaatctgcggtctctccctgtacctgtagtatcctcatccgttttcagtgcctcatactgattgatcacttcatatacactggtgccaccggctatatgctcatgattcattacaaccagatgtagcctttttgtatcacgctgcacatgaacctgcacctttccgttttcaccaaccagccactccccggctttataaaatgaagaaaattgcaactggttcttgacctgctcaaattcagaatctgacagactttctccatccagtctttctttattattctgctcaaggatatatcggaaatttgcccacaaatcagcttccgtttttaaatcccctctgtatgtccattgagaatcgccgtaaattaattgttcaatcagtttttgctctatcattgattctaattctggcataatttccttctcctttgtattattctcgcacatcatctttttaaggcatatttttttcagtttttttaagttattcagctggcgctggtgaagagtgatgagcctttctagctcttcaaaatactttccaattttctcctgttcctcaatatcttgcggtatcatcagctccgtctcaaagaaatccgcaggtgcaatattcaaaagtccatgatttctcgctccttctgcagcaatctcatgaatacctttatgccacaaatttgtgctgtagtacgataccaagaaatcggaatctacaggatagttttcttttattccaaatacgatataaagcgttgataatacgccattttcataacgatccagccttttaatagctccccaaggagcatctgttgaagtacttttattgtaagcgaactctccattctcaatcagatagtaaccactaacatctttacttgcaactctcttatcaaagaattcattctgatcaataagtccatattgagccgatatcgtaagcggtaactctgagactaaatcttgattttttcttgtaacacgatcgactaaatcacctaacttacgctgtttccaatcgaagtatcgttctctacaaaaataatataacttacactggtgaagagtgatgaggtggtcgagacttctgaaatagtctccaatttttttctgttcttcaaatctagggcatgaaatagggatttttttacatgtttccttattaagttttggcattgccattcctgtattgtattgtgtatagtcttttcgttctaatgaattgcaaataaaattattttcattttcttgctttgtacgaagaacatgagcatggttatttacccagtattttccgcttgccagaaagcataccggataatttctgtcggtaatattggcaccatcttcacttaacaatatcaactcttcatcgaacaaatatccatctacataatcaacaattccagaggctccataatatggataaggaccaggaatgcgttttgcaccttctaaaggttttcgcattgtatcaagaaattcaactacatcatctaacttacgctgttcccactcatcggtataacctttaaatctgatcttaggttttcccataattatacccccatctccctgagcaaatcattcaacagcgacattgttgtttcatcagttgacgtcaattctttaagaagtgacgcaaactctccctgcacctgttccagttcatcatcagtctttttcatatctgataatagtgcggataaatcaacctcttcttctttttcaaaattatcaacatatcggggaatattaaggttaaaatcattcttttcaatatcctcaaagctggctagacaagcctctttttctacggtttttctttgacgatataaattaatcacggcattaatatgttcatcagtcatttcattttgcttcttgcctttgttaaacttcttagaagcatctataaacagtacatcccggccgtctctatgttttttcagcacaataatacaggtaggaattgatgtattataaaacagatttgcaggcaatccgatcacggcatatatatttccggagcgaagcagtttttctctgattttgccttctgccgcaccacggaaaaggactccatggggcaatacaattgccattgttccattacttttcaaatgatacaatccatgaagcaaaaatgcataatctgcttttgattttggtgccaatacaccgtaatcgctgaatctttcatcctgtaaaaagccagctgctgcactccaatttgctgaatatggtggattcataagaaccatattgaaatcagtttcctcatctgtaggccaatccccatcaagagtatctccattatttaaatgctggttattcggatcaacgccatgtaaaaacatgttcatcctagccagattgtatgtggatgtattcatttcctgcccataatatttaatgtatccaggtgcggatgaatacttctttgcattcaaaagcagtgaaccggatcccatacaaggatcatatacagacaatcctgttttatcttcctgtcctgcaatggcaattttagttaatatttttgacaccgcctgtggggtataaaattctccggctttttttcctgtttcagatgcgaattgtccaatcagaaattcataagcatttcctaatatttctgcatctgaattaagcaaatctgccttatcaatttccttaatcaagctggcaaccgtatcactttgtttttgatctcctgttcccaggcgattggaatacaaatcaatatcagcgaacaaatctgcaaatatctgatcactctgctcaatattattaaatgccttctgaagctgttcacgattaaacgaattgtttctggctgcatcggcaaaataagtatatgtaagttcaggttcaatcacgtaatggtactgatcttgcatttcttttttcagttcttctgcatcttccccttttaactcttctacataagcatccaatgcttcctttaatgtttgtggacgggcatcgcaaatcagatcatatactttgataagaaatgaatccgataaatatttataaaatacaatgcccagaagataattcttatactcgtttgcatccatcttggagcgaagtatatctgctccactccataacacactaattaaatccttgctattctccacctcagccattttctctcctccatcatacgttcataaaattaatataaaacaaatataacatatgtctactgaacatttgcacttttaagttgttttcaaaatcacaaagatttcttttgcagctgtttttattctatcataatctgactagttattcttcatattttttcagaaccacttcggaccctaaaatgaactaactgcaattttatatggcagattctgtcttttttcgctataataaggatgttttaataaaatacttgcaaggatgggactgacacactacagccccttcagaacggaggaaaaatggaaatcgtatgtttagatctggaaggtgtattagtaccggaaatctggatcgcatttgccaaagagaccggcattccagaattggagcgcaccaccagagatgagccggattatgataagcttatgaaatatcgtattgggattctgaaagagcatggtcttggcctgaaagagatccaggaaaccatcgcaaagatcgatccgcttcccggagcaaaagaatttctggacaagttaagagaactgacccaggtgatcattatcagtgatactttttcccagtttgcaggacctttaatgaaaaagctgggatatcctaccattttctgcaactctctggtagttgcccctgatggtgagatccttgattttaaaatgcgctgcgaaaaatcaaaatatactactgtaaaagcccttcagtctatcggctatgacactattgccagcggagacagccataatgatctgggcatgatccaggccagcaaagcaggcttcctgtttaagagcacagatgctattaaggctgaatacccggacattcctgcttttgagacttatgatgagctttatgatgccatcaaaaaagtaatccaataaaaaataaatacgtccttttaatgctctgtgccaaggaacaggaacgcttattctgtcagcagatggatgatgcgcccttccctgtgcaggatcttctgatcctccaggcttttcagctcacgcatcatagcacttctgtccactcccagatactgggccagagttgtataagacattgatattgtaatatcttttttatgcttttcagcggctatgcagttcagataagcaagaagcttcttctgtgtagtcgatctggaaagcatataaatccggtttgtctgctgcccggcatgcagggcagtcatctgaagcagattgctgaccatctggctgtgatgccagcaggctttttcgcatcgcttgatcacatgttcataatcaataaacattacccgtgccattttttgggcgcgcacataataatgctgtgaatccccggataatagaaaaggttccccaaaaacactgtccttcttcaattcatctataatatattcattcccatctgcgtcgcaacagtacaaaagcgcctgtccctccatcatcagcccaatctttttcataacagaagaatattccatgatggtttcattattctgataggttgtttcccttgcacagaagcaaacccgcatcagctcctgctcctctggtgaaatttttgtaaaaagtgtaatatgttccatgatattcctccctggttacagtatatcattcttttttataaaaaaatatagattttgttgcatttgcaacagctttttctcctgtttcagggtatactttcatcatcaggaaacataaaaaacagaaactcataaaatttttaaggcacataaatatgaatcaagaaataaaagtgagggcaaaagcatgaaaatcacagatagcattaaatatgttggcgtaaatgatcatcaggtagatctttttgaaggacagtatgctgttcctaatggaatgacatataattcctatgtgatccttgacgacaaaattgcagttatggatactgtagatgctaatttcacccatgaatggctggatcatcttcagcaagtactgaacaaccggaagcctgattacctgatcgtccagcatatggaaccagatcacgctgcaaatgtagcaaattttctgaaagtttatccagatactaccgtagttgcaaatgcgaaaactttcaccatgatcaagaacttctttgacctggatctggacggtcagaagctggaagtgaaaaacggaggcactctttgccttggttctcataatcttacttttgtttttgctcctatggttcactggccggaagtaatggtaacttatgacagcacagacaaggttcttttctcggcagatggctttggcaaattcggcgccctggatgtggatgaagactgggatgacgaagcaagaagatattttattgggatcgtaggcaaatatggcccgcaggttcagtctctcctgaaggttgccgcaactttggatatacaggtgatctgtcctcttcacggcccggttctttcccaggatcttggtcattatatcagtctttatgacaaatggtcctcctatacccctgaagaagaaggaattgtgatcgcttacacttctgtttatggtcataccaaaaaggcagttgaaatcctgacagacaaactgaaaagcaaaggctgtcccaaggttgtggtttatgatcttgcaagagacgacatgtctctggctctgtctgacgcttttcgctacagcaaactggttcttgcaactaccacctacaatgccagtgtttatccatttatgcatgactatcttacccgcctggctgagcataatttccagagccgtaccgttggtctgatcgagaatggttcctgggctcctctggcagcaaaggtgatgaaagagcttctttccggatgcaaaaagatcaactggctggatactacagtaaagattctgtctgcagtaaatcaggaaaatatggatcagctggaagctatggcagctgagctttgcaaggaatatattgcccagaatgaccagcttgccaacaaaaatgacctgactgctttattccgtattggctacggtctatatgtagttacatccaatgacggtaaaaaggataacggcctgatcgtcaatactgtcacacagcttacagatacccccaaccgtgtggctgtaaatattaataaagaaaattattcccaccacattatcaaacagaccggcgtcatgaatgtaaactgcctgtctgtggatgcaccattctctattttccagcagtttggattccagacagggcgaagcgtggacaaatttgcaggacaaaaaatctgtcgctcagacaatggtcttgttttcctggataaatatattaatgcttttatgtccttgaaagtagagcaatacgtggatcttggcactcacggaatgttcatctgtcaggtaactgaagcccgtgttatgagtgatcaggatactatgacttatacttattatcagaaacatgtaaaacctcagcctgagacagagggcaaaaaaggctttgtttgtaaagtttgcggctacatctacgaaggagatgagcttccggaagacttcatctgtccgctttgcaaacatggtgcaattgatttcgagccgattggctgatttcttctctactctatcagaaaagtcccatccggatggctccatagcctgacggatgggacttttcataatgaacatgattaatatgtaatgataatcgcaattaccttcatgggaatatctccggtatttataagcttgtgggattctccatgggctgttaccaccagatcacctttttccactgctttctcaactccattatctactgccataccggttccttcagttataatgtaatactcagattcattaatatgggtatgctctccaatgcttcctcctaccggaatcgtcatctgagacagcagacgacagttcttaaagtcagtacagtctgcaaaattaataaaagaaatatctccttcgccgccttttaaattgctccgcaccgaagtggtcatattttccttcttgtataccatgatttaatcctcctgaatttttgtaatatatcgccaagaatgatcataaccgttcatcaccctcatagttacgatgccaaataccgcattattttacttctactaactcgatcctgaaattcaattctttgcctgccatttcatgattggcatccaaagtaatatttgtctcgtcctttgctgttacttttacaggaaatggctggccgtactgattagacagatatacctgctggcctacagtcagattctctgaacctggaagctgtgcgatctcaactgtaaaaacagcatccggattaggcataccgtaagcttcttccggcgtcagatgtacatctacgatctctccaacttccatgtctgccactgctgcatcaaagcctttgatcatctggcctgctccacatgtaaattccaaaggttctccccggtcataagaagaatcaaactgtgtaccatcattaaaggttcctctgtaatgcgttctgcaggtttttcccacatttttacctgtaatcgccggctgtgagccacagctgctgcagccaccacaggaatgaccttcttcatggcttccacaagaatggccttccccgtgatgatgttcacagttgacacctgcagatgccaattcgcccttcagatagctttctactgcctggtcagcatccccgctggcacctgagcaaacttcaatccctgcttctgcaagagcagtctgtgcaccgcccccaaggccgccacagatcagtacattcacaccctgttcttcaagaagcactgcaagtgccccatgtcctttaccatcggagctgatcactttactggatactactttctgatcctctgtctcgtatactttaaaatactctgtttttccaaaatgctgaaaaatgttcccgttgtcataagttactgcaattttcatttgaaacctcccatttcaacgcatagttatctgttcagtatagaccttctgcctaaggaaagcaaggaaaacgtatctggttcctgcctatgtgttgatttcctgcctatg

SEQ ID NO: 57 - DNA, 6944 bp, Unknown
  gut microbiota DNA sequence
gaaatcgtatctgacaacagcacaatttttcactccaaatgctgcatattcctgattgctcatctcataaaaataggagtttaccactcgggcaatcccattgtgtgcaacaagaatatatgtcttcctgtcagcttccttttggatctcatccaaaagattgtaaatcctctgtgccagctggagcattgactctccgccttcatatctgcagcagaaatcttccttggcttttttaaatgccagaccatcacgggccgttgattcccatttgccataattctgctccttcagccttggctccatccttcctggaatgccggtgatctctgagatatgccgggcagtctctgctgcacggatcaaaggcgaatacagaatctcatcagcctggatgccctgcttcttaagcattttccctgtctcaattgcttgctgatggcccagttctgtaagtgctatgtcagtagcaccacatattttattttctacattccacacagtctgtccgtgccttacaaaatatacacaacccattttcttcttttgtcatcctgttcttttattttctgtatagaaatctttttcccgctgatacgccacagatcatagaaaaaaattttttacacagcagttggatttatcggatataatgaaccctgctttcctcataacgatcctgctgttttctttcttctgccggatagccacagggcacaatcgcaaaggcattcagattttccggaagattcaggatttttcttacagtttccatccggtctgtgcccggtgcaattcccatccatacagccccaagtccaagctcatctgcctctaacagcaggttttctacagaagcactcatatcaatatggaagtactccggtgcagccccctctgaccgataacatggaacaaataccaccggtgcatcttttgcacattttgtataaggtgaagcctgtgacagctgctcaataatgttcttatcgctgacaacataatactcccatggctgctgattatgtgcggatggcgcagccatagccgcccttaacagcttctcaatcttttcctgatctacttctttatcctgatattttctgatactcactctgtgaaaaatactgttcatcttacttttcctccatatataaaaatctgtatttttctggtgtgaaaaagctcttgctgtgatctcattttatcacagaagagcttttcatgcattatgaataatacaaatcatgccaaataaccaaaatgaatattctcttccccaattgttatttcatcgtatcacccatgcaattccttatatttcttcaataccctgctcaaactttccggagtcatattcagataggatgctatttcttttttgcttactttatccacaatttctggatatgtttcaacgaaatattcatatctttgtaatggattataggaaagtatcatcttttcatattcatattctcttatggcggaaatcccctgcatccgtgtacaggccagtgctacatctatactttcccttgacagccggtagatatcatcggctgaagcgctcacgatctcacagtctgtcaccagttcagtagtcacaaaagaagtcatatttttgtctatgttcatgattcccaccaacggctcacctggaagatatgcaaagcaatggatctgttttttccctttgctggtatcatagtaggctttcacaattccccccgtcttatatagaaaatgaatccgttctaccttatcattttcttttaacagtattgtttttgctttcagacttaataattctgaatgctctgccagttcttgcactgctgtctcttctctgatccccatgatcctctgataaaatgttttaagttcctgtgtttcgttcagtccttccaacgcaccctgatttgttttgtatttcccgttcaccatacttttgtttcctgtcatcagctcttttctttcagtaccctcctcatagtcttaagatatataaaacattatttatagttttatatatcttacaaagattataaaattactgctcacttttacaatgattctcccctcagtgagcagtcatctttattatacattatagactaataaactgcaatttttattttttcatttccctgctgatccattccatgatcacatccaccacatactcctgctcctcccacgtcagttctcttccttttggaatacgatgccatttttccagacatcccctgcagcaggtagccgttgcatgctgagcaacaaacaccggatgacctcgcataggggtctgcctgccatcatttggcagattggcaggtgccagtcttttactgataaaatcaattgcatgttcccgtaccttagccatccctttttctgacacataattcctgtcgttcgcctttaaggaaaaactgcttctgaatttggattgggaaaggcgtttccacaaatccccttcatagaccgctggtgtctcacatatcatagaaggttgaatccctcctttataaacgatcattttttcttttgaagttttatctgcaaactgtgcttctttggattccctgctgttttcctgcagccgcctggccagacatgtattccgccctgcagtggtttcatttttgatagcataatatacagcttttttctcccccaccagcaccaggatcttttttgccctggtcacacctgtataaaggagatttctttgcagcatcacaaaatggctcatagtaaacggcataaccacaataggatactcacttccctgtgccttgtggatggttactgcataggcaagggaaagctcctccagttctgtcacatcataaaccacttcacgatcgtcaaacagaaccgtcagttcccgctcttccatatccaccttggtaatggtgccaatatccccgttaaatacttctttatcgtaatcgttacgaatctgcatcaccttatccttaagccgatattgtgtcccacctcgccgcaaaaagatcctggagggattcatagcctcctgcagcacctggtttaaatgaaccgccccgcagtctccccgctgcataggtgtcagcacctgaatatctgtaaatggatccacatggtaatacctgggcagattcattttgcaatactggacaatggtatccacaacttcctgattggttgtctttgaagcaaagaaaaaatctgattccttcccgccacgcatatcaatcgactccccccggttgatccgatgagcattcataatgatccggctcccttgtgcctgcctgaaaatctgtgtaagacgcaccacaggaaccctttgggaagctataatatcccgaagtacatttccagcaccaacactgggcagctgatctgtatctccaatcaggatcaatgacatctgttccggcaatgcttttaaaagattgtacatcagcataatgtcgatcatggagcactcatccaggatcagcacatctccctcaagagggtgctcctcattcttctgatacccttccggcggtttatattctaacaacctgtgaatggtctttgcctccatgccggcagcctcgctcattctttttgcagctcgtcctgtaggcgcagccagaatgatcttacagccagcctgttgatatgctgaaatgatccccagtgttgtagtggtcttgcctgtgcctggccctcctgtcagcaccattactttagaagaaatcgccgttttaactgccagccattgggtctcatcataggtgatttttgatgcatccgccaccttggataaaatccgttccggatcttctcgctttgcggcatcaaccttcatcagacggatcagtcttctggcacatccgctttcagcaaaataataaggcggcaaatagatagcttcctgttcctctgcctggtcccggatcacatcgttggtacgcagcatttcatccaaagtgatctccagctccggttcttctacctccagaagttctcctgctttgctgatcagctgctctcttgttgcatagcaatgccctgcctctgccagcttattaagagtgtaaaaaataccgctgcgcagacggacaaatttccccttatcaatacccatcttctgcgcaatggaatctgctgttttaaacccgatcccccagatatcgtcagccaggcgatatggattttcttttacaatggcgatgctttcacttccgtaggttttaaaaatctttgtggcatgggaagtgctcacttcatggctttgaagaaacagcataatgttcttgatctctttctgttcctgccagcttgttgtgatcctgtctacacgcactttcccaatccctggtattttcagcaattcctctggtgtgtcctcaatcacatttaaagtctcttttccgaatgtttcaacaatcttttttgcgaactttgggccaacccctttcaccagtccggaaccaagatatttctcaatcccgtaaaccgttgccggaagtgtttcttcaaatttttctacagaaaactgtctcccatatctggcatccactttccacataccttccagtgaaagaaccgaacctacgtgagtatccggcatagcgccaaccactgtaaccagatcactgtaatccttcactgcacatttcagcactgtatagccgttattttcattctgatatgtaattctctccaccacgcagcgcagatgctccatctcatacctcttttctacacatcatttctgtctcagctcaagtatacataaaagccctttccatgattctgattttatcacagaaagagcttaactgatattacttttactaattttgcttttactttgcttttactgaatgtactgatatttcttttgctgatttcttttattgattttttatgaatttactttttctatacgcttagcttcttatccataatccagccgctgatcagataaaaaatcgcagcagccaggaaagataccgctatatcaagagcaagggtaagttctatactattcagttccggaagcatatccatacccattcccagaagggtggtcaggataatgaaaataataaaggctatgattccactagccttcttaccagcaagcacactggcagataagatcacagctaaatccgcacttacaatacatgtgatccagccggccaaagctgagaagaagttaaaagcgatcacccagggatctatggatatattcatattcatatccaggaacctgtacaacatatcccaaagttctttataattgcctacggctatatcaatcactgccagaactgcaaaaaatactcctgtcagcaaaatagaaattccattttccaaaatcttggctccaaggatctgataactgctccttggggtaagaaacaacatatagctttgtttcgtgttcagatcccgctgcaaaacatttatgctttccagaccaatgtacaggattccggcagtagcacataaggtcagcaacataatccctataaaaagcaggttgtctttcttcaaaaaaacgcccagtaaatatacaatttccacaaccatggtaatgcataataaaatcaattttgaaaatgcggttttacgaaattcatatttcatcaactttaacatactgcctctcctccatgtccataaatttcacgatacagatcagctacagatttgtgttggctgatacgtaattcttctaccatacactgccggatcagatgcccctccttcataaaaagcacagcgtctgccacacgctccagttcatcgatcaggtggctggaaatcaccatcgtcacatccggttcaatggacgccagaatcgttctcataatctcatctcttgccagaagatcaataccgttcaatggttcatccaacagataaattttcgcctttcgagccatagtcactgctattttcagcttcgccatcataccggaagaaagctttttggctctcatatcttcggtaagttccatactggtaatcagttgatgatatttttccatagaaaaatcatcaaagaaatcctcataatattttcccacatctgctaccgtcatccagctgtaaaagtagggttctgtggacatataggcgatctctttcttgctctcgatgcctataggctgattctggtaaagaatcccaccactatttggcttcacaagtcctgctgccatcttcatccaggtggttttcccacttccgttaggacccagcatggcatatacaaaccctgcctccagttccaaggatacatgatccacagcagtttttcttccatatgtttttgttgcttctctgctttccaaaaccattttcatattctcctcatcattattttaaccgtgtcaagtaagcccctgtggggttgcgaatatccacttgactccaaaaatgtccaaacattcatactgcaagatgcgccggtttcatttttcattttccagaaaggtgatagcctcatgcctggaatacccaagctgctccattccctccagaaaatcccgtattaaagtgcctgccatctctttcttaagcatatctatcttcactgaatcttctgtaacaaaggttcccatgcctcgtctggtaaagcatacaccctcactttccagttctttatacactcgactgactgtgttagggttaatagtatattccaccgccaggtcacgtacagatggaagcttcgctcccgggggaagcttgcctgttacaatgtcccgcttgatcgcattggctgtctgaagatagatgggcaatgtgggattatattccataatatcctccttgtgtatcgctgttatagttagatagtacactaagtcattatgattgtcaagttttttatatttgttttttatatctgttttttacaccggcatctttgcaaggtacac

SEQ ID NO: 58 - DNA, 1269 bp, Unknown
  gut microbiota DNA sequence
gcgttgtatgtacgccttgcgcatgctcttgcgtctgccagattggaacaggtaaatgtaccgccccctgtgtaccggattgttgcaggctcacacatctccacaccaatatgtgtattgtttccggatccgtttcggccggatccgcagtgccagccccggtgattccaggggagtgtttggtagatgttgccggaatttccgtcaatgaacccgtggacacaggcagctccataggatggactgttccacatccgcacaaagacttgcgcagacggctgactacacccaaccgaatggagcatcagacccttgaccgtaatttttcgtcctgctgtatagcaaggattctttgtaaggatagatttaattatcttcataatatttttcctccaataaatccaattaaaaaagaggacgatcactcgtcccccgaatctgtatctgcttctttattaattgccttgtcggctacttccagtcctctgatcaggatctgtggcacattatacccagcttctacgaaattttcacagatagaccggatctcattgaccagtagggaagccaggacaaaccagcctagcaaagttgtaattcccaggtcaacgccaattgtcttgccaatctctacaaataccgcagatgcaccaaaagcaaccgcaatcatgatccagtagcccagcttcttaagcacacccttccaccctgccttagagttttccttgtgggcgatccggctcttcatccagccagtgatccagtccgccaggttaaatgccaggaacaatgcaaacaagatccaatgctctccaaagatataggacagcactgctacaatgctcccaacaatagcattatacgtatcaatcaccttcataatttatgttctccttttcttatatgatattttatggcacaaaaataagacctgctacggtcttgctctgggttcgttcatgtattttctcctttcgcaatcaatgtcagctcaacacctgattttcaggggctcagatggaattgattgattgataaaacacgaataatgttggtgatggtcagatgttatacgtatcatttacgttgtacggtgacaattattgggttagcagtccgattccctgcgaccaggcagacaaaagggctattgtactggcggacaacgttaaaaacccatctgctgatgtaaacagtgcagtttcttccgggcttttcactgtgatgaaaactaaagatgccttttatctgataactaatgatatagct

SEQ ID NO: 59 - DNA, 32734 bp, Unknown
  gut microbiota DNA sequence
aggctatatcagctgggggattgactcccaccactgataccagcttgtttctcaccacctatagaggtggaagtcatctcccagctgatatattttgatatttattcgtaatttttatgacgtttaaagaaatccttggtttcccttactaccacaccgcttaatacaagcaaggcgatcaggtttgggaaggccatcagtgcattgaaaatatccgcaatattccatactgccgcaacggtcatatatggtccgataaatacgcagatgatgtacagcatgcgataagtcttcactgctccctgattcctgttgaataaatattccagacacctctctccatagtaatcccatcccaggatcgtggtaaatgcaaagaataccagacaaagcatcaatgcaaaggatgccacctgtggagggaatggcagacccttctggaaagctgcagtggtgatctctacgccttccagccctgtattccaggttcctgtcataacaatggcaagtcctgtcatggtacagatcacaatcgtatcaataaatgtacctgtcatggataccagcccctgacgtacaggctcctttgtctgtgctgcagctgctgcgatcggtgcacttccaagaccggattcatttgagaagattcctctggcaatacccttctgcatagctacaaccatagttcccatcgctccgcctgccagggcacttcctgaaaaggctgtttttacgatctggacaatggctgcaggtacagccgtaatatttgtaataacaatgatcaatgcaagtgccacatataaaactgccataaaaggcacaatgatctgtgatacatttgcaatacgtttgatcccgccaagcacgaccagtcctacacataccgtaaggatcaggcaggcgatcactgttgcccaggaataatctcttcccagaattgaaacagtatgcactgtatccggatcaaagaaattctttactgcagacgcaataccatttacctgggtaaaagtaccaatgccaaacagtccaactccagccccgaaaaatgcaaaaatcttggcgagccatctccactgtttgcccataccattttcgatataataaaatgggcctccaagtacatggccatctttgtcgatggttcgatatttgatcgccagcaatccttctgcatactttgttgccattccgaagaacgcagctacgaccatccagaataaagctcccggtcctcctgctgcaatagctgtggcaacacctacaatattccctgtaccgatggttgcagacaacgctgtgcaaagggctccaaagctggtaacttcaccttcgccgccttcttcattttttaccatgaatttcagggcttttcccaaatgccttacctgtaaaacacctaaccgaacggttaaaagaaatcctgtgatcaggatcagaatgatcagcggaagtccccatacgactccgtcaaaccatgtgataaagttgttgatttgtgtaaacataatttttcctccatccttttgcctgagagaattacagctttcctgctgcgtacaccttcggcgctcttccttggattttttgaagagactctcctgagtttgcgaatccgccttatttctgtgtggctgtggcggtcattcgtatttagaataaacacacaggaatacagattagcacatttttctcattttttcaagaaaattatacaattatcacgataaaaaatacacaaatattacgcacaaatggtttataaatattacactacaataatttacaattaattattacatcaaaattcgggatttagacggcaggactggcggatgcacgtcactgagttcttgcccttccttttccctgatggtataatgtattttatcaggttatttatagggaaaaggaaaaatataaaatgaaaacacaaaaaaaagcctctccaggcaacggtaaaaacaacaaagttaaaaacaaccgaaaacaatccgggcattctggcagatttgcaaaatccctgctgcttacggaaggtcttctgatagttctggcagttatggttttaatgggcattcggctttggcagaaaagtaatcctgcttctgcagcttccgctgtacttcaggataagccagatggtctgaaccttgttcatgcatcggatccctcagccagatctgcaaaagctgctcagaaaaatagcaaggacagctctggggatactcccaaagggctgcagccggaagcttttgctccccactgcactgagtctaccgcaccctccaattacatacagactacagaaatcaatattgatgggactacactgaccgatccgttaagctataaaccggaccaggagatttcttttggaaaaggcagcgaatatacagatgtagatggcattgttactttccggggtaataatttccgcgataaccctgtttatggaactgctgatatgaagaagaacaagcttaccagtctttggtctgcccaaaccagttccattacttataatggtgccacctggtctggcagtggctggaccggacagccgttgataatgaaatggcctaagaaagtgaaaaaggtcatgaatatgtatgactgggcaaaagaaaaggatgatcttgtggaagtcatctatgcttgtatggatgggtatgtatatttcctggatctggaaaccggagaagccacccgtgatactctgcatcttggtttcacatttaaaggttccggcgcacttgatcccagaggatatccgattctatatgttggcgccggctatgacagcaatcagggtacagcccgcgtctttgtggtaaaccttcttgattgttctataatgtacacctttgggaacaacgatccattttccctgcggggagccttaagctattttgactcttctccgcttgtagatgcagacacagatactctgatctatcctggcgaaaacgggattctttatctgattcgtctgaacacacaatacgaccaggaagccggcactctgtccatcaatccggatcatattgtaaaatggcattattatggaaaccgtaccagcgttgcgtcctactggcttggcatggaggacagtgcagctgtatatggcggatatctttttgtcacagacaatgggggcaatctgatgtgtctggatctgaatacgcttcaacttgtctgggctcaggatacgttggatgactccaactccactcctgtgttgtccatagaagatgaccatttgtacctttatgtaagcacttctttccgtttaggctggagaagcagcagctctgctgaagtaccaatctggaagattgatgcccagaacggccatatcatatggaagacttcctatgaatgttactctgatgatggtgtatccggtggtgtgcaatcaaccattgctttaggaaaaaagaagctgtctgactatatttatgtaaccgtagccaaaaccggtgctcaatatgatggtgtactggcttgtctcaataaaaagaccggtaaagtcaagtgggagcataaagcatattatgcctggtcttctcctgtatgtgtatacaattccgatggttccggtaaggtgctttattgcagttgtggtggaaaggcttatcttctggatggaaaatccggaaagcttctggatgaaaatgaaatatccagtggagccatcgaagcatcaccagctatatacaacaattatatggtcgtaggaacccgggactgcaggatctgcggcctgaaattagaataaaatcagaataagagaatgaaataaaataaaataaccattgaacaaagtgcattatcagttctgcagctttttcaatggttattttagttatttgttatttatttacctgtatatgggtttacgtgtaccatacaatgttttacatcctgaaaggtattctcgatcatatgatgtactctttctgcaatggcatgggcatcattcaggctctgctgcccatctgctgagatctccagatccacatatattttggatccaaagagcctggtctgaagaacatctaccccctttacccctggtacttccagaacagcctgacgcatcttgtcttctgtctcctcatcacaggaatgatctaccattctgtctatggcatccttaaaaatatcaattgctgctttcaaaataaaaatacagatcaccacgctggcgataggatccataataggacagccaagccttgcgcctaaaataccaacaaaagatccaacagaggacagggcatcggaacgatgatgccatgcatcagccatcagtgcaccagaacttatctttttcgccgctgctctggtataccagaacatccactccttcgtcactatggaaacaactgcagctatcagggcaagaagtcccggctccattatcttctgccctttggagccagcaagaatgctctttatcccactcatgccgatccccacacctgtggcaaaaagcagtcctgccagaataatcgcagacacacattccagcctttcatggccgtactgatgctctgcatctgacttcttaccggaaagcttcactccaatgatcaccacgatcgtactgatcacatcagatgcagaatgtactgcatctgaaagcatagctcctgaatgagccagaatacctgcaagaagtttaaacaaggataaaaccaggttcactgtaatacttactcctgaaactctcatagcaatcttctgttgagtttggcttccattttctttgttttcctgttccataataagacctcctaagcaatacaaaatggtctctcgttatggcacatacattaaaccacgcagcgcatccacagatctgtcattccttttaaaataaaaaacacacctgcggaacatacactgtcccacagatgtgcaataagtctcacatccgctgccgctttatgcagcccggccccatgccagaatcggcatcgcctgctcagtttgtactgttgatctcgcattctgtttctcaataagaatgtaatgcagtgcaaagagatttaaataatattacatcaagcatattcttctgtcaagaaaaaaaattcaagaatgcctgttatgaaacaatattctgcagccagactccttttttcacaagtgcatatcctactacgcacttcagcagatctgcagtctgcactgctgcaaaaatcccgatgatgggaagctgggtataccggctgagcacataagcgataggaacgctgatgcaccatacgaatacactatcaaaaaagaaagtgatgatggtcttgccaccggaacgcaacgtaaaataggctgcatgcaaaaaggcgttggctggcataaatacagccattaccataataaactgtacagccagcccccttgcttcctgatttgtattataaagccttggaaaaaatggtgccagcaccaacattaaaagggcaaccccagtacagcagaatactgaaaaagcgatcatcttgttgtctgtatccctggcttttttcatatccccggctcccagaagctgtcctactacaatggcaactgaatctcccagagcaataaatacaatgttaaatacattatttatggtattggagatattctgcgcagccaccacattcaatcctcgcacagaataacattgcgccagcatagccattgcaccggcccacaaagtttcattcagaagaagcggtgttcccttgaccaggatcttcttagtaagaacagcaggcaccttcagtgtactgtacagaccttttgcaaaaggtgctctctcttgatgtgtatgggtccatccgatcacaatggcaacctccacatatctggaaagtacggtagcaatggctgctccctctactcccagttttgggaagaaaaatttaccatagatcagaaaataattaaatacaagatttacaacgactgcagttacaccggctttcataggcagcactgtctcaccacattcacgaagggtactggaatatatctgtaccatcataaaagcaggaagtccgaacagcatgattttaagataatcaaggccatatcccttggttgcttccagcgcctgggctgtcccctctccattcaggtacataccaatcagagaactgccgcaggtgataaaaaggcaaaatgtaatcacagtcaatccgattgccagccacagcttataccggaatgtctgccgtacaccctcatggtctttctgtccaaaatactgagccgtaaatataccggccccggaaacaccgccaaaaatgcacaaattataaacaaagagcagctgattcacaatcgctgcccctgacatcggctccgtccctacccggccgatcataatattatccagcatactcacaaaattcgtgatcccattctggatcataataggcaccgctacagccaaaaccattttataaaaggctttatcaccgataaacttctgccgaaagctcatcctcatcctggttccttccattttatttcctccttacacatagtatctgctatactacatgataccagtaacaattgcaagcattttcgcacataaataaaaagatacagtaaaataatcattagcaaatctatcataatttgccaaatattattttactgtacccaaattgatccagcaccgattatttgttgttttcctgctggattttccgagacaattcccgtcctccctgctccagccactcttccacaaaggtttcaaaataatccataggcttattccccataaccatctggataaaggcatttttttccagatcctgcaggatctggggtgcttctccatctgactctgcaagatactggatcgtaggcggctcatatccatgatctaccaaaaggccgatagctgagatcctggatttgtatgcagcccagtcctctgcatttactgcttcccctttcatgtagttggtaagataattagtacatgccgtgtaataagactcctccagtgcggaaagcttgtcctctgagatctcacgattcatcgcttttcggatatccttagtagccatataagtggcatcataataatccacattgatcacaagaggccttgcggtaggatctacattcaatgcaaaatatccattcacttcatctgcatcatctgcatcatatctgctataatcaaacagtacgctgacgatcttcataacgatctccggatgctcatatccttttctgaccaccacatacttattgtcactgaaagaattataaaaatctattccataatccttatcccgctgcaccagataatatggttcccagtcagaatccggattgttcatcacttcatccattaagggattattaggagtccaccacaatccaaagaaagcgccgcattttccttctaataccagatccctcagattattctgctctcttaatgcaaaattcttatcaatgattcctctttcatacagatcatgaatataggcaatggctttcttggtggatgcagtaagagatccatatacaatctccccatcactacaaatctgccactttctgggatgggctccaaacaaatcaaaaataggatctatggaataattggcactggtggagcctacaagaacattgtcacagatcagaccaataggctcttccccttcgtccgttcccatcctgttctttacaaaagcttcaataatgtcaaatgcatcatccagattttcaggctcctcaagccctagctgattgatccagtctcttctgagccacaagaagcaagggccatgatcgatcacagtttcaggcaatgccatcagctttccgtcataagtaccggatgcaagaagtgccggaccataactgtcatacatttccttgattctgtcggaggcacaggactcgtatacttgggaaagatcttcgatcatatcattttctaccagaagattcagtgtttcccgatcatttactaccatgatatccggaatattacgatcctgaaccagtacattgagtccttcattgtaccgatcctctctctccatgtatacattctcgttctgaatgttcaacatttttttcagatacctggtatattcattgtcctcataagtatcccctgaaggcagattggaattactggcaccgttcatctgagccagcgtatacgtaaccagttccggatacttcccataagatgtagttgcagcttttttccattcttcttctgtgtctgccgccgactttttgggctcttctttaacttcaggactgccggtacagcctgaaaatgccaaaactgcacacgaagcaacaatggcagcacagattttcttactaattctcactttgtaaaactcccttcggaatccgcatttccacccgggttccttcgcctttcttactataaatacggatcttatgatcctctccatacaagagacagatacggtcatttacattttttaaaccatatcctacagcctgatatgtgaccagggtctccgcttctgcctgatccatacctgctccattatcttctaccatcagaagaacatcatttccatcctgtacaaaggaaagcttcaggatcttttccccttcttcctttacatccagaccatgctccagtgcattctctaccacaggctgaagcagcagcttgggaacgatctccccctttacatcaggatcgatcttccattctattctaaaatcattgtcgtgcataaccagctggatttccagatatgcttcaatattctggatacagctttcaactgtaaccatatctttgcctttgctaagagcggtacgataaaaggtggacaaagccagtgttaccctgctgatctcagtctggtcactgcggatcgccatccagttgataatagaaagggaattatacaggaagtggggattgatctgtgcagtaagtgctttcagctcaaactccttcaaagcgatcttactttcataaacctccttaaacagtcggttgatctcatccatcatgctctggaaacctcggatcaacagtcctacttcgtcttcagagtcgctgtatactgtaacctcacgcaccccctggcttacccggttcatattctctgtaagttcttcgatcttccgggtaaagagccttgaaaaagaaagtcccagtgccaggatcaatcctgcacagatacagatcagcggaatctcactgatcaggatctgagatacagtactgtctatcacggactgcggcttgtacaagaaaaaatgccagccgctttcctcactaaggctgtttacagaagcatatttcttgtcaagggcagcaacaatctgagcactgttctttgctttctccagaatttcatcctcaaaattctcttttcgataaataatatttccatcactgtccagaatcatgccgccgcatttctcattaatgatattttcaaagggttgaaacagcttatcataatccaaggtcacacaaagcactgcttctacgttcgctccacgatagatcttacgcacagctgcgatttgagacagtgagcgttctaccagccactggatcttcatatcatctgaaagcctgtcgttccaccactccttatcaatctgtgccagaggcaccaaggtgtactcatgccgcaccttaatactctccgcaaataactggatctgaagaatggcatcatgataagactttggaactgaaagaagcggatcagcgatctctgtatatttctggtatgcaatataattatcaatatccttttcgttgatgatctcttcaatatccggtgagtaggtcaggtaattcagaagactggagtatacttcgatctggctgtcaatcccttcccgggtctgctccagcatagaattcatatcctccacttcatttctccggctcatactgctgatccgtatatgactgtaccatgccaggatcaccataggaaccagactggctactaccagaaggatcgtcagcttatgacgatatttcatatttttaaattttcttatcaaccctgtctgaaatctcttcatcctctccggttcctttcctgtaagattccggactgcttccataatattcacggaagcttctgcaaaaataagatacattggtaaatccggttttttcactgacctgtgccaccttcatgttggtggtacacaaaagctcctttgccttttccattcgcaccacacggatataccgattcagattcatacctgtttcttttttgaaaataaagctaagatatccagaggaaagatatactttctcagccaatgtttccagactaagatcctctgcataatgctgatggatataattcttaacagcacccacctcatctctggagccttccatggaatttttcagaaatttctcatattcctgaatattctccttggtgatcttaaggatctgtcctatattattgcatcggtacaggcgatccacctcctgttccagccgcctttcttcggaaaactgattctcctgaaacagttcctggatcacattggaaaacacaaacttcacatacatggctgaaaattgagtatttttctggtatttctcagtaaggcatccaaaatgcctccataaggcctcaatgtctttacggctcacatcttctgagattttctgcatcagctgagaatcctggctttgtgcattgcacattttctcttcatcttcgtcaaaagtaaaaatatgaacatccggatgatagaacttctcttccattagctgctccagctgttccaatacttctggaagttttcgacagccatcaaacttacggctcactgccagatggaaatgaagagaggttctttgctttaaaatctgataaatctgctccgcaaccagacggtactcacaatatttgtctctgaacaaaaacaatgactgcctggcattcagattcagataaaagtactttcttcctacctcattttgcaatccttctgctgcaaaatcatctgctgtgtcaaaataatcctgatccgtttctgcaagaatcccgcaatgccactgctcccaattattcagatctataatttctcctgcttgctccagaacctctgcctttccggaatacagatagcttagcagaaaatactgctgaagataattcttttctttttgcttctgtgcattctgctgatgcctgtgaactatctcctcctgggctttggtaagcacctggtgaaacctttccggatccacaggctttagtacataatccagcactccatattggatggcttcctgtgcaaaggaaaaatcactgtatccgctgaaaatcacgatctgaagatcattatattcctctcttgccttacggcttaactccagaccatccatatgaggcatacggatatctgtcatcaaaagatccaccttcttgctatgcagcacatccaatgcctgcttcccattggacgcctcgcagatttcatagtctcccttttctctcccgatcaggtatttgataccttctcgctcaatcctttcatcatctacaattaaaatcctgtacattcaagcaccccgtctataatcataaaatcctgtaactgttcagtatctttacagttacaaaaactttcggttagtcaaataaagatagttccccgcataaatgcatggaactatctctattttatcattcaatgaacatcttgaaaagattaaatttgattgaataataccagttttataattctatagaacgggctgctaataaatcagccttttactgctcctgcaactacaccttcaatgatatatttctggcaaaccagatacattacaatgataggaataatgtcgatcataatacttgccatcatcggtcccatctgtacatgtccgtagcttccacggaaatactggattgccatagggatggtacgatacttcttaatatccagcaccagtgtaggcagaagataatcattccatacccacatcatttccagaattgcagtggaaataatggtcggtttcaggatcggaaccagtatcttgaagaaaacctgcagtgggctgcagccgtcaatcatagctgcttcctcaatctccagaggacttccttttacgaaaccggtaaacataaatactgccaaaccagcaccaaatccaaggtagatgatgcagatgaaatacggattattcagacgaagtgtatctgctgtctttgccagggtgaacataaccatctggaaaggtacaaccatactgaatacacaaaggtaatacaaaatcttagaaagtgcaccgtttacacggacaatgtaccatgcacacatggagcagcacagcaggatcagtgctacagacatcactgagattacaaggctgtaccagaaagatgcaaggaaatccatctgtgtaacactggcaacaaagttcttaatgccattccaggtctcttctgtaggaaacttaaataccccggatgtagtgattgctgattcaatcttcaaagaattgagcaggatcattacgatcggatagatccaggccacagagataatggaaaggataatcgtaggcacaatactttttttctttggtttatctgcaataactttattctctgccattatgcctgcacctccttagatgatgttgcgcgaagctgtaccaaagcaataacaattacaagtacaaagaatacaactgctttggcctggccgatgcctttccactgtgggccgcttcgcccatagaatgtatcgtaaatgttcaatgccagcaactgggactgcttgcccggatcaccacctgtcagggacaagttctggtcgaacatcttgaatccattagtaagggtaaggaatgtacaaatagttatagacggcatgatcatcgggatcttgatcttaaacaggatctgtctggaagtagctccatcaatcttggctgcttcgataagatccggagatacgttgttaagaccagcaacataaatgatcatcatatatccaatctgctgccataaaagcagtatgatcattccaataaatccgtttctggcagataacttcagcagcggctgtccccacatggacagaagaccattgatcaaagtctgccaaatataaccaagcacaataccaccaatcaggttcggcataaagaatactgtacggaacacattagttcctttgtaaccttttgtcagtgcaagtgcaacggaaaaagcaagtacattaataagaatacttgaaacaaatgcaaaaacaaccgtcagccagaatgcatgactgaagtctccgccgattaaaatcttctgatagttggcaaggccaacgaaagtcacatctttaactgtagtaaatttacaaaatgaaagataaataccccagatgaaaggccataaaaaaccaatgataaacgctgcaagtgttggtaacacaaagacaggccaccactttttaagagattttcctaccatctctgctcctcctacttcatttaattcctgtgtgcctgcagtttctgcactccaggccctcttttcgtaagactacgtctttcatgtggaaaggggaggccatacttactgcctcccccttctctttacaccaacatccaaatccttgaaaggttttggatatactttacacaaattactcagtcagagctttctctgttgcccatccgtcaacgaatgcagatacaacatcatcccaggaaccaccagctgcataagaagtaagagctgtaccaacaccgttcttccactcttcagaaggcattgttgtaaagttccatgatacaggtgtcagaccagcttctgtgtattcctgatcctgtttaacaaatacgtttgtagattcctcagctgttttgaaaggaattgtgaagcccatatcctcattcatagcctttgtacctgtctcagaagttacacaccagttcatgaaatccagtgttgcctgaatatcttcttcagatgcttctttgtttacacaccagtagttctctgtacctgttgcaagtccttcgttctcatcatctacaccaaagtagatcgggatcatagccagttcgtcatcgctgaatgttttagacagctctgcatactcccatgtaccattctgatagaatactgcttcgccattgatgaactcattacgggaatcatcagctgtcttagcggaaagatcagcaccgtcacatgtggaatctgtgatgtacagatcaaatacattcttgtagttgtcaagatatgtaccttcgattgtgtctgcatcatttacgcctgcatctttgtactcatagtagagaggaaggtttgcaagatgtgtcttgaatctccagtcggaggatccgtccatacctgcacatgtgaatgcacctttgataccaagctcatcttttcttgcctggatatcatcagcaactttcttcagatcatcaaaactcttgatgtcgtccagtgtgtatccagctttctcaagaagagttttgtttacgatcaggccataagtctcgataacatatgcaataccatcaacagcgtcaccgtctttaacagtgtaagtatcggaagtaagctgtgaatagatatcggaatctttcagatcatagcagtaatctttccagcttttcagtccaaccggtccgtttacctggaacagagtaggagcatcgctcttagccatctcagactgaagagttgtctcatactgtccggaagctgctgtaacaacctgtacatctacaccagtctcctctgtgtaagcttttgcaaggttctgccaagcttcatcagcttctggtttaaagttcagataatatacctttcctgtagcatcgtctgccattgccggtacagccggaatcatggatgctgccataactgctgcaagtcccattgccattgattttctcatcttcattttttgtctctccttttcatgagaatcatttttggtcggatccttaacagatccgctgcgtcttatacgctgaatccgggatgttcaaccacccccgttcacgttgattatattttatagctttcaaccaaaatgcactatattaaaatttcaagaaatatgttcttttttcattttttataaacaacgtatgtttttttttacatgtttatgtaatttttgtcaaatacatacaggaaaatatatcaaaaataatcggatatataaggagtctgctgttcaatggcatcttccagcatgtcaataatgtgctcaccagcctttagccgcccaatcctggccagataatccgggcgcttatatcccatcagcatggtggtcattgtctggatactgatctgatcctggcagggctgactgatccgctctgcccatcctttaccttctctggagatttttagcaggaaagccccctgattacactccattacaggatctgtcaaagtaaagcgccattctctttcagtaatgtccggtttaaaaggatactctgccacaaaagctgcaaaatccacgattcttcccatataatatggggaaatcacttctttgatctccgcatcctccagaagaaacgccaacggttcatctgtgtaggtatctccttctacctgattgatcatagaaaaatgagccgatacaaaattccataggccggttctggcttcttcattgttaaaaatcatatctttgatatgaaaaacctcattctcaatccaatagatcacataaccatccggctcatcctgtgcattgtaatagatagctgccataatatcatcccgatcccacagccagtattcattccaggcaagggaatcacggataatggctccatgggtatgagctgcatatcggtcatatgtatccttcagttctttgctgtcagtgtcaactctgcgtacatcacctgatacccatttcttcttaggcagctggtaatccttaatctcataagaaatcttgtctgagatcagctcccagccttttcgtctgtaatagggaatggaataaggataaagatagcagatatactgtttctttttccgcatattttccagagcctgctccagaagcctgtgcatcagccccatatttgtgtattccggataagtgcccactcctgtcagtccgcccatggaataggtctttccaaaaatctgaaccttcatcgggtaaacggccacctgagaaaccaatgtgccatcatcaaaccagccaatcacatcagcccgtttcatggtagggaattttgccctgatgatctccttttctttccatcctacagaattcagttcctggtctgtaacctgaaatacatagcgaagcagtgcattgtactgttccatgtattcaggccctaccggtcccattttcagatttttcttattcataataattttctctcctcgtattgcaatatagaaggggatactgcattgcagcatccccttgtatattacatggattctcaggcttttccaacggaaccgaagatttccattttttctttaactgttgctttaattgcttcatatccaggagcaagaagctttcttgggtcaaatcctttaccctgcagatctttgccttcctcgatatacttacgtgtagctgctgcaaatgaaagctgacactctgtatttacattgatcttagaaacaccaagatcgatagctttcttgatcatatctgtaggaatacctgtaccaccatgaagtactaacggcatgtcgcctgtaagcttctggatagcatccagagtctcaaagcttaagccctgccagtttgcaggatatttaccatggatgttaccgatacctgcagccaggaaatcaatgccaagatctgcaaccatcttgcactcgttaggatctgcacactcacccataccaataacgccgtcttcctcgccaccgatagagccaacctctgcctcaagggacatgccatgctctcttgtgatcttaacaagctcttttgtcttttctacgttctcctcgattggataatgagatccatcgaacataatggatgaaaatcctgcctctacacatttcaagcatccgtcataagtaccatggtcaagatgaagggcaaccggaactgtgatattaagttcctccatcataccgttcaccattcccacaacggtcttaaatcctgtcatatatttaccagcaccctcggaaactcccaggataaccggagaattcagttcctgcgcggtaagaagaatggcctttgtccactcaagattgttgatattgaactgtccgactgcataatggccggcctttgctttctgaagcatctctgtagcacttactaacatgataaattcctcctatctttctgggtacagtctttgcacccgtctaaaatgtattttagcagattttacagctttcgtctatatttttacaaaaaatattataattgcactgtatcgctgtctcgccgtttatttctctgacacaggatcatcacatttgtgatacaggatcatcgctccaaaagccggcattggcacatgtatcacacctgcattggcaatatagctgtattcctctgttgtaaacccatccctgtaggtcagaaggattcttttaagggttgcttcctccagacggctgatacctgtctgccatacctcgatctccacatcccggtcataatcccggttattcagaatcacgatcatctgttcatcattggagaaacggccatagcacaagccttgataatcattccagaggaacttcagggagccttcccgaaggaatccgtattctttatggatccggatcatcaccttgtggaaatcaatcaagctttgatcttcccttccccatggataagtacgacggttatccggatctgtaaagccacagactcctgcctcatcgccataatatacggtaggcgctccaggccatgtcatctgaacggccactgcttctctcataattgccggattgatccctgaagatgcagcttctgctcctgcatatgagatcctgcccaccctgtggttggttcttgtaaggaacctggaatgatcatgattggaaagctcattcatagcagtgtaaaaagcagacatatgaagggaacgcatatgattcttcattgcaccaataaatgcatcactgttcccatacagatcctgcctgtactcatcactgtgcttttccatacctgtcaggaaccaggttaaaggctccataaatgcgtcataattcataactgtatcccactcgtcacccataagccagctttcaggattgccataatgctctgccaggatgattgcttcaggattagcttcttttactgccttgcgaaaatccttccagaactgatggttaaactcattgctgtgtcccaggtcggcagccacatccagacgccagccatctacattgtaaggaggtgaaacccattttttgccgatctcaagtacataatcgtataattccctggagccttcataattcagcttgggaagtgtatcatgtgcccaccatccatcataagaaggattgtaaggccagcggttctgatcataaaaactgaagaaattgcggtaaggactgtcagccgaaatataagctcccttaggatagccttcctgattctcatagatccgctctctgtccatccatttattaaaggaaccgcagtgattaaatactccgtccaggatgatcttcatgccacgcttatgaatctcctctgttagctgtgcaaacaattggttgctggcttccagatttcttttgtctgttacacggcggatatatttccacgcatgtgaattgtccctatccccgttctgtaggattccctcgtctgtgtcctctacaatctttccataatgaggatcaatataatcataatcctgaatatcatacttatggttgcttggggaaacaaatacaggattcagatacagaacttccaccccaagatcctgaagataatccagcttatccaagataccctgaagatcaccaccataaaattcccggacgcccattactgccggaacctttccccagtcatctacgtgcacgcttacatccccaatataagagtattctccggttgtcacatcattggatggatccccattataaaaccgatcaacaaagatctgatacatcactgcacctttagcccatgcaggcgtatgataacctgggtatatttcaaactctgtccgttcttccgagttgactgatactccttgataggtgtaataacatgtaacccatccatatacaacttcaaaatgatatctgaatatatcttctcccatcttgatctgtgtttcataataatcaaagccattgaaggaagaccatatctccatctcctgcctcacatcaccataaaccagatacactgcatccacattatttctctgggtacgaaaccgtatctttacagtgtcacccggcattggttctgacggacatctgtaatactcagacccatcgctgaacagcgcatccttattcaagacaggccgcatatttaatacatattgcatatttttcattacatccgctttttcccttttcattactcaacctcttttccgttgtagttaccgggtcaagtgtctgctctttgcagttttccaagatgtccggtacaaagtaaaaaagacagcgggataagctgtcttttttggagaaggtatttcttcttatggggtgtagcaaaaactatataatgtattggggggtttttacggttattatagtaccacggttccccggaaaagtctgcacaaacttcacaaaaatggagtttgttttttatgcattctgtatatcagtttttttatccccgtttttttccattgtaaaaagtgactcaaattcatctctgtggactttttccttctgaagaagcagttctgcacagctgtgaagcacctggatatgctgggaaataatctcccttgcctggtcatggcactgacggatgatcctctgaatctcctcgtcgatctcttttgccttttcttcactgtatcctcttgtatgtgcaagatcccttccaatgaagacttcgtcctcatcatccccataggctatcagccccagcttctctgacatgccatatttggtcaccattgctcttgcttcactggtagctctcttaatatcattggaagcgccagtagtaatatctccaaagatgatctcctcagccacacgccctcccagcagggtggtaatatcctgaagcatctttcctctggtattaaacatctcatcattctccggcaaaggcatggtataaccggcagcccccataccggtaggtatgatggatatggtgtaaaccggctccatatctggaagtacgtgaaacaggatcgcatgacctgcttcgtgataagctgtgatctttttctctttgtcagaaatcaccttgcttctcttttctgcgccaatgcctactttaataaaggaatccttaatatcctgttgacggataaatactctgcctgccttggcagctgcaatggcagcctcattcagaagattctccagatctgcccctgtaaaacctgcagtagtctgtgcgatctgcttcagatttacgtcttctccaagaggcttctcctttgcatgcaccaggagaatctcttccctgcctttcacatccggcctgcctacagccactttacggtcaaaacggccagggcgcaagatagcgggatccagaatatctacccggttggtagctgccatcacaatgatgccttcattcacaccaaagccgtccatttccacaagaagctggttcagagtctgctcacgctcatcgtggccgccacccataccagtgcctctctgccttgccacagcatcgatctcatcaataaagataatacatggtgcatgacgcttgccctctgcaaaaagatctcttacacgggaagcacctacacctacaaacatctctacaaaatcagaacctgaaatagagaagaagggaactcctgcctctcccgccactgcttttgccaaaagggtcttacctgtacctggaggtcctacaagaagaacacctttagggatcctggctcctacttttgtatacttctgaggtgctttcaggaaatccaccacttccaccagatcttctttttcttcctgaagacctgccacattggaaaaggtgatcttcctgtcatccggtgtcatcatcctggcacggcttttgccgaaatccatcatcctggcattgcctccgcctccgccggacacctgccggttcatcatcaccataaaaaggagcactatcccgcatgtcagaaaaacaggaagtatactggataagaaaacactggtcctttgtacatcctccatcacaggatccagtccatatcctctcaaaagcgtatccgcctcatttacgtctgtcacatatacccgcttctgtcccacatctgtaatatctgctgtgatatagcctgtgggaacctcgctgttctggtgaatctttgcatctgcaacctcaccgttcttcaatgctttttccagctggcccatcgtataattgctctgggttgccacctgattgttcagatagaaatacccggcaatcaatgcgacaatcaataccagatacaggccgattctgcttgattgcttgttcacttaactagttctcctttcatggtcacttctgtcttattcaaattctaccactccgatatacggaaggtttctgtatctctgggcataatccagtccataacccactacaaattcatcgggaatctcaaagcagcaatggtcaacctgaacatcctgtaccaccctcctgtccggcttgtccagaagtgtacacaaatggatactgttaggctttcttgcctttaacaccttcatcaaatagcttaaagtcctgcctgaatcgataatatcctctacaaccagcacgtccttgccttccaggggctgatccagatccttgacgatctttaccacaccactggatttggtgtcatccccatagctggatacagacataaaatcaagagttacaggcacagtgatccgctttgccagctcacacataaagaatactccgcctttcagcacgcagatcatatggatctccctgccttcatactccttgctgatcttggctgcaatctcacggatacgtgcatcaaccttttcttcattaattaatactctgatcttctcactcatggatggttcctccttggtattgtaattctattaccctgacagtagtctgggtaatcttatgtttttcactgatccttccgcctatgatccacaggatttcctcaccggctgcgatcaggggaagctgttcccgtttctccctaggtatcttatcgtcaataaaacagcggttcagttttttcctgtttcctttctgatcgatcaccaggtaatcccccggactcctggtgcgcacagacagactactatatattgtatcataatccagccatttcgtatacttattttcttcaatcttctgaccttcataagaaaaaactctggcagaaaccattcccagcggacactttacactgcctggtatggggataacccaacccttcctatattcttccagctgttcttccgtctgtttcccatcctcatgctgtgagccaggtaaaagagaaatcccttgataagtacgtactgcccgcatgccatagggaagctgtacctgacggcctacctgtctgctgaccaacttctgtatatccttcacatgtaaagatgtaaaatcctgttgtctgccgctcacctggtaaaaagcagttaaaagcccatagggaaccaatgcactttcctgtcgaaaaaagtcttcctgcagataatatgccccttctttgaagctggcatactgtttcagcaaacattctccctgtgcaaacagataatctcctgctgcagccagaagctgtgctgtttctgccatatgggcagaagccttcggattgatctgctcctgtaaaagaggaaggatcctgtgacggatccggttccttgtatattcttcagacaagttggtactgtcctgcccataaagaatcccagcccccttaagatattccaggatctgctgcttcttaagacacagtacaggtcggatgatcggatccgataccggacgcatggccgatagtcccctgatccctgtacctctgcacagattgtgaacaacagtctctgcaagatcgtcctgattgtgtgccagtgcgatcctgactctggcggtacatccctttgaagccagtgtaaaagcctcctgccgcacccttcgtccggcctcttccgtacccactttccatcctttcgcaagatccggtacatcatagcggaggatctggcagggaatctgccagtcactgcacacctgctttacaagagcagcatccctgtctgcctcctctccccggatcccgtgatgcacgtgtaccactttcagggaaaagtccatctcttcccggtactgcctcaaacaggacaacatagccatggaatcccctcctccggaaactcctgcgatcacctgatccccttcacggatcatctcaaattcttctatgtaagcctttacttttctgtagtacataatttattttctccacattcctgctaccaggactgtcatatcatcttttgcacaataatcactgtatcccaacacacgctctaggattcctctgctgatatccttaggtgcttcctcatgtacatccatgataatctccttcatagtctcctcttcccgctccacaggaagcgcatccagaaccccgtctgtcatcataatcacataatccccatgatatagctttcgtgaagatgtttcaaaatccggctgctgcatcagacctgctgccagactctcagaagaaatagcctctacccaatgatcccgtttgataaaggtagctgctgctcctgctttcaggaaatcacagatccctgtataaagatccaccgcacaaatatccactgtagaaaacataccttcctgccccttcagaacaagagctgtattcaccatcctggctgctgtctcctgggaaaagccggattccaggaactgttccaatagttccactacgatctcgctttccctgcaggcctctgccccggagcccatgccatcagaaagacacatcacaaatctgccctcttcctcctgccggcatgcataattatctccggaaaccttttcctgttccttggtcagccgtgccaccccataaagcatctgatagcttacatcctccgtaaagcggactgtatgaaattctccgttcaacacccgccttccatcacctgcagccgtcataggcgtgccatactctccagaaaggatctgggaaacctctgatacggagatgcattgtccgctccttgcacgcatagtgagaaagatctgccttctgccttctgctttgtccattacccaggctgttttcagaacaatgtgtcttttcttaaggctgcgtgtcagactctcaagaaaatcaggatctggctggctgatatcatacaaatctctggctaccatctccataagccttgaaatctcagcaagctgctgtgcaactgccagccgcccttcgatcatctggttgtcccagatcaggcgctgcttctctcgctgaaaattctccaaaagccggtcataatactgggtaaaacgtccgcacacactcatccactgagtctttgcagactgaagcttctgaggatctccttcttccacagcacggatcagttccccggcccaggtacacatctgctgctggttctccctccagcaaagctcctgctgataacatctggtacacacattctctcctgtgtccttcagaatctgctctacctgcccagagcttaaataatccttcctgtatggcatcccgtaaaaggtgtctgccagcttctgaaaggattctgcatatttctctactttttctttctgaggatggctttcgtacaggggaaatgcttcctccatacgcctccctttccctgacaagatagtttttgccatgtcccggacaatcagcataatgctgagtgcgagcatggcaatcatccattcctgcatattctcccctccccttacaacaacgctcctgcctgtgcgggtcatccgcactgttcacagtctgatattataagggatgaacagggaaatatctgtcaaacacaggcatatgcctgtaaaaagttttcgtcaggatttcctcttttgcgatttttttgcgatcttttttgcgatctttcataactattatgtaacttcacagttatggtctctctttaaaatgttcccgataaaatactgttatcttgctgaaatactatttttcttcttcaaaaatgatctcattgtcctttaccagaccaagccgctctctggcaacctgctcggcatactcgtcagtcttcatatatgccttgtacttatcgatctcctcagtacggctcttctgctcttccagatcctgctcaagtgctgcagcccttgcatcatagacagcaatcttatcgctgatatcccggctctgcatcatgagaatccccaaaagcatcagaacagtcactgcaatggtcagcattccgagacggttatatcctgttttcttttttcgtttctttttgcctgaccctgccaaactgccaactcctttttgcgtttttcttcgcatgggtgtgaaagctcttccgaaaggggcactttccccacctgcttgcaaactcgcatactgaaattttacatctttcagcccaaaatagcaacctctttatcaggatttttacaattttcaacggatattccaaaatctttacagtaaggcttataaaaacaggttctatcagcttttttgcagcaaaagcccccaaaagaagccctgcagccagaaaaagcctaagtattccctggtttttatcatacagcctgacagacaggaaacatcctgcaaaaagccagtagatcaggtcttctgccattacccccagcctggaatgaggaagcagtctgcgaaggatcaatagacagctgtagcacaaaagaagggcagccccggtatacactgactggatcagaaggaggaattcataatggatatagctttccacagatcagcgaaacatcctttttaataacggttcttcttttttcagactgtttcctgactggtataccgcttcctccagctttccttccacttccacttctccctgtttcagatccagccttttcacatgcatctgttccccttttaatttcagctttccctgggttgtaagaagaatgatctccttttcgtcaaaagacgtcacatccctgactcctgttatagttccggaggttctgttttcaaaggtcagtttgtgaggcatgttttcgttttttccttccaaaaatgccctcctgaaagtatcctttatgtcagtgtatgctttttcagaaaaaaatagacccggccggttcttcccggtcgggtgcgatataaatgtctgttaaaggtatctgtacagattctccacatcttcttttttaacggtttcttttacgtccagcacttctaccttcacattacgactaccgaactggatctctataatatctcccgctttcacctgtgcggatgctttggcaggcttatcattcaccattacacgccctgcatcacaggcttcattagccacagtgcgacgcttgatcagacgggaaaccttcaaaaatttatcaagacgcatattctttactcgttgatcatatccttcagggcttttccggctttaaacttaggagccttggaagcctcaatcttcattgtctcaccagtctgaggatttcttccctctctagcagctctctcgcttacttcaaaagtaccaaagcccactaactgaactttctctccttttttcagctcgccagatacaacgtcaacaaaagatttcagaacagcctcaacgtctttctttgataaatttgtctctttcgccatagctgctactaattctgttttattcatggtgtttcctcctctaaatgatctctttctagttcgtggcaactgccgatggcgacagcgctctatcctctatatatataccttttactgggcattgtcaagaattttcgccttttagcggtctgtttttaatgcttcctaaaaagcctttttggtgaagtctgcccaaatctctttctgctcaatgatcttccgttgtttttccacatttttctccgaaatccatgctttattgtgggagaaatagtaatttgccagcttccagtacttctccggataaagaaaacggattttcagattctccctttctgcaggcgaaatccgccgtacagcatcgtattctttcagcatgtccttgccaagctgtggatcccagttatatttttccaatattttcctcataaaacggtacaaatctgccatctggacatcaaacctgaaatgaccaaaattggtcactgctgttccctttttcagtattaacacattatgctgattatattccccatgacagatccagcctgcttcctttgtctgctgccggagtgcttcgtaatcggagtcctgcagctttccaagcgctacctctgctctttccagaaaccactggacattagccagatattccttttcaaaagcactgcctgccccattcttccgaataaacttccggattttacgcagctcctggttatgacgtaaatactcatccttaagagatttttcctgataaatcccctctgccggaagacacatatgagtatgtaatactgccaggatacgtacactctccaaaatatctgctttggactttgtatcacattctctgccctcataccagtattgtaaggtaaatggaatgtcgtctttattctttgttatcagctgcccttcctggttttccaggtaaagatccacactgtatcctgcctctgacagcttttttaaaagccgttgctgcatggccagttttttttccgatccccagtattcccttagaagaaatagccccttctgtgttctgcaaagaacagctccacgggtcctgctggttccttcagctgtaagaccatacttttccaaagtgccgattccataatcatacaatctgttatccccctcatcatacttgctttcccacgatactttctatacttatgaggggaatatattatttatgtcctttgtaattcctattaagcttcactgttctgaacagccaactgttctgcctgggtaagaagatactccctgttatttttcccgggatcttccagtacctggtctaaaagactctccaggatccttcctatggatggtcctgcttttaatcctgcctggatcagatccctgccgctgatgtccagacccttcagggaaacgcagtcaccccgttcacagatcctgtgatagatctgctccacagcatccagtctttcttccttctgctctcgcctgtacagactttgtgccagcatatccgcccgctgcacctccagatataaaggaaacaaatcctcaccaatactgttcactgcacgtcgcacctgggtttcttcagccttcggccgcagatcatgccaccggatcagacggcataccttccggatggtatcattgtcaaatttcagcctccgcaagatctcaccagccagcttctcacccacaggaccgtgtcccttaaaatgatctctgccattctcatcggttgtccgacatacaggctttccaatatcatgaagcaacatagtgagccgcagcacacggtcaggccggatatttaccaagctgtgcaggatgtgctccccaacggaatacatatgataaggtgtattctgctgagtttccatacatgtatcaaattcaggaagaaatatctttgtaacccctgcccgccaggctgtacgaagatagtctggatgatcagatatcaatagctttacaagttccacctggatccgctctgcacttaccttttccagattaggggcaagcaaagaaagggcattttccgttgcagggtcaatggaaaatcccagttttgcagaaaaacgcactgcccgcagaatcctgagagcatcctcgctaaagcgctccttaggatctcctacacaccggatcacctttttttccaaatcaccaaggcctccaaaaggatccaccagcccctgcttcggattgtatgccattgcattaatcgtaaaatctcttcgcttcagatcttcttccaggcttgccgtaaaggttacatccttagggtgcctgccgtcctcgtatactccgtctacacgataagtggtcacttcaaacccttctttgtcaagaagtaccgtaactgtaccatgctgcaggcctgtatctatggttctgtgaaaaaggctttttacctgctccggcttggcagaagtggtaatgtcccagtcatccggggtgtccgaaagaacccgatccctgacacagccacctactgcatatgcctcaaaccctgccttttccaacgtttttaatattctgtcaacttttggaggaatctctataaacatatgtttctccatttttctttccagtcctccttcatgttatgatgccagaggctaaagtctcttttacccatggtatcattttatatttacagggcatatacatggtttaaaggtccgctgcctgctcccagatccagcatagcctctaacgcacctgtaagataggctttcgcatttgccacactgtcttccactgaaaacccaagagccagattgcaggcaatagctgaagaaagggtacagcctgtgccatgagtattaggatttgccactctctttccacggaaccattgaagctttccatcctggtacaacagatctgtagcatcgtttaccagatgacctcctttaatcaggatagcgcctttatatttttctgccagctttccggcagctttgatcatatcttcttctgtatgtatctcaaatccgcagagtacctgggtctcaggaatattgggtgtgatcacatctcccataggaagaagtatatccgtcaccgcatccatggcttcctcacacatcagacggtgtccgctggtggaaaccatcaccggatccactacaatattctttgcaccatattccaaaagcttgtcagcgatcacacggatgatccggctgttggataccataccgatcttcacgctatctggataaatatctgtaaaaactgcatccagctgatctgccacaaactccggttctgcctccataatgctttttactccggttgtattctgagctgtcagtgctgtgatcgcactcatcccatataatttatgggcagtaatggttttcaggtcagcctggatccctgccccgccgctgcagtcagagcctgcaatggtcagtacttttttcattgtattaatgcctccatttcagaaaaatcctttgtatatcggtaaaccattgcctcaagcttaactgtttccggctcccaggcatcatacactcccactaccttaaagcctgcatccctggctgtcctggctgcatgaatggcatcttcaaacaccagtacctcttccttagcaaggtcaagatgcgtaagtgcagcttcataaatatgaggtgtagatttatcataacctacaccggcacaggtatagatccctttaaaatatttccagatcccagttcgcttcaaggcttcttttgcaagatactcatctgtagccgtcgccacacacatctgtatatgattgtgatgcagcattttcaaaaacggaaccactccttttttcggctgaacccgtaaactgtaattctcagacatcagctttcctatcccctccatgatcgcctccgggctctcctggatctgataggtttcttttatgtaaatggctccctggcgcacagtcatgcgaagaagggtatcattcagcccctcttcggcctggatacccttttctgcaagatattgttctgcaaggtgcctccagtaccccatagaatccagcaaggtaccgtccatatcaaaaatcgctccccggatcatccttctaccatctcactggaaagcctgtgcagttccctgcattcctttctgatatcttcggcagcaaatacggcagacaccagcgccactccgcatacaccgcttccctttagctgcagaagattctctttgctgattccaccgatcgctaccaccggaatggaaacagactgacagatctgcttcaaggtttgaaagtccactgcatgggcatccttcttggtagaagtatgaaatacagctccaacccccagataatctgctccatctgcctgtgctttctgagcctgttctacagtccgggccgagattccaaggatcttgtccggtccaagaagtgctctggcctttgctccatccatatcggactggccgatatgaactccgtctgcacctgtttttacagccacttccacatcatcattcacaataaaaggaatctgcttctccttacataatgcaccaatctcttttgcttcctgaaggaacttatcctcacacatattcttctctcttaactgaagacaggtgatgcctccttcaatggcctgctgtacctgctcatacaaagacagcttccctgtccaggtctgatctgttaccgcatataataataaatccttttttcctatagtcatgtctttatctcctgatcatctataattattcctgataactgttgcctacatctgagcccagatcgcaggtatatttccactcgatcttatctccatcctccactgtatactcggagcatccgtaattaggaaaccatccgttcacactgaacatccatcctgaattggcaccgcagtcaaattcataaagctggttgatcccttcaatataatagcttccgtacaatggggtatatctggaagacatctggatcccggcctgattacatgcatttttcagcacatcaaaagctgtatcaccggatttaaaggatacttcttcaggttccagaatccagccatcggaaggcacaaattccgccttttcagacttcagatcatcccggttatcaaggatggaagagcaatctatggaaatggtacaggtatggctttcctccacctgatcactgcctccgcagcctgctgccagcaaacagcacagaagcaggccaaataacagcctgcctgcctgaagcctttgtaatgtatgttgttttttcacgattttctggttcaaattacacataatgcttatgttctccctgaattcctttcctgctggaatcgcatattcatttccactgctagtccgaccattacgatattaaccagattcattttttctttctacagtatttttaattcattctccggctgtctattattatactcgaagtccgcatttgtaacaacattcaatttgatttctgtccaatttgatttcccggacaggttatcgctccatatactgccccggcagaggaaaggattttgacatatatacgcaaaaagggttgatcaggataatcctgaaccgctccccgtcaagtagacaattgaaaaaatataaatttttcctgccagtagaaatttatctgct

SEQ ID NO: 60 - DNA, 196899 bp, Unknown
  gut microbiota DNA sequence
ctttgttaaatttgaaaaaaactgaaaatctgattttgtgaaatagagagaaagaaagcaaaaagcataaaaaacaagaaaatatacttgattatttgtgcataaagtaatatagtgaagatgcgaaaacgatttaggaaaacaaagaaagcaaagaggcaacagggcttatggtatcgatgaaggaaatcgcaaagaaatgtaatgtttctgtagcgacagtcagcaaagctttaaatgattatccggatatcggggaagagacaaaagcactgatccagaaaaccgcagaagatcttgggtatctgccaaattcatctgcaagggcattgaaaacaaaaagaagctacaatctgggcgtgctttttgtagatcaggctcacagcggactgacgcatgcttattttaatcatgtgctggaaagcttcaaaagtacagcagagagcaagggatatgacattacctttaccagcggaaatgtttcgggaaagaagatgagttattatgagcattgcagataccggggcgtggacggggtggtaatggcctgcgtggatttttacagcgaggaggtgcaggaacttttaagatcagaagtgccggttgttaccattgaccatgtgtgtgacggcaggatctctgttttatctaacaatgtacagggaatggagaaacttctggaatatatcttttcccagggtcaccgaaagattgcatacatttatggagatgacacttcggttacaaagaagcgtctcagcagcttttaccggatgatgcaaagagaagggatccaggttccggacgaatatgtcaggccggcacgttacctggacgcagacctgtctgcaagacagaccagggagctgctggagcttaaggatccacctacctgtatcctttatccagatgatctttcagcagttggagggtttaatgagatacgggaaagagatctgaagattccggaggacatttccattgcaggctatgatgggaataacatagccaggatcatggagccaaagcttaccacattgtgtcaggataccagtgccattggaaagatcgcagcagagaagctggtggagctgatcgaacagccgaagacagcgctgatccggtcctatacagtggatggaactttatttcagggcagatcggtcaaaaaattggggtgatttttacagcagtcctgtaatgtaaaagaagtaccaaaatgaatgtaaataataaaaggattatattaaggaggtagcaaaaatgaagagaaagcttatgagtgttttacttaccgctgcaatggttggaggactttccgtatatgcagttccggtaatggctgaagatgaccaggaaccggacaacacagtgaccggtgattctgcagctgatgatgcattcgtagtgtggggctggaatgatgacattaagaatattctggatggtccgtttaaagaggcatatccggatgattataagagaatcgtatttgtaaatacaggtggatctgattattatcagggcaaattggatcctgtactggatgacccttctaatgaattatatccggatcttatgggactggaagttgattatgttcagaaatatgtaaacagtgactgggtaaaatcagttgcagacctgggcattacagaggacgattacaagaacatgtaccagtatgatcttgatcttggtacagatgcagacggtaatgtacgtgcactgttctggcaggcaacaccaggatgcttccagatacgtgcagatctggcagaaaaatatcttggaactacagatccggctgagctggcagagaaattcaaagatcttgatacgattatcgcaacagcagaagaagttaaggaagcatctggtggaaagtgtaaactgttctccggttatgatgagatcaaacgtatgctgacaaactccagaactgtaggcttctatgatgagaacgatgtgatcactttggatgacaacatcaccacttatcttgaaacagccaagaaaatgtatgacgaagagcttacctttaacacagatcagtggaatgctgactggtatgcaaacatggacggggatggcgagagcagcaatgcagccattgcttatatgggatgcccatggtttacctactggtgcttaagcgatacatggaaaaacaatacgatccttgttccaacagcaaataaatgctactggggcggcaccggactggctgcaaccacagagtgtgcagacacagaactggctggcaagatcatgaaattttttacctgtgatacagacggaatggtagctatcaatgcactgaattctgattatgtaaataacacagaagcaatcaacaagatcatcgaaagcggcgcttccgcagacggaaatggttatctgtatgctgacgcaggacagaactttatggaattcttccttcctctggcagatggactggatgcttctaccgtaacagcagaagatcagcagatcctttctcttctggatacccagacaaaggcttatgcaactggtgagaaagatcttgataccgcaatttcagatctgaaagcatcaatccatgataccttctcttacctgagcgtagaataatgatgaaaccaggctgacaacagctgcctgtatggatactgcctcttcatttacgaaggggcagtacctttcataggaggtatttatgaataagaagaaaaagaaaaaaatcaattacggaagatacggatattattttattgcccccttttttattacttacctgatctttcaactgtggccgctgataaatactttctattacagcaccctttcttattataagagaaatggcaggcagttcgtggattttgcaggcattcagaattttctgaatgtgcttgggttaagtgctggagagcgtccttatgtacttagctatctgaaaaatacattggtgatgtggggctgcaattttgtcccccagatccttgtttctcttttactggctttatggcttactgacacaaaggttaaggtgaaagggacaggggcagtgaaggtgatcgtttatctcccaagcattatcactgcagcttctgtatctgtattgtttaaggccatgttttcccaatatggaccgattacccagtctttgaaaaactggggcatccttgggaaaaactttgattttatgtccagcgtggcaggaagccgcggactgatttctacgatcttgtggtggatgtggtttggaaataccactctgcttctgatatccggagtgctgggaattgatccaggactgtttgaagcggcagatattgacggagctaccggatttaagaagtttcgtttcattacccttccgctgttaaagccgatcatgctgtataccctggtaacatctgcaatcggcggtctgcagatgtatgatattccagcgctgtttaatgttcctgaaacaggcctggtagggcttccggatgataagactacaacaatggccatgtatatcatgcgtctgtataacagtgatgttggaaaagcggcagcagtatccgtgattctatttgcagtaacattgatcgtcagcctgatcctttttgctaccatgggtgacaaggaggagcgtaggatgaaaaaggcagcaaagaaagccggaaaggcagggcagagatcatgaaagacggttatacaagctctttaaagcggcagcggattttccgtactgtagtatgtgtgattttctgtattcttgcactggggccgtttttacttttgatcatgaatgccaccagaagctctgaagcaatcaaatccggtatttccctgatcccgtcaggccatctgatagaaaactggaaaaatcttctggcaaagcaaaatggtatgcagatcactttgcaaaaagcggcattaaattcactgaccatcacagtaccgggcacttttcttgctgtatatttttcttctatgacagcgtatggcatttatgtatatgattttaaatttaagaaatttgcatgggcgtttattatggccatcatgatggttccaagccagatttctattatcggtttttaccggtttatgttggatctgaagctggtagatacatatattccgctgatcatccctgccattgccagtcctgcggtagtattctttatgaagcagtatatggaaagtacactttccattgagatgatcgaagctgcccggattgacggatccagagagtggcatacctttaaccggatcattataccgatcatgaaaccggccgttgccacacaggcaatcttccagttcattgcccagtggaataatctgtttacacctaccattatgctgactacagattccaagaaaacactgcctatgtttgtacagctgcttagctccaaccagttccgtacagattacggagtagtatatgtaggactgtttgtaaccattatcccactggtgatcatttattttattctttcaaaatacattgtggccggagtggctcttggcggagtgaaaggataaaaggggtacacaaagcagggcaggtttgttataattttatatgtaggaaaaggatcctgcacagcagggtcctttttgcagagaaaaaatggcaggagagagataatggatattcaaacagggatcacattttgtcttgagatgatcgggacagttgcgtttgcagcatccggggctatggtgggagccggatgctctatggatattttcggagtatgtgtgcttggggtagtaacagcagtaggaggaggtatgattcgtgatattgtacttgggatcctgccgcctactgtatttctggatcctaagtatgcactggcagcagtgattacttcctgcctggtattctttgcttattatatgaagaagatggagccgggacaacacagttcccaggcttttgaaaggatccttctgatcatggattccataggacttgggatttttactgtggtgggagtgaatacagggatccgtcagggatacggaagcaatgtatttcttttggtatttgttggaaccatcacaggcgtagggggaggtcttttaagagatatgatggcaggtgtgccgccttatatttttgtccgtcatatttatgcctgtgcttctattgtaggggcaattgtatgtgtgtggatgcagcagttcggggctgtatgggcaatggtagtgggagcctgtgtggtagtgctgatccggtatctggcggctcattatcgatggaatctgccaaagcttccaagataaatgggatacaagagtatatagaaatctgcaataaaaaggtctgcaaaccagccctgcaattggaaatccatttgcatattggccgggaggcagacctttttctataatagaaatatgagtgaagccttatttttcagcggtatcctgaagagctaagtagccttcttcaccggtacggatctttactacattttcaatgtcgtatacaaatacttttccgtctccgatctggccggtgtggagtacctttttcgctgtagcgatcactttctgtactggcacaagactgacaacaatttcaatcttaacttttggcagaaggttcatatccatttcaacgccacgatagaaggatggagcacctttctgtatgccacagccaagcacattggtaatggtgatgccggtaacaccgatctcattcattgcatgcataaattcttcaagcttgttctgccttgtgatgatcacaaccttggtaagcttatgtactccttcccttggaagctccggtactgtttcagcaggagcagagggcattgggtggctggtatgtttaccggagccggttcccataggagctggaacgctggcaactgtatcacggatcgtaaatccatcataagcacttgcaagaccatgctctttaacgtcaagaccctggatctcttcttcttcggatacacgaaggccgatggtatgcttgatcacctggaaaataatcgtcattgtaacagcaacccagaggatcgtaatgcacatacctgcaatctgaacaccaaagccgtggaagccgccgcctaccagaagacctttccagtttgtaccggctccatctgagaaaagaccgactgcaagggtaccaaaagcaccattcaggccgtgaacaccaactgcacctaccggatcatcaaccttcagcactttatcaatgaattcaataccaaatacaacaatgaaaccagccaggataccaatgatcgctgcagaagtaggagatacagtatcgcagcctgcagtgatggcaacaagacctgccagggatccgttcagggacatggacacatctggttttttgtaacgtacccatgtgatcagcataactgtaacagtagcaactgcagctgcaaggttggtagtgacaaagatcttaccagcacttacaatggcatctccttccatggaaactgtggaagcgccgttaaatccaaaccagcaaaaccagaggataaatacaccaagtgcgcctactgtcaggttatgaccaggaattgcttttgattttccgcttttggtatatttaccaatacgtggtccaaggataatagctccaacaaatgcagcaacaccacctaccatatggacagcgcaggaacctgcaaaatcatggaatcccatctgtgaaataaatccgccgccccagatccagtgtcctgaaacaggatacactacaagactgatgagcagactgtaaatacagtaagcggaaaacttggtgcgttctgccattgcaccggaaacgatggtagcagaggttgcacaaaagacagtctggaaaataagaaatgcccagaaaggaacgccatcaggaagcattgcgcttccataattagcttcggtggcaataccgccgatctttccaaaaaagccgtttcctgcaccaaacataataccgaagccaaccagccagaagaccggtgtgccgatacagaaatccatcaggtttttcatgatgatatttccagcgtttttggctcttgtaaagccagtttcaaccattgcaaatccagcctgcataaagaagacaagggctgcacctacaagtacccatatagtattaactgctgaatagtccatatatcattctcctttctttccccttgaaaaaataaaaagaagcgagagagagtatatatgctttcttccgcttctttacgaactaaaacaagtaacatttaaccccgtacaatatccattcgctcgcttacatagtttagctcatagatgatcgaagtcagggatttatatatgtaaatcagggaatatccgctatcgtgtgattaatggatgaggaaatcgataatgaattatgaagtagagttcatataaggatattccctgtatttacctgaaacgattaaatagaaaacagaagttttccataggtaggataaggaagaagagcatccgggataagaacctcggcagcatctgcagcctttctcagttcttccatatcttccagtacaacagactgatatgctttggcattttcaagcggatcttctgttgcaagggctgttgcagtatctgctttcagcttttccacaccggaagccattttttcttccaaagcagtaagctttgaaataagagaagcttcgcatgctgtagaaatatcggcaacaaccgcttttttggcgcttgcagcagctgcaattttttctgtataagtcattacagatggaagaagatctttctggaccatttctgccattgtattagcctcaatattgatggtcttagaataattttccagccagatctcataacgggagaagatttcttcctttgtaaagatcttgtggtctgtaaacagcttgatgtttttctcatcgatccacattggaagagcatcaggagtagacttcaggttataaagacctctcttttcggcttcttcgatccactcatctgtatatccgtttccgttaaagatcacacgtttatgtttacggatcgcacgtttgatcagttcatgtactgcatgctccatttcttctgccggtacaccggaaagttcctgtgcaaactgacgaagtgcttcagcaacagcagtattcaggataatatttggatttgcaacagacgcagcagaaccaagcatacggaattcaaatttattacctgtaaaagcaaatggagaagtacggtttctgtctgtattgtcttttacaaagtgaggcagaacctttgcaccgatatccatctgaacagcaccatgagaggtgaagtatgtatcattctcgatagacttcatgatctcagtcagctcatcgccaaggaatacagatacaactgccggcggagcctcatttgctccaagacgatgatcgtttcctgcactggcaacagagatacgaagtacatccgcatattcatcaactgctttgatcactgccatcaaaaatacaaggaactgaatgttttcagctggtgtttttcccggatccagaagatttacgcctgtatcagtactcatagaccagttattatgcttaccacttccgttgattccttcaaatggtttctcatgaagcagacaaaccaggccgtgcttgtcagctacttttttcatgatctccatagtcagctgattgtggtcaacagcaacattggtagtatcaaatacaggagcaagctcatgctgtgcaggagcaacctcgttatgttttgtttttgctggaataccaagtttccaaagctctacgtccaggtcgtgcatgtaagcggaaacctttggagccagagtaccgaaataatgatcttccatttcctgaccctttggagcaggtgcaccaagaagtgtacgtccgcagaataccaggtcttttcttttattataaaggtctttgtccaccaggaagtattcctgctcaggtcctactgtggtagaaacatgctttacttctttgtttccaaggatgtgcagaatgtttactgcctctttattcaatgtatccatggaacggagcagaggtgtttttttatcaagagcttctccgctataagaacagaaagctgtagggatgtaaagggttccgtctttaataaatgctggagaagtaggatcccatgctgtatagcctcttgcttcaaaggtagcacgaagaccacctgacgggaagctggatgcatctggctcgccctttaccagttctttaccggagaaatccatgatcacctgtccgtcaccggtaggagaaatgaagctgtcatgtttctcagcagtaacattggtcattggctggaaccagtgtgtataatgagtggcaccattttcaattgcccattctttcattgcaacggctacggagttagctacgtccagctccagatgtgaaccgttttcaattgtttttttcagagccttatacatatcttttggtaatttgcttcgcatgatcttgtcattaaaaacaagactgccataaatatcaggaatattttgagtcatacttcggtactcctttcatttcgctttcactcataattttttctataaaacgaaaaaagcgcttcggacgataaatgtatcatccaaagcgcctttgctttatgtgatgtagtatacacaaaaaaaaacagatgtcaactattttttgaaaaaaattattttttattttgccagagggtgatggaaatattttcagaagccagggttgacaaatgtgttttttcaattatattatatggatgtttgcgatgaacggttatgcagctaggaggaaccagatggctaagataaaagaagaatgcggtgtatttggtatttatgacctggacggagaaaatgtggcaacgtccatttactacgggcttacagctttgcagcacagaggacaggaagcctgtggaattgcagtatctgataccaacgggcctattggaaacgtgaaattccataaggatctgggactggtaagtgaagttttaagagaaaacaccatccgtcagatggatggggatatcggcattggacacgtgagatattctaccacgggagcatctgtggctgagaatgcacagccccttgtgctttcttacgtaaaaggaagtcttgcccttgcccataatggcaacctggtaaataccccggagctgaagtgggaattgattcagagcggtgcagttttccatacaactacagattctgaagtgattgctttttatattgcaagggagagagtagggtcaaaaagcgtggaagaggctgtgatgaaaacagcaaagaagatcaagggtgcttacggtctggtggtgatgagccccagaaagctgatcggtgtcagggatccttacggcctgcgtcctttatgtcttggaaaaagggggaatgcttatgtgcttgcctccgaaagctgtgcccttacatcggtaggtgcagactttatccgtgatataaagcctggagaaatggtaagtatttccagggagggagtaaagtcccagatgatctttgaaaataaaaagcatgcacattgtgtttttgaatatatttattttgcacggcttgacagcactattgacggagtcagtgtttacgatgccaggatccgtggcggaaagtctcttgcaaagtcttatcctgtagaagcagacctggtaacaggagttccggagtccggactgattcctgccaagggatattctgaagaatccggcattccatttggacttgccttttacaaaaattcctacataggaaggacttttatcaagcccacccagaaggagagagagtccagtgtacatttgaaattaagtgtgctgaagtcggttgtacagggcaaaaggatcgtacttgtagacgattctattgtgagaggcactaccattgccaatctgatcaccatgctgaaggaggcaggggcaaaagaagttcatgtaaggatcagttcaccgccttttttacatccctgttatttcggaaccgatgtgccaagcaatgatcagttgatcgcagccaaacacagtacagaagagatctgcaaaatgatcggtgcagattctctgggatatatggaaagtgaatatctggagggaatggccggaggccttccaatctgcaaagcctgctttgacgggaattatccaatggagatcccggagcatacagtaagcatggaatatgagatccacaaaatatgatcagaattaggtgtggctgctttacagatcaaaagtgggttgttttacagatttattattgacaaacatgtaaaaatgggttatattatagcaaatttttatatctgtgatttttatgacaaaggtgtcagaacagaactttcgggggatagtcccctccggaaggattgttttggcacctttttgtttggcttagtacagatatgagatgagagctttatggatgaggaggaaatatataatggcaattaagtatgtttttgttacaggaggcgttgtttccggactggggaaaggaatcactgctgcatcccttggacggcttttgaaggccagaggatatcaggtgactatgcagaaattcgatccatacatcaatattgatcctggtacaatgaatccgatccagcatggagaggttttcgttacagatgatggtacggaaacggacctggacctgggacattatgaaagatttattgatgaaagccttgataaaaactcaaacgtaaccacaggaaagatttactggtctgttcttcagaaagaaagacatggagattttggcggaggaactgtccaggtgattccgcacattacaaatgagatcaaaaatcgattttacagggcaaaatcaccggatgaggacaaaatcgcaattattgaagtgggcggtacagtaggagatattgaaagccagccttttctggaatcaattcgtcagttccaacacgatgtgggacatgaaaatgctattttgatacatgtcactttgatcccatatctgaaggcttctggtgagatgaaaacaaagcccacccaggcaagcgttaaggaactacagggaatggggatccagccggatgtgctagtgtgcagaagcgagtatcctttaacggaagacattcgtggcaagatcgctttgttctgtaatgtgcctgtcagccatgtgcttcagaatctggatgtggaatatctttatgaggcaccccttgcaatggaaagggaaaagctggcagatgtggttcttcagtctttgtgcctggaaaacaggaagccggatctgacagactggatccagatggtggatcatctgaagcatccggaggatcgtgtgaatattgctatcgtaggaaaatatacacagctccatgatgcttacttaagtgttgtggaagcgttaaagcatggcgggatctcctgtaaggcgaaggttgaatttacctgggtggattctgaagaattaaatgaaaagaatctggacaagcagcttcatgacgtagacgggattctggttccaggcggctttggcaacagaggaacagaaggaatgatcctggctgcacagtatgcaagagttcacaagattccttaccttggtatctgtcttggcatgcagatggcgattgtggaatttgcccgtcatgtgcttgggtatgaggatgctaacagtatagaactggcaccagagactactcatccggtgatcgcacttatgccggatcaggagcaggtagaggatctgggtggaacccttcgtttgggaagctatccttgcgtattaaaggatgattctttatcccttgcactgtttggcaagaaagaaatacaggaacgtcacagacatcgttatgaggttaataacgcatacagagacgaattgaatgaaaagggaatgagcatagccggtacatctccagatgggcatattgtagagatgatcgagatttcaggtcatccattctttgtgggaacccagggtcatccggaatttaagtcaaggccaaatcatgcgcatccgctgttccgtggatttgtacaggcagcggtagaccgaaaaaaagaaattgaaagaaagaccatatagaaaggatgaggaaatatgagagaagtggcaaatgaccagcagggtctttaccgtccggaatttgagcatgataactgcggaattggtgcagttgtaaatattaaaggtaaaaaaagccatgaaacggttgcaaatgccctgcgtattgtagaaaatctggatcatcgtgcaggaaaggatgcagaaggaaaaaccggagatggtgtgggaatccttttacagatttctcataaatttttcaaaaaagcctgtaaaaaagagggcattgagattggaggggaaagagagtacggaattggacagttctttttcccacagcaggaaatcaagcgtgcccaggcaaagaaaatgtttgagatcattgtggaaaaagaaggtctggaattccttggatggcgtacagtgcccactgtgccggatgtacttggacacaaagcacgtgagtgtatgccctatatcatgcaggcatttattaaaaaaccagatgatgtggagaagggtcttgattttgacagaaaactgtatattgtccgcagggagtttgaacagtccaatgacaatacctatgtagtatctatgagcagcaggaccattgtatacaaaggtatgtttctggttggacagcttcgcaccttttttgaagatcttcagagcctggattatgaatctgccattgcagtggttcattcccgtttcagtactaatacaaatccaagctgggaacgtgcacatcctaaccgtctgatcgtacataatggtgagatcaatacgatccgtggaaatgcagacaagatgcttgccagagaagaaaatatggaatccccatatctgagccaggaaatgtctaaggtgcttccggttgtgaacaggagcggttccgactcagcaatgctggacaatacgctggagttcctgatgatgagcggcatggatctgccacttgcagtgatgatcactattcctgagccatgggcaaataatgatactatttctcaggaaaaacgggatttttatcagtattatgcaactatgatggagccatgggacggacctgcgtccattctgttttcagatggtgatgtgatgggagctgtccttgatcgaaatggtcttcgcccatccagatactatgttacatctgatggatatgtgatcttgtcctctgaggtaggcgttcttcctgtgccggaagaaaaaatcgtattaaaagaacgtcttcatcctgggaaaatgcttcttgtggatactgtacagggcaagattattgatgataatgaccttaaagaaatgtatgcaaaaaaacaaccatacggagagtggctggacagcaatcttctgcatctgaaggatatccatatcccaaatgagagaatcgaggaatacacagaagaacaaagagcccgccttcagaaggctttcggagatacctatgagcaataccggacttcaatccgcaatatggcattaaatggcgcagagagtattggagcaatgggtgtggatacgcctctggctgttctttccaaacaaaaccgtcctctgtttgattactttaagcagctttttgcacaggtaacaaatccgcctattgatgctatccgtgaggagatcgttaccagtaccagcgtatatgttggaaaggatggaaacctgttggagcagaatgcagaaaactgtcaggtattaaaaatcaacaatcctatccttaccaatacagatatgcttaaaatcaagaaaatgcactatgaaggctttaaggtcgccgttgtttccactctttattataaaagcaccaagctggagcgtgccattgaccgactgtttgtggaggtagataaggcatatcgtgacggagccaatattctggtactttctgaccgtggggtagatgaaaaccatatgcctattccgtcacttctggcagtatccgctgtgcatcagcatttggtaaaaactaagaaaagcacttcccttgcaattatcctggagtctggagagccaagagaggtacatcattttgcaacccttctgggctatggtgcaagtgctattaatccgtatcttgcacaggaaacgatccgtgaattgatcgatacccatatgctggaaaaagactattatgcagcagtcaatgattacaatcaggcagtgcttggcggtattgtaaaaattgcttctaagatgggtatttccactattcagtcctatcagggatctcagatttttgaggccattggtgtatctcaggatgtgatcgataaatattttacaggaacagtcagccgtgtaggcggtattacactggaagatattgaggacaatgtagaacgtctccattccgaggcatttgatccgctggggctgactacagatcttactcttgacagtgtaggagctcataagatgagaagccagggagaggagcataaatacaatcctcagaccatttcccttcttcaacaggctacatggacaggcagctatgatttgtttaaagaatatacaaaaaaggttgatgaagaaaaccatggcaatttaagaggcctgatggattttaaatacgccaaagagcctgtgcctatggaggaagtggaaagtgttgatgagatcgtaaaacactttaaaacaggagcaatgtcttatggttccatttctcaggaagcacatgaaacacttgccattgccatgaatcatcttcatggaaaatccaatacaggagagggtggcgaaagtgaggaacgtctggattcagcaggaacagacaatgatcgttgctctgccatcaagcaggttgccagcggacgttttggtgttaccagccgttatctggtatctgcacgtgagatccagatcaagatggcacagggagcaaagcctggtgaaggcggacatctgcctgcaaagaaggtatatccatgggtagctaagaccaggcattccacaccaggagtaagtctgatctccccgccgccacatcatgatatttattccattgaggatttggctgaactgatctatgatctgaaaaatgccaataaatatgcagatatctcagtaaagcttgtatctgaagcaggtgtgggaacggttgcagccggtgttgccaaggcaggagcacaggtgatcctgatctctggttatgatggcggtacaggagctgcaccaagaagctccatccataatgccggacttccctgggaactgggacttgccgaaacacaccagacacttctgatgaacggattacgtaaccgtgtacgtattgaaacagatggaaagctgatgagcggtcgagatgtggctgtggcagctctccttggagcagaggaatttggatttgcaactgcaccgcttgtaacaatgggctgtgtgatgatgcgtgtatgtaatctggatacctgcccggtaggtgtggcaacacagaatccggagctgcgtaaaagatttaaaggaaaaccagaatacgtagagaatttcatgcgttttatcgcacaagaattaagggaatatatgtcaaagataggcgttcgtaccctagaagaaatggtgggacgtacagatcttctggttgcatctgataaggtaaaggagcctcataagggcaaagtggatctgactgctattttgaataatccatatgcggcaaaaggggaaaaggttacttttgatccgaaagcagagttcaattttgaactggaaaaaacattggacgaaaaagtgcttcttaaaaaatgcggtaaaaatattgtaagtggaagcaaaacagaaatctctgtaaatgttacaaatacagacagggcttttggaacaattctgggtgcagagatcactagaaatcataaaaaaggtctggcagacgatacaattgtggtcaactgtaccggtgcaggcggacagagttttggtgcgtttattcctaaggggcttaccctgaagcttactggtgacagcaatgattattttggaaaagggctttcaggtggaaagcttgtagtaaaggttccggaaaaagccggttacaaagcagaggataatattattgtaggaaatgttgcactgtatggtgctaccagcggaactgcatttattaacggaatggctggagagcgttttgcagtacgtaactctggagcgtatgcagttgtagaaggtgttggtgagcacggatgtgagtacatgaccggcggtcgtgtggttgttcttggcaaaaccgggaaaaactttgcagcaggtatgagcggtggtatcgcctatgtgctggacgtggacaatgtgctttacaagaatctgaataaagccatgatctccattgaaaaggttgagaataaatatgataaaaaggaactgcgggatctgattgaagcccatgtacaggctacaggctcaaaactgggggcaaaggtgctggcagactttgacgaatatcttcctcatttcaaaaagctgattccaaatgagtataaacacatggtgactttaagtgcaaagctggaagaaaaaggattgaacagcgaacaggcacagatggaagcgttttatgaaagtattaggagggcataaccgtgggaaaaccaactggatttttagattacgacagagagacggcaaaggttctgccgccgaaagtaagaattgctgattttaaggaatttcgtattccgttaaataaagaaaaacaaaaacttcagggggcacgctgtatggcatgcggagttcccttctgccagtcgggcatgatgcttggaggaatggcttccggctgtccgttacataaccttgtaccggaaacaaatgatctggtatatacaggcaattggaaacaggcattcttaagactgagcaagacccattccttcccggaatttacatcaagggtgtgtcctgcactgtgcgaggctgcatgtacctgtaatattaacggagagcctgtatctaccaaagaaaatgaacgtgccattattgagactgcttatgcaaatggctgggtaaagcctcagatcccgaaggtgcgtacaggcaagtccattgcagtagttggcagcggcccttccggacttgccgcagcacagcagttgaaccgtagaggccatcaggtaactgtatatgaaagaaacgaccggatcggcgggctgctccgctatggaatcccgaatatgaagctggataaatctgtgatcgaccgcaggattcacttaatggaagaagagggagttaagttcataacaggagtcaatgttggtgtggatattacgcctgcagagctgctgaaacagtatgaccgtgtgattcttgcctgtggtgcatccaatccaagggatatcaaggttcctggaagagaagcaaaaggtatttattttgcagtagatttcctttctaaggttacaaaaacacttttggattctgatttccagaaagcaccttatgaggaagcgaagggaaaacatgtgcttgtgatcggaggcggagatacaggaaatgactgtgtaggtacttccatccgtctgggagcaaaatccgttacccagctggaaatgatgccaatgccgcctgtacacagggcgccgaataatccatggccacagtggccaagagtgctgaaaacagattatggtcaggaagaggccattgctgtattcggtcatgatccaagggtttatcagacaacagtcaaggaatttattgctgataaaaacggaaatgtatgccaggcaaagatcgttaagctgaaaagtgagaaagatcctaaaactggccgcatgatgatggtacctgtagaaggaacagaagaagtgatcccggcagaactggtactgatcgcagccggtttccttggaagccagaaatatgtgacagatgcatttaaggtagcagtaaacggacgtaccaatgtggaaacaaaaccgaatggatatgaaacaagtgtggagcgtgtgtttacagcaggagacatgcatagaggtcagtctttggtggtttgggcgatccgtgaaggcagagaagctgccaaagcagtggatgaatctctgatgggatattcatatctgtaaacttgtaactgtccggcaccatcacagttgcaggcataatgatacagctgcaaagctttttaaggcttttgtggctgtattttttttgattcacagtgataaaggagttgacaacaaataatgccgttgctataatgttcaacatgaacaagggcgttcttcatacagatgttgtatgaagtatgctcttttttattataaaggagagaatgagatggggaattatacacgagaagaagttttacagatggcggaggatgaagatgtagagtttatccgattgcagtttacggatatgtttggaatattgaaaaatatagccataaccgcaagagagcttccaagggcattaaataatgaatgcgtggtagatggatcttttattgcagggatcgcaggagaaaaagaaccggatatgtatctttatccggatcttgacacctttactatcctcccatggcgcccccagcagggaaaggttgccagactgttgtgcgatatttatacaccggacggaaagccaaatgaacgcagctccagatatatattagaaagaacagctgcaatggcagagcagaagggctatacctgctatattgacccggaatgtgaatttttcctgttccatacagacgataatggagtaccaaccacactgactcatgagaaggcaggttatctggatatcagtcctgtggatctgggagagaatgcaagaagagatatggtgctgaatctggaggatatgggcatggagatcgaatcctcccatcatgagactgcaccggcacagcatgagatcgacttcagatgtgatgagatccgtaaaatggctgaccacattatgacctttaaaatggcagtgcggaccattgcaaagcgtcatgggcttcatgctacctttatgccaaaacctaaagtggatgctaacggatccggcatgcatattcggttttctttatttaaagagggcagaaatatttttgtagatccggagaatccacaggagttaagtgaggatgcgtattactttgttggcggccttttggctcacagcagggaaatggctgtgatcaccaatccagtggtgaattcttataagcggctggtgccaggatatgaggcacctacagagcttacctggactacaaacaatcagaattccctgatcaggattccaggtgccagaggagaacatacagggatagagttgagaagcccggatgcggcagccaatccatatcttgtatttgcctgctgtctggctgcaggactggatggaattgaaaagaagacctatcctacaaagtcttccaatcgttccatgtctgaatctgatcagaaagcaatgaatataggaaatcttccggagaatcttcgtgaagctgtagaagaatttgagaacagccagtggatgaaagagattcttggcaaggaattttgtgaggaatataccgctgcaaagaagaaagaatggcttcgttatacaagacaggtgacacaatgggagattgaagaatatctgtatcgtatttaagaatatgaagcaggaatacgaaataccagcgtgaaggtttgtataacaaagacgaaagagagtggcgggtacgtatgaatagcagcattgtaattgcgctgcctaagatcgaagatgcgaaaaaaatacgggcgatcctgatccggtatggtttttctgtggcttccgtgtgcagcacaggtgcaggtgctttggcaagcatgtctgaactagatgggggagtcctaatctgtggctaccatttgtcggatatgtattaccgggatatattggaatatctgccttcctattttcagctgttgctgcttgcatcagccagagtgatcggagaggcgccatcttccgtcttatctgtggaaatgcctatgaaagccagtgatctggtaaatacagttgatatggtactttcacagctggaaagacgatggaaaaaagacaagaaacggccaaagccccgtagctggaaagaacagaattatatatctaatgcaaaatttttattaatggagcgaaatcatctgaatgaagaggatgcataccgttatatacagaaatgcagtatggattccggtactaatatggtagaaacagcacagatggtgctaatgctcttatatgatgaagtataaagtttaagaaaatgcctgaaagggcagcaattcactgtgaatatggaggatgaggaaatgaaatttttggatggtaaatgggaaaagaaagaatgcagctttgaagaacttttaagtgaccacatcctgaatcagcaggcttgtgtggcaggtgcgattcacagtatccgaaatatgggtgaaattgcattcgtaatcttaagaaaaaaagaagggctttttcagacggtgctggaagagggaaaagcaaatgtttctgtccgtgatctgaaagaagccatgaccgtaagggtgacaggaactgtcagccaggaggagcgtgcaccacagggcagagagcttctgatctcaaatctggaagtattgtcatcaccggcagaacctcttcctctggcaattgataaatggaagctgaatacttctctggaagcaaagctgaacttccgttccatttctcttcgtaaccttcaggaaagggcaaaattcaggatccaggaaggtcttacaagggcttttcgagattatctttatgaacagggatttacagagatacacacaccaaagatcggttccagaggagctgaaggcggtgcaaatatgttcaaactcagttatttccataagcctgctgttcttgcacaaagcccgcagttttacaaacagatgatggttggcgtatttgaccgtgtgtttgaaacggggcctgtgttccgtgcagaaaagcataataccaaacgtcacctgaatgaatatacaagccttgattttgaaatgggatatattgactgttttcaggagatcatggccatggagacaggatatcttcagtatgctatggagcttctgaaaaaggattatgctaaggaactggaaatgctgaaagttcagcttccggatgtgtccaggattccacaggtacgttttgacgaagcaaaacaactggtgtccgaaaagtacaaacgtcagatccgtaatccatttgacctggagcctgaagaagaagccttgatcggccgttactttaaagaagaatatgatgcggattttgtatttgtaacccattatccttctaaaaaacgtcctttctatgctatggatgatccggaagataccaggtataccttaagctttgatcttctgttccatggcctggagatcaccacaggagggcagcgtatccatgattaccaggcactgtgtgacaagttagccgcacgaggtatggaaaccgaaggaatggaggagtatctggataccttcaaacatggaatgccgccacatggtggattgggaatcggtctggaacgtcttaccatgcagttgctgggagaggataatgtacgtgaaacatgcctgttcccaagagatatgaacaggctggagccataagaggagatggaaaaatggcaaagatcatagatgatgaaacaatggaaaatgtatgcattctggcaaagctgtccctttccggacaggaaagagaaaaggctaaggctgatatgcagaaaatgctggattatgttgaaaagctggatgaactggatacatctggtgtggtaccactgtctcatattttcgggaatgctaatgtattccgtgaggatgtggtgacaaatggagatgaaagcgtggcaatgctgaagaatgcaccaaaagcaaaggatggacaatatcaggtgcccaagaccataggataggagagaaaaccatggatttggaaaaaatgacagcgctggctctggcggaaaagatcaaacagcatcagatcagtgtggttgatggtgtaaagactgtgtttgaccagatcgagaaaaaagaagacagagtacatgcgtatctggatttatataaaaaagaagcatatacgagagcaaaacaggtagaaaaaggaattgcagacggcacttatacaggcccgctggcaggtgtgcctattgcagtaaaagataatatctgtgtacagggcaagcctgctacctgtgcttcaaagattcttgaaggctttgagcctcagtaccaggcagaggtgatcgatcggctggaaaaggcagggatgatcattatcggaaaaacaaatatggatgagtttgctatgggaagtaccacagaaacatctgcttacggaatcacaagaaatccatggaatctggagcatgtacccggtggttcttccggcggctcctgtgcagcggtagcagcaggagaagcgtacatggcattgggctcagataccggtggttcgatccgtcagcccagctctttttgcggagtaacaggcctgaaaccgacctatggcacagtttcaagatatggactgatcgcttacgcatcttccctggatcagatcggacctgtaggaaaggatgtagcagactgtgcagcacttcttcaggtgatcgcaggtcatgatcctaaggacagtacatcccaaaaaagagaagatcttaattttatggaagctttaaatggaaagatcacaggtatgaaatttggtgttcccaaagaatatctggcagagggaattgatccggaagtaaaggctgcttttatggaagtgctgaaaacacttacagagcttggggcaatcgttgagtttttctcagtaaaaacaatggaatatatgatccctgcttattatatcattgccagtgcagaagccagctccaacctggagcgctttgatggggtgaaatatggatacagggcaaaagaatatgaaggtcttcatgatatgtacaagcgttccagaacagaaggctttggagaagaagtaaaaagacgtattatgcttggctcctttgtacttagctccggatattacgatgcatattatctgaaggctttgcgtacaaaagctttgatcatgcaggaatttaaccaggcatttgaaaaatatgatgtgcttcttgccccggcagcaccttatacagcaccaaagatcggagaaagcctgaaggatccgctggctatgtatctgggagatatttatacagttgcagtcaatctgtgcggattgcctgggatttctgttccttgcggcaaggaccatacagggctgcctatcggcgtacagatgatcggtgactgctttatggagaagaagatcctgcgcgcagcacatgcatatgagcaggcaagaggagattttggaactccggaagaaggaggtgccagagcatgaaacagtatgaaacagtgatcggtctggaggttcatgtagagcttgctaccagaacaaaaatattctgcggttgttctaccgcatttggaggagcaccaaatacacacacttgtccggtatgtaccggtatgccaggctctcttcctgtattgaataaaaaagtagttgaatttgcattaaaagccgggcttgcaactaattgccacattaatcagtattgtaaatttgacagaaagaattatttctatccggataaccctcagaactatcagatttcccagctgtatctgccaatctgtcatgacggctgggtagagatccagacttctgcaggcaaaaagaaaatccgtattcatgaaatgcacatggaagaggacgcaggaaaactgatccatgatgaatgggaagattgttctcttgtagattacaaccgaagtggtgtgcctctgatcgagattgtttctgagccggatatgaggagcgcagaagaagtgatcgcatacctggaaaagctgcgctgcactatgcagtacctgggcgtttctgattgtaagctgcaggaaggatctatgcgtgcagatgtaaacctttctatccgcgaggtgggttcagacacatttggaacaagaacagagatgaagaacctgaactcttttaaagcaattgcaagagcgattgaaggggaacgggagcgccagatcgagcttcttgaaatgggaagacctgtagtgcaggaaacaagaagatgggatgataacaaagaatcttcccatgctatgcgttctaaggaagatgcaaaggattatcggtattttccggatccggatcttccacccattcatatttcagaccagtggatccaggatacgaaggcacagcttccggaattccgtgaagaaaagcagcaacgttatcaaaaggaatacgggcttccggcttatgatgcggaaatccttacagaatccaggcatcttgcggatttgtttgaagaaacagccacgctgtccgggaatccgaaaaaaacagcaaactggtttatgggtgaggtgcttcgtcttgtaaaagaaaagggaatggagccggaaaaggtacattttagtgcaaagcatcttgcagatctgctggatatggtagagaaaaaacaggttagtgcccagaatgcaaaaagggtatttgaaaaagtgtttgaccaggatattgatcctgtggtatacattgaagagaaaggtctgaaaattgttgaagatacaggcctgcttaaaagtactgtgaccaggatcctggatgagaatccggaacctcttgcccagcttcttgaaggtaaggataaggttatgggctactttgtaggactgatcatgaaagaattaaagggaaaagcaaatccggcagatgttcgggaggctcttgctgatgagatcagcaaacgaaaataaaattaaaacaagccaggatgccatatagcagcaggctcctggcaggcaggagatatttatggtaacagtaaatcacaattatcttaaattaccgggcagttatcttttttcaaccatcggtaagaaagtaaaagcatatcaggcagagcatacagatgcaagaatcataagtcttgggattggagatgtgacccagcctttggtaccggcgattatcgattcccttcataagtctgtggaggagatggctcatgcagagacttttcgcggctatgcaccggatcttggctatgattttctgaggaatgccattgcaaaaaacgattatcaggatagagggtgtcagatctgtgctgatgagatttttgtttccgatggagccaaaagtgactcaggaaatatccaggagatcttcggactggataataaggtggcagtctgtgacccggtttatccggtgtacgtggataccaatgttatggcaggacgtacaggtctttacaatacacagcgtgagaattttgacggggtgatctacatgccctgcagggaagagaatggcttcctgccggagttgccggaagaagtgccggatctgatctatctttgtttcccgaataaccccacaggtggtgccattacaaaagagggacttcagcaatgggtggattatgccaacaaaaacggctgcgtgatcatttatgatgcagcctatgaagcatatatttctgaagagaatgtaccacatactatttatgagtgtgaaggtgcaaggacctgtgctatcgagcttcgcagcttttccaagaatgcaggttttacaggtgtgcggcttggctttaccgtaattccaaaggaactggttcgtgatggtgtggcacttcatgatctgtgggcaagacgtcatggcactaagtttaatggtgctccttacatcgtacagcgtgcaggggaagctgtatattctacggaaggcaaggcgcagttaaaggagcaggtaggctattatatgaggaatgctaaaacgatccgggaatctcttgctaatgcaggcttttccgtttcaggtggtgtgaacgctccgtatatctggctgaaaacaccagggaaaatgacatcctgggagttttttgattatctgctggaaaaagcaaatgtagtaggaactcctggttccggctttggtgctcagggcgaaggatattttcggcttactgcgtttggtacctatgagaatacgttggaggcgatcagcagaattgaaaaggaggtttcattatgaaggtaagccgtattgagcatatgtgcgaaggaaatggccatgtgatcattaaggagatcctggaagagccatatcttgcagggaaatgcggtctgtatgcagaagtaacactggagccgggatgctcgcttggttatcatgagcatcatggggaaagtgagacctattatattcttgcaggtcagggagagtataatgataatggtgcatatcgtccggtaagtgccggggatattacctatacttcatcaggcaaaggtcatggattatcaaatacaggtaatacagatcttgtttttatggcactgatcataaaagactgacggacaggctgttgtactcaggaggtacagcagcttttttattttacaggaaattacttcgtaatgttccaatgaagtaaaaaatgtaataggcacattaagtgctgtatccttccggttgcggccaaatggaatgtagcgtataatcaggatatcatacggatgaggagattttagatatgtacagaaaaaatgctgaaaagttacttgaatttataaagaaaagcccttctgcatttcaggcagtggaacagatgaagaaacgccttttgaaaaagggctttacagaattgtctgaaaaggaatgctgggacatctatccgggcggcagatattttacaacaaggaatcattccgcactggctgctttttccataccggaagaaggggcagaccattttcacatactggcaagccacagtgattctcctgcattaaagatcaaagagaatccggagataaatgtagaaggaatgtatgtgcgcctgaatgtggaaccctatggaggaatgctgatggcaccctggtttgacaggcctctttctgtggcaggacgtgtgatcgccagggaaaagggggagattcggcagatcctggtggatatgaatgaggatatggctttgatccccagtcttgccatacatatgaacagagaagccaataatggatataaatataatgcacagaaggatcttttgcccttatacggacttggagatgcaaagggcagctttatgaagcggatcgcgcaggcagcaggtgtaaaagaaaaagacattcttggtcatgatctgtttctatacccaagaactgagggcagtatctggggatctgaagaggaatttgtttccgctccaaggctggatgatctgcagtgtgcttttgcctccctggagggctttctgaagggcaaaaaagaaaattccatctgtgtccactgtgtgctggacaatgaggaagttggcagcagtaccaagcagggggcagcttctacctttttgaaggattgtctccttcgtatttatctgggccttggaaaaagctatgaagaatatttggctgcaatggctggaagctttatgatctctgctgataatgcccatgcgtttcatccaaattatgctgaaaaagcagatcctgtgaatcgtccagtgatcaatggaggtattgtggtgaaatataatgcaaaccagaaatactgcacagatggtcttacaggcgctgtgtttaaggatctttgccagcaggcacaggtgccttatcagatctttgtgaatcgttctgatattgcaggaggttccacattaggcaatatttccaataatcaagcagcactcaatacggtagatatcgggctgccgcagcttgccatgcattcctgctttgagacagcaggggtgaaagatactacttatctgatccaggcagcggaggagtttttcagttgaaaaaaacagagttttcacaatatgaggaggaagtgatccgtcttcggcggcacttccatcagtatccggagcttgctttgcaggagttccaaacttctgcatttatacagaaatatctggaagaactagggtatcaggtcaggcatgtgccgcctacaggtttgatcgcagagcatccctgtatgaaaaacagagaaaaaatggtggttctgcgggcagaaatggatgcacttcctgtgcaggagcttacaggtctggcctatgcatccaagaatgaaggctgcatgcacgcctgtggtcatgatgggatactggcagtggctttgattctggcaaagatcctttccgggcaaaaggattttcctgtggctgtccgcttcttgtttgagccggcagaagagattggagagggtacggtacggatgctggaagggggagctcttgacaaggataagggcaggaaagctgacggatttttaatgttccattatgcctgtgaccagccccttggtatggcagtccacaaagggcaggcctccgctatgatcggcaaaatggaaattctgataaaaggaaagtccagtcactggtgtcaggcggaaaaagggattgacagtatttatgcagctggtcttgttgtccagaaggttcatgagatcagccgcgattatgtgggaaaaggacctcatgttgccgggatcggcaccatacatggcggggaatatcctaatattatttcagatcaggtgaagatggtgggaaatatcagagcctgctatagagaggattttgaacaattaaaaaaggccctggagcaggccttccataaggtggaagaagtaaccggggcacaggtatgtttaagcttcccaaaagatccggtgctgccctttgccaatgaccctactcttactgccatagcagcagacacaggaagaacaatattcggatcccattttctgctggagggagaagatgaactttttcttacaggagataatgcatatcggtattatcaacagacaaagggactattctgcgtttttcttgcagcagttcccggagaggagcatccatttcatcatccgaagtttcagatcgatgaaaggatccttcttcctagtgtgcagaccctttatgagattataagaaaatatgcataacaggcattcgggaaagacttaaagcatacccagggaacggcacaggaacagccagccggtaagggtaaaggaacttagcaaggtggtaagcataactacacctgaggtaaaggaaccttcataatccgtatttttcgccataatataacagctgatagtagttgcagatccaagcatgatcagaatggccgccagtttgtctttagtaaaaccgaaatgcatggctgccggcaggaaaagtgctgtatatccaaccagcttcaaaaatgtgcaggcaagtactgcacggatcctggaaaaggcttttctgaattcaagtgcgccgcccattgccatcagtcccagaggagtggcagttttggccagatttccaacggtagtagagagaatttttggcatgggcaggcggagcagggaccagatggagccggcaacgatcccaaggattatgggattggtggcaatccctttcagagtgcgtttgatcactggcatggaaattcctgaattgccaggacggaacagacacagtacagtgactgccataatgttataaagaggtacgctggcaacgatcataaggggagccattcctgcatctccatacatattctggataatggcaataccaagcacagcagcactgctccgataggatgcctggacaaattccccttgaatatccctgggttttaatagaaaggaaaagcctattgagatcaggatgctgatcagtgtggcaaaaaaacagaaaagcaccatcttgccgtcccatacgctgtagatgtccatatctgcaatgtcctggaaaagaagagcaggaagggcggctttaaaaacaaatttgttcattttacttacaaaagactcatcaaaaagtccggcttttctgaaaaaaagtcccaacattaaagtgagaaagataggaatcgttgcattaagacaaaaaatcagattttccattttagtatttgttcctttctgtagtaagatgtgtcgtggttttattatagccttacagtgggaattgtcaaattttccagaatgtgttattctttcggagtatagcaaaatggaggaagattgtatatatgagatacggtaagatacgtatagaagatggttatctggcatacagccgccacatgatgctgaacagccttccctgtaaggacattgtgtgggcttatatgcgtcgggagggagacgattcccccggaggaagtgtgaaacagatcatttccaactatctggttgttgttaccaagcgtaaaaaacgttatatgtttgacatgacagagaaagaggtacaggaatgtctccgccttctgaaagctctgaacccggagatggcagttggctttccaagaggtggcaggcttccgttgcaatcccttcccaataccagggatctgggggcattgactgccagggatggccggcatattctgccaagaaagcttctgcgcagcggagaactgtatcatgcttcacaggctgataagcagctgcttacagaagagtatcgggtaaaaaccgtggtagatttccgctccaatattgagcgaaaggaaaaaccggatgtgatcctgcgaggtgtggaatattaccacattcccattttggatgaagagaatctggggctgtttggagaaggcagggtttgtaatcggcttttgacctaccaaggagacggtgaaaagtacatggatcagatgtatgagaatctgatccgtgaccgttactctgtgaatcagtatgccagatttttagatgtattgatccgtcataaagaaggggcagtgctatggcacagctgggacggcacgggcagggcaggagtggccacggctcttttgctttgtgcccttgatattccggaggacactgtaagagaagatttcatgcgttccaatgcctatttggaagcagagcttcagtatatgcttttatatttggaagcaatgggcatggacagccccagggttgccgagaatatgagtatctttttcagagtaagggaatcctatattgatcgtgtatttcagatcatccgccaggaatacggtactgtggaacgtttccttagaagaggcttgtatcttactccaagagcggtggaagagcttagagataagtacctgatttgacttttgagccaggaattaaaaatttttaatgaattaatgcaataaagtggtatttcgcattgacaaacagaattttgttgctataatgataaaaaagtaaaaagcctataggtggcgggagggagtcgattttgcagaaaagaattttatctttgctggtagacaacacttccggtgtgctgagccggatcgccggtctgttcagccgccgcggctataatatagacagcattactgcaggagtgacagcagatgagaattttacacgcattacagtagtatgcagtggtgatgatgccattctgggtcagattacgaatcagctttccaagcttgtggatgtaagggatattaaagttctggatccacagcagagcgttgttcgtgagacagtgctggtaaaagttgcagcgaagccggagcagcgtgatgggatcatttcagtggccaatattttcagggcaagcattgttgatgttagcagagattctctggtcgttgaaatgacaggaagcaagagtaagctggaggcctttatcgatcttatgggtgactatgagatactggagctggcaagagccggtgtgacaggactttccagaggcagcggaggagtttgctacttctaaacagagaaagcccacagaagcagttcgctaggagatgtctgtatcccagggtattgggcatactcttaacaatatatagacaaacagtaggaggaaataataatggcagcaagaattttttatcaggaagactgtaacctttctttgcttgagggtaaaaaaattgcaatcattggttacggcagccagggtcatgcacatgcactgaacttaaaggattcaggatgtgacgtgatcatcggactttatgaaggaagccgttcctggaagaaagcagaggagcagggctttaaagtatacacagcagcagaggctgcaaagcaggctgatatcattatgattctgatcaatgatgagaagcaggcagatatgtataagagagacattgagccgaacctggaagaaggcaatatgctgatgtttgctcatggcttcaatattcattttggatgtatcgtgcctccgaaatttgtagatgttaccatgattgctcctaagggacctggccatacagtaagaagtgagtatcaggctggtaaaggtgttccgtgtctggtagctgtagagcaggattacacaggcaaagctcttgatatggcacttgcatatgcacttggtattggtggagcaagagccggagttcttgaaactactttcagaacagagacagagacagacctgtttggtgagcaggctgtactttgcggcggtgtatgtgccctgatgcaggctggatttgagactctttgtgaggctggatatgatccgagaaatgcttactttgagtgtatccatgagatgaaactgatcgttgatctgatctatcagtccggatttgcaggtatgagatattctatctctaatactgcagagtatggcgattatattacaggaccaaaactgatcacagaagatacaaagaaagctatgaagaagatcctttccgatatccaggatggtacttttgcaaaagaattcctgcttgatatgagtccggcaggccgtcaggttcacttcaaagctatgagaaagaaagctgcagagcatccgtcagagaaggttggcgaggagatccgtaaactctacagctggaatggcgaggacaagctgatcaataactaatcgttatttacaaaacaggttttacctgtcttatatttcaattaccggaagaactgtctaaggagaggcagttcttcttctttttttctgcatacaaatcctatctgccgtactggaaaggcaaagcccataggtacttccacaagagcaccgcctgccaggtcatcttctacaaattcccggattacacaggcaatcccaagcccgatctttgcaaattggatcagaagatccatagatgttacctccagaatatggcttaattctatacggttttcttttaaaagggaatttactgactggcgggtgatattatcttcatccagcatcataaacgttgccgtatggatcaaaggttcagaagggaaaagctgctgctggtttttcagatattgtctggttgccacaaaggtgtcctggataccaagcagtggacggaaatgataaccggtaagcttatggggtctgccgatcagtccaagatcgattttgttgtcatctagaagtttcagagtctgataagtggactggcaggaaatattaatacgtacctgagggttcacagagatgtagttttgaagataggacataagtacgtatttacacaaggtggagctggctccaagccgcagccttgggatctctctggaatgattatgaaggatggattcttctccttctccaagtaaagagaaagcttcttttactttttcgtaaagaagttgtccgtctgcagtcagttccactcctcttgaattacgtttgaaaagaacggtatccagattctgttccaactttttgatggcatggctgatggcgggctggctgatgtacaattccctggctgcctgtgaaatatttccggtacggccggtagcataaaaaatgtggtatagtgaaagattttcctgcataaaagctccttccataaataatatttatagcaagtatgataaatatgtattttcattatagcagaagctgtgatagaataccaatataaattcaagtcgagcagccgcgagacttggcgcgtgattctggtcagcgtaagctgacatattctttacagaatcactgcgcatcctcgcggagcgtttatctcagtcggagattggactcccactgagacgaacttgctgttactcaccacctgaaagaggtgggagtcttctcgactgagataaatgctgttcacaaaaatatcctgccgggagaaagtggacagctgcacagaaatgttacaggaggaatatgagaatgggaatgacaatgacacagaaaattttggcagctcatgcaggactggatcatgtggaagcaggacagctgattgaagcagatctggatctggtgctgggaaatgatattacttcaccagtggctattcatgagatggacaaaatgactgttgatacagtttttaataaagataagattgcactggtaatggatcattttatcccaaacaaagatatcaaatctgcagaacactgcaaatgtgtcagagagtttgcctgtcgtcatgatatcaccaattattttgatgtgggacagatgggaattgagcatgcgctgcttcctgagaaaggtcttacggttgcaggtgacgtagtgatcggtgcggattcacatacttgcacctacggcgcactgggtgcattttctactggtgtgggaagtacggatatggcagccggtatggctaccggaaaagcatggtttaaagttccggcagctattaaatttaatattgtgggcaaaccaaagaaatgggtcagtggaaaagatgtgatcttacatatcatcggcatgatcggtgtggacggagcactttacaagtctatggagtttaccggtgaggggattaagaacctttccatggatgatcgttttacaattgcaaatatggcgatcgaggcaggaggaaagaacggtatcttccctgtagatgagctgactaagcagtacatgaaggagcattccgtaagaacgtataagatttatgaggcagatgaggatgcagtttatgaagctgagtataccatcgatcttggtgaactggagcctaccattgcattcccacatcttccggagaatacgaagactatttcacagatcacagagcctgttgtgatcgatcagtctgtgatcggttcctgcacaaacggccgcattgatgatcttcgtgtggcagctcagatcctgaaaggacgtaaagtaaaaaagggcgtgcgctgcatcgtgatcccggcaactcaggccatctaccttcaggctatggatgaagggcttctgaagatctttattgaagcaggtgcagttgtaagtacacctacctgtggaccttgccttggcggttatatgggtatcctggcagcaggagagagatgtatttccactaccaaccgtaactttgtaggccgtatgggtcatgtggattcagaggtatatctggcaagcccggctgtagcagcagccagtgctgttacaggtaagatttctgcaccggaagaactgggattataaggaggaataaaagatgcaggcaaaaggaactgtttttaaatatggagataatgtagatacagatgtaatcattcctgcacgttatctgaattcttcagatccggcagaactggctacccactgtatggaagatattgataatacatttgtgaaaagggtgaaaaagggagatattatcgtagcagataagaactttggctgcggttcttcccgtgagcatgcacctatcgctattaaggcagcaggagtaagctgtgtgatcgctgagacctttgcacgtattttttacagaaatgccatcaatatcggacttccgatcattgaatgtccggaagcaagcaaggggattgaggatggagatcaggtagaagttgattttgattccggtatgatctacaaccgcacaaaaggtacggagtttaaagggcaggctttcccggagtttatgcagaagatcatcaaagcggaaggccttgtaaactatattaacagcaagaaggcataagattcagctaacttttcatcatacttatacatcctgagagtgcgtaagcagaataaatctggcaaagtacaggatctgcaattgcaataatcctgcttccgtcattctgcatccgttctctcaggattttctttgtttttgataaatgtaaagaatattatgagctttgtcaaataagaaaatacagagaggttcataagaaaatgcataaaagtaaaaaaatagttgctttttcaggtgaatgctgatataatattttctgttgcggggtatggcgtagcttggtagcgcgcacggctgggggccgtgaggtcgcaggttcaaatcctgttgccccgattaaaattaaattcagtaaaatcaagagtttggagcgctgcactgaactctttttgtttgctttttgattgcctttgattacctcattgctccaatctattgtatttacgatttttcagtgttttcaatgatttccgttttgcaattcaagtttgtttacagtctgaaagccacccgttcgtgggtggctttgtgtaacagtaaacttttttgtgaaatttatttctctgtgctatcagcatcaattacagattgaatctgtttcatcagagcatcgtaattgtcctggttgtcaattccgcctagcataggatctcctacaatattcccatttcgatctactaaaattgttgtaggaaatgccataatacttgaggcatattttcctgcatcagaatcagagtcaatggaaagattgcggtattttgcaccctgactttcaagaatcgaagcagcttctttgatcgcatcttcattcccatcaaaagtctctgtgttgatgccgactacttctccgcccatggatttgatggcatcatttaattcgttaagcttggataattcagctacgcaaggtttgcacccggtaaaccagaaattaacaactgttactgcattcttggaaaacagactttcatcaactgaatttccatcgaaatcttttccggaaaagttattaaaaggagaggcatcatctgacgcagtttttgtttctgaagtgtctgtttctgcatttttcttttcaagttctgcaatctgttcttcaatttttcgtatggtttcaatatcatctgtaagggtttgatactgctcatctgtaaaagaatccttgtttgattcaactgtatcagaaagaaaatctgcgtaatttccacttggatcggcagagcttttactcatcagaccaaaagctttgtcccatgcatctttgtggtctgcaaaaagctggttttcctgctgatacaaattgtcaagctctgaatctgaagtattgtcagatggatcagtgtcagtttcttcataagtaatttgggcggtatctgatcctgtattttctgtttcagtattttctgtgtctgcttttacagcttctgttttatctgcttccgtggtttctgtattagtggtttcagttttggaagattcagttttagcggattcggtttttgcagtttccttttccgtagtttctccgttacatgcggtaaatgataatgcggtgccaagtgctaagagtgtgataagtactttttttgctttcatgataataaactcctttaaataattataataagattaattagataactgtattaattaggtgattgtttcttattgctggctattgcagctgtcctttttggtacatgttttccccataaactggtaatggatcgcatctgtgggacaggcctttatgcaggctccgcaccggatacattccatatggtttggtgttttgcgtacatccacgtccattttacatgcttttgcacatttgttacatcccacgcatttgctgctttccacctgaatgccaagaagggataccttattaaacagtgaataaactgcaccaagaggacatatccatttgcagaaaggtctgtaaaacaggatgcttaaaataactacggtaatcaaaataagacacttgaacgtaaataaatttcccaatgcagaacgtatagctgcatttcccaatgacaatggtattgcaccttccagcacaccttgcggacaaatatatttgcagaagaatggatctcccattccgatcgagttcgttacaagcattggcagaagtatgacgaaaacaataagaatgatatatttcaggtatcttaaaggcttcagcctggctgtggataatttctttccgggaattttatgaagtaaatcctgaaaccatccaaacggacacaaaaatccacagataaatcgccccagcagcacaccaagcaaaataaaaaaaccggttatgtaatatgagaatttaaacttggatgagccaaccactgcctgaaatgcaccaattgggcatgcacctgtggcagcaggacaggaatagcagtttaatcctggaacgcatacagttttcgccttgccttgatatatttggcctttgaacacattgggaatgtgaatgttggtaagaagtgtggcagctgcctgtatccacccacggatctgtgcaattttttttgatcgtaaatttgtttttttatccaattccaacacactccaaacataattttattgcttttcccagtacggtggcggcttcgcctctgatcgcaccatagctaatcatagctatgcctgtaataagtaaaacaagttgagacatttttttacacttcaaaatcttattactcctttcgttttggcagacatgatacttttttaatttatggcatatatgccatacttttcttttcttgcataatcgttgctcttttcatttcctgcatatattgaccagctgatgtttgtattatacaataactgttgtaaaatttctgttaagaagcaggtggaaaatttgagattattaattgttgaagacgagaaaaaattatgcgacactgttgcaaaaagtttatatgatgcaggatatgaggtggatacctgttacgatggggaagaggcgcttgattatattctggcagagaattatgatctgatcgttttggatctgaatcttcccggtatggatggcatggatattttaaaagaactcagaaagaaaaatgaggatacaaaggttcttatattgtctgcaaggagccagatcgcagataaggtggaagggctggatgcaggggccaatgattatatggaaaagccttttcatctgcaggagcttgaagcacgtatcagaagtcttacacggcgcagatttgtacaaagagatgtttgcctgaaagcaggagatatacggtttgataccagaaagcgtgaggcttacgtaaaagaagaaaaagtacatttaaccagaaaagaaaatgggattttggaatatatgcttcttaatcagggtcggccgatcagtcaggaagaacttatggaacatgtatgggatgcgtctgtggacagctttagcgggtctatccgggtgcacatgtcttctcttagaaaaaagcttaaggcagtgcttggttatgatccgatcctgaacaagattggtgaaggctataagatacgagaggaatcagagcgatgagaaaaatgtcacttcagtggaggattacgatcctcactacgctgtttattgcaattatatgcggatgtcttaccctgtttgtttataagaatggtgtatattatattgatttgctgcaggatacagttgatgctaaaagcgatcagggtaatggtaaggaaacggatgaaatatttattaatattcctgatgataaatggaatgattttgcagatgatttttctattcaggtatacaataacaaagctgattataagaaaagcagtctgatgttttcaacgctgctggcacttcttggcggcgttgttacatattttatagttggacatgcattaaaaccactaagaaaaattgcagataaaatggaagaagtgcaggcacaaaatctgtcagactccaggctggaagaaaatgaggttaaggaattaaaccagatcagtgtgtcatataacaagatgctggaacgcctttcagaagcatttgatgtacagagacaatttactgccaatgcagctcatgagcttcgcacacctttatcattgatgcaggtacagctggatttatatcattccactcagcataaacataatgatgaatgtacagaacagacaatcactatggtcatggaacagaatgaaaaactaagtaaaatgatcaagacccttttggatatgagtgagcttcagagtgtggaacgtgatgatattatcatggtggacgcacttgttgaagaagtgatcgcagatctggaaccgcttgcaatagaaaagaatatccggcttatcggaaattgcaggaatgcaaatatgcagggaagtgatattctgatttacagggtggtatataatctggttgagaatgcaataaaatataaccattcaggaggtcaggttacagtcacctcttatcaaaaagacaaaaacgtttatctttcggtagaggatacaggaagtggtattcccagggaacttaaggagcgggtgtttgaaccatttttccgcgtagacaaatccagaagccgtgaactgggtggtgtagggcttggccttgcactggtacatgaaatcgtgcgtgctcatgatggaagcattacggttaaagacaatccgtcaggcggaacgatttttgaagtggtgctccctcagcatcttcagcctttgtccggcaaataatgggatgggtctacacaaaaaaacgaaacaatgtactatctatctataaaaaaataaaatgcttgatttttacacctttctggtgtatagtgataaagacttcaagagttagagaaattctgactcttgatcataatttcatagtttaaatgcacagatgaggaatagtacataaggaaccgaagcacagagagctgttggctggtggaaagcagcggatggaatttatggaactcgcctcggagcagctgatcccaaatcctgacttttattgcacagatcagagcgttatggagagtaggagcagacggtatccaccgttacatggaatggatataaggatgaattttcgttccgtatccagtgagtgtatgaattttattcatgaaataagagtggtaccgcgtagatgatcagatcttccgtctcttgcagaaatgcagaagatggaagattttttttgtttcattaataatgacaaagaaaaaagaaatggaggaaataataagatgatgaacccaggtaaatatcagaaacagtattatatgccgccggaagtatgtctggattggacgaaaaaggagtatgttgacaaggctcctgcatggtgttctgtagatcttcgtgatggcaaccaggcgctggtgatccctatgagtcttgatcagaaggtggagtttttcaagctgctggtacagattggttttaaagaaatcgaagtaggatttcctgctgcatctgaaacagaatatactttcctgcgcacactgatcgatcagaatctgattcctgaagatgtaaccatccaggtactgacacaggcaagagagcatattatccgaaagacctttgaagcagtgaaaggtgcaccaaaggccattgtacatgtttacaattccacatctgttgcacagagggaacaggtatttaaaaagtcaaaagaagagattctgaaaattgctgtagatggtgccagactgttaaaagaacttgctgatgaaacagaaggcaatttccagtttgagtacagcccggaaagctttaccggtacagagccggaatatgcccttgaagtctgcaatgcagttctggatgtatggcagcctacaccagataataaatgcatcatcaatctgcctgtaacagtagaactggcaatgcctcatgtatatgcaagtcaggtagagtatatgtgtaaacatatgaaatacagagataatgtgatcgtatcccttcatcctcataatgacagaggctgtggcgtggcagatacagagatgggtattctggcaggggcagacaggatcgagggtactctttttggaaatggagagcgtaccggtaacgttgacattgttacactggctatgaatatgtattcccagggtgtggatccggggcttgatttctctgacatgccgcacgtatgcgaggtctatgaggcatgtacaggaatgcacatcaatgaaagaagcccatacagcggagcacttgtatttgctgcattctccggatcccatcaggatgccattgcaaaaggaatgcactggatcgaggaaaaggatcctaaccattggacagtgccttatctgcctattgatcctacagatgtgggacgtaattatgatgcagatgttatccgtattaacagccagtccggaaaaggcggcgtaggttatatcctggaaaccaagtacggtttgaatcttccaccgaaaatgcgggaggctatgggttatacagccaaagctgtatccgaccatctgcataaagagctccatccggatgaaatcttcggactgtttaagagaacctatgaaaatgtagttgagccatatagtattcatgaggttcatttccagcagacagaaaatggaatttccaccagagttacatcaaccttcaaaggaaagacgattaccacagaagcaattggtaacggacgtctggatgctgtcagcaatgcattaaagaaagcatacgaactgaagtattctctggaagtatatcaggagcatgcattggaaaaaagttcaagctccaaggcaattgcctatgtgggaatcaagaagccggatggaaccatggcatggggtgcaggcgtggatccggatattatccgtgcatccattgatgcccttgttacagcaatcaataaccgctgattccgcagattgcatacacaaaagaacagcagtcaggggaattttacttgacattgttgtttcatatgatagactaaaatctagttttataagtttttctattagtttaaatgattcaggaggaataaattatggctgcaccttataatcacagagccattgaagctaaatggcgcaccaaatgggaagaaaagcccattaatgtgaacgatggcaaaaagcccaaatactattgtctggatatgtttccatatccatccggaaatggtcttcatgtaggccattggagaggatatgttatttctgatgtatggagccgttacaaaatgctccagggatattatctgatccatcctatgggatgggatgcatttggtcttccggctgagaactatgcgatcaagatgggggttcatccggcaatttccacagcatccaatgttaagaacattaagcgtcagatcaatgatatcgcagcaatttacgattgggatatggaagtaaataccacagatcctaatttctacaaatggactcagtggatctttgtccagatgtttaagaaaggccttgcttatgagaaggaattcccaattaactggtgtccttcctgtaagacaggacttgcaaatgaagaggtagtaaatggctgctgtgaaagatgtggtgctcctgttaccaagaagaatcttcgccagtggatgctgcggatcaccaaatatgcggaccgtctgttaaatgacctggataagcttgactggccggaaaaggttaagaagatgcagacagactggatcggcaagtcttatggcgcagaggtggaattccccatcgatggaagagatgagaagatcactgtttatacaacaagaccggatactcttcatggcgctacatttatggttcttgcacctgaacacgcccttgccaaatcccttgcaacggatgagacaagagaggcagtggagaaatatatctttgattcttccatgagatccaatgttgaccgtatgcaggacaaagagaagacaggcgtatttacaggaagctatgccatcaatccgttaaatgggaagaaggtacccatctggttgtctgattatgtacttgcagattatggtacaggtgccattatgtgtgtacctgcccatgatgaccgtgactttgagtttgctaagaagttcggtctgcctattgtccaggttattgcaaaagacggtaaagagatcgaaaatatgacagaagcctacacagatgcggtaggcacaatgatcaattccggtgactggaatggcatggagtcttctgtactgaaaaaagaagctccggagatgatccagaagaaaggctttggccataagactgtgaattataagctgcgtgactgggtattctcccgtcagcgttactggggtgagccgatccctatcgttcattgcccgaagtgcggagcagtgccggttccggaggatcagctgcccctgcgcctgccggaggtagaaagttatcagcctactggcacaggagagtctccactggctgcaattgacgagtgggtaaatactacttgcccatgctgcggcgcacctgcaaagagagaaacaaataccatgcctcagtgggcaggttcttcctggtatttccttcgttatgtagataataagaatgataaagagctggtatccaaagaaaaagcagacaagtacctgcctgttgatatgtatatcggtggtgtggagcatgcagtccttcaccttttgtattccagattctacaccaagttcctgtatgatatcggggcaattgactttgatgagccatttaagaaactgttcaaccagggtatgatcactggtaagaacggaatcaagatgagtaaatctaagggtaatgttgtatcgccggatgatcttgtaagagattatggctgcgattccttgagaatgtatgaactgtttgtaggaccgccggaactggatgctgagtgggatgacagaggtattgatggcgtatccaaattcctgaagagattctggaatcttgcccttgacagtattgagaaagatgttcctgcaaccaaagagatgataaaagtacgccataaactggtttatgacatcacgcagcgtctggaaagcttcagcctgaatacagttatttccaaattcatggagtataacaacaagctgatcgaactgtccaagaatgctgatggagcagtggataaagagacgattgaaacaatgaccatccttctggctccttttgtgccccatgtggccgaagaaatctgggaaaagcttggacatgaggattctgttttccatgcacagtggccggagcatgatgaggaagcaatgaaagatgacgaggtagaggtaccagtccagatcaatggaaagacccgtgttgttatcagtatttctgcagacagctccaaggaggatgcactggcaaaaggccgtgaagcactggaaggcaagcttacaggtaatgtgatcaaggaaatctacgttcccaagaagatcatcaattttgtaatgaaataaaattactgctgtgaaaaaaatgcaatatgtaaattgcaatcaatagaataaaaaatacttgcattttaaaaacgcaggctgtataatacacgaaaaggcaaaggcgccggagagatttctcctgcgccttttttcgtattcagaaggtatgaatgatctgtatgggcatcacttgaatgcgactttattacatttaaaaaaaatatgccatgctgataaagttttacttgattaaagcataaaagcgtggtataatttcagaaaatgtacgagatgtaaagacaaacgtctttgctatagagacaaaaggaggagaatgaattatgaagaaaaaaatagtatccgtaatgatgacagctgtagtagctgcagcaactgtatttagcgcagctgtacctgcatttgcagcagacacagtaaagatcggtgtctatgagccggcatccggagacaatggagcaggtggcaagcaggaaacacttggtatccagtatgccaacagtgaaacacctaccgttgagatcgacggtaaagagtataatgtggagcttgatattgttgataatgaatcctctacagataaaggtccttccgcagcttccaccctggtaagtgacggagtatccatcgttcttggatcttatggttcaggcgtatccattgcagcatctgatattttcaaagatggcggtgttcctgcattgggagttacctgcaccaatccacaggtaactcagggaaatactcattatttccgtatctgcttcctggatccattccagggcacagtacttgccaactttgcaaaagacaaatttgaggcaaagaaagcatacgttcttacgaagttgggagatgattattccgcagggcttggacattactttacaaaagcttttgaagatcttggcggtgaagtggttgaggaaaccttcccagatggtaacagtgatttcacatcttatatcacatctgctaagaatgcaggcgcagacgtattctttgcacctacctctacagaggcagcagcactgatcattgagcaggcagcagcacagggactggatcttcctcttcttgcaggtgatacctgggattctaatgttatcctgaaagctgcagaaggcaaggatgtacaggtatatgtaacaaccttctatcaggagggcggtaacgaagattttgataatggcatgaaagaatttatcaattctgattccaagaacctggcaaacaacggtggtgatgatacgatcgcagctgtatctgcaatgggttatgatgcatattacgtagcactggaagcactgaaggctgcaggctccactgatccagctaaagtaaatgaggcactgtgggatgtgacttatgaaggtgtatgtggaaaggtacagtttgattctgaaaacggagatgcacagagagataccgcatatgtaaaaactgctaacactgagactggagcatgggactttgttggtgagcagggtgtagaataataacttcaggacttgatgaatttgatagcacaggaggcggggtacaagttcccgcctttcctgtgctaaatggaaaaatactgtaacgaaaaaggaggattcctctatggaatggttcaatcagaatctgccatattttctggcaggtatttctgtaggcggacagtatgccctgatcgccattggatatacaatggtttatggtattctgcgtctgatcaactttgcacatggtgatatttttatggtagcaggtctgatcatggtttacttatcagcttcactgcctatttacatatcgatccccattatgatcgtagccactgttattattggttttcttattgaacgtgttgcttacaaacctcttcgccaggcgcccaggatgtcgatcatgatttctgctatcggagtttcttatcttcttcagaacctggccctttatattacaggaggcttggcacagcagtatccggcaattccgtggatcagtgacacgattgagattttcggatctgttacaaaaagagttactgtgatcacaccgatccttaccattgttcttgtttttgcactggtatttctaatcaagaaaacaaagatcggtatggcaatgcgtgcagcatccaaggattttgaaacttcccagcttatgggaattaagattaattccgtgatcagcatgacttttattattggatcatttcttgcggcagttgccagtcttctgtatttttccaattatacaggagttgttcccacatctggtgctatgcctggcctgaaggcctttgttgccgctgtatttggtgggattggctctatcccgggagctgtgatcggggcttttatcattggtatctgcgagaatatcattaaaggaatgggtatgaccaccttttcggatgcatttacctttgcacttctgatcgttattctgattgccaagccaacaggtttgtttggtgagaaagtcacagataaagtctgaaaaggaggggatattatgacaaagaaaaaagaaacgatcataaatgttgccctgattgcaggacttcttgtgattttatacattatggaacagctaatgaatcctacagacatgatttttacagtcctgaaaaaaggtgctatttacgcactggtagctgtatccatgaacctgttaaacggctttacaggtctgttttcccttgggcaggcaggtttcatgcttctgggtgcatatacatacgggatccttactattccgtcagaacaaagagaaagcgtttaccagtattttgatggcggcatcgtacagtttgcagttcctgtggctataggcatcctggctgccggtgtggtagctgctatttttgcatacctgatcggtcttcctgtacttcgtctgaaaagtgattatctggcaattgccacacttggttttgccgagatcatccgtgcagtgttccagtgggataagctgggaccacttaccaatggttccaaccttttgagaagctatcctacgttcaaaagtgtgctgttcccgtttattgtatcagggatctgtattgctgtgatcgtgatgctgatcaattctacttacggaagagcatttaaggccattcgtgatgatgagatagcagcagaggctatgggaattaatctggcccatcataaaaggatcgcttttacagtcagttccttttttgcagggatctcaggtgcccttcttgctatgtaccagacaaccatccaggcttccatgttcaagtctgcaatgacttatgagatcctgctgatcgttgtaatcggaggtattggctctgtgacaggaagctgtatcagttctttcctgtttattacctgctctgagtggatccttagatttctggataatgatacttatatcggggatttccatgtaccccttcttcggtctggtttccgaaaggttgtattttctattatcattatgatcattgtactattcttccgacagggtatcatgggaacaaaagagttttcagtggcagggatccggaacttttttgtgcgaaaatccaataaggaaaaagggaggaaactccaatgagtgaacatgtgctgaaagtagaaaatgcaacgatgcagtttggcggtgtggttgcagttgataatatgaatattgttgtagataaaggtgagatcgtttccctgatcggtcctaatggtgcagggaaaacaacggcttttaatgtggtcaccggtgtttatgcaccaaccaatggggctgtatattttaatggaaagaagatcattgaaaatcatccacagggtaaaatgaagaaattataccaggggcagaatgcaggcaaatatactcatgtgcttgcacctaccccggataagatcacacagcttggaattgcaaggaccttccagaatatccgcctttttaaaagccagacagtatttgagaacattctcattgcaaaacatttgagaagaaccagtaatctttttactgccactttccacctgaacggaaaagaagagcaaaagatgcgggaggatgcaactcatctgttggaaatcgtaggtttaaaagatgagaggaatgagatggctacctctcttccctatggaaaacagagaagactggaaattgccagggcgctggccactaatccaagcctgcttcttctggatgagcctgcagcaggtatgaacccacaggaaaccgatgaattgacggcttttattggagaaatccgtgataattttggacttactatttttatgatcgagcatcacatggatctggttatggagatttccgacagaatttatgtgcttgattttggaaagcctattgctgaaggtgttccggaagagattcagaataatcagcgggtaattgatgcttacctgggaggtgtagcagatgagtaatgtactggaagtaaaaggactgtgtgtttcctatggaggcattcaggcagtaaaagatatcagctttgtagttccgaaaggtgaagtagttacactgatcggagccaacggtgcagggaaaagctctacacttcgttccattgtaggtcttgtgaaaccaacccttggcagtgttcttcttaacggaaaggaaatcgccggaaaaacaccggaaagtattgtatcccaggggattacccttgtgccggaaggaagaagggttttcgccgacttgacggtgcttgagaacctgaaggttggagcttacctaagaaaggacagcctggatgaagatatccgctggtgttatgacctgttcccaagactgaaagaaagaagctggcagctggcaggtactctttccggaggagagcagcagatgcttgctattgcaagggcactgatgagccgcccggatgtgatcatgatggatgaaccctctcttggactggcgcctattgttgtacgtggagtgtttgatattatccgtgagatcaaccgtcagggtaagacaatccttttggtagagcagaatgcgaacatggcattaaatgcagcacatcatgggtatgttatggaaacaggacggatcacgttgtcaggaaccggcaaggaactgtctgagaatgattccgtaaaggctgcttatcttggaaaagcaagaaaataatgttacgataagaatgccgggaaaataatcccggcattactcgttataaagtgcataagaaatattaaggatgcagcagatacacgggagcggatcacaggatctttgtggtccacttgctgcagtcccatacctgagaaacaatatcttggtagaattccggttcatgacagataagcaggatactgccccgatattcaagaaggctctgtttcagggcctcttttgcgtccacatccagatgattggtcggctcgtcaagaagcagcacattggtttctttattgacaagcttgcacaggcggacttttgcctgttctccaccgctgagtacacgaacctggctttcaatgtgtttggtggtaagtccgcatttggccagtgcagaacgcacttcatactgggtataggatgggaattctgcccagatctcatcaatgcaggtggtcttattgtcgccctttacttcctgttcaaagtatccaatctgcaggttgtcccctaattcgcaggaaccggaaaggggcgggatcagacccaggatgctttttaaaagtgtagttttgccgatgccgttcgcaccggtaagagcgattttatgccctctttccatagaaatggtaaggggcttggacaagggttcgtcgtatccgatcacaaggtctttagtttcaaaaatatatttacctggtgtgcgccctgctttaaagtgaaattccggcttgggcttctctgcggcaagctggataagatccattttatctaactttttctgcctggacatggccatatttctggtggccactcttgctttatttctggcaacaaaatccttaagctcgctgatttcctgctgctgttttcggtaagcagcttccagctgggctttttttacttcatatacctcctggaaatgggtataatctccaacataacggttcagctcctgattttccatatgataaaccagattgatcacatcattcaggaaaggaatgtcatgggagatcaggataaaagcattttcataatcctgaaggtagcgtttcagccaggcaatgtgctctacatccagatagttggtaggctcgtcaaggagcaggatatccggcttttccagaagaagcttggcaagcagaacctttgtacgctgaccgccgctaagatccgttacatcccggtcaaggccaagatccagaagccccagtgcccgggcaacttcctcaacctttgcatctattacgtaaaaatcatgaagagtcagggtatcctggatagtaccaagctcttccatcaggttctccatttcttccggagacgcatcccctagctgatcacagatactgttcattcgttcttccatctggaaaagccaggaaaatgcagattttaatacatcttcaatggtcattcctgccaaaagtacagagtgctggtccagataaccgatccgtacatttttggaccattctatcttaccttcatcaggcatcagttttcctgtaacaatattgaaaaaagtagatttgccctcgccgttagcacctacaaggccaatgtgctccccttttaaaaggcggaaggacacatcatgaaagatggctctgtctccaaaaccatgggtcaaatgttctacgtttagtatactcataaaatgaaactcctttgtatttgaaccaatgtgcttgttctaaaagaattatgcttcggaaagagaagaaatatccggaacagccatcagagaatagttggtgtaatataccacaaatcctggctttgcgccagctggtttttttacatttttcttttgcaggtaatcgatttctactttaggggcagtacggccctgagaataataggcagccagactgccagcttcttcaaaggtgcggtccggaagagtaccatcctttgttttgactactacgtgggaacctggcattttctttgcatggaaccaccagtcgtttccggatgcgaatttgaaagtcagttcatcattctgataattgttctttcccacatagatgtcatacccgtcactggatatgtaatggaaaggtttggattttgtctgcattttggcaccttttttggaggtataatgctttttgatataaccaaattctgtcagttcctctttaatctgggatagatcactttcctcgcgggcaatatctaatgcattggaaatagattccagatgctggatctcttccgtggtttccttgatctgttcttcaagtgcctcctgggtgcgtttcagcttctggtaccggtcaaaatactttttggaattttcctgaggggtaagttgaggatccaaaggaatggtaatttcctcattggtatagtaattcaaagctttaaatgattttacaccttcttccagaccataaccataggtgttgatcaattcaccatatatcttgtatttgtcttttttctcagtatccttcatctgtttttgctgaagcatcagctttttgcggttgcgttccaaggctgtctggacgatcctgcgaagatcagcagatttttgacggattcttgtgatcagatccctggaggcatagtaggtttccagcatctgggaaacgctgtcaaaggatacgctatggtattccggcccatattgctggaaatccagcactccgtattccacaggttcatccccccggaaaataatattaggggtaaaactgccttcttttacctgatccatgatccttgcaaaggtatggtaaagatgagtgcgtgcagcttcattaagagactgcatggaatcatttccgtcaatagatgcacggaagcagacttcctgagccataacaggactgatccctgtaagggatgaataaatggctttggccgccggaagtggctttgggcagatgtcggctataaattcttcttctgtgatggtaagcggatccagcttgtcctgggttttgggaataaagtattcacggcctggaaggacttcgcggacagaactcatattggaagaaacatgtttgatgctgtccaggatcatacccttgtcatcgcagaagatcaggttgctgtgtttgcccataagctccatgatcagtattttatggcatacatctcctaattcatttaagtgttccaggtggaactgtactacacgctccatgccgggctgtgtaatatctgtgatccgcgcactgccgatatgcttccgtaaaagcatgcagaaattgggagcagtaagggggctgatacggttcttagatgtaaagtaaagcagaggcagggatggggaagcggagagcagcagccgcttctggccatcctggcctctgactgtgatcagcagctcgtcgctttcaggctgggcgattttgttgatcctgccgcctttcaggctggtgttcagttcttttaccattgctgcaatggtgatgccgtcaaatgccatatgaaaaactcctttcagagggaatatacgttaaaaagtaaatgcacctggcaaagcttccaacagccttaatgctttgtttgtgcacttactttagtatacacgtaaaaaaagggtttgactagggttattgaatgaattataataaatctataagttcggaggaagaaaagaaagacaatgataaaaagcatgactggcttcggacgagccgaagttatcacgaaagaaagaaaaataacagttgagttaaaatctgtaaaccacagatatcttgacctgagtataaagatgcccagaaagcttagctttctggagagtactgtgcgaaatcttctgaagaaatatattcagagaggcaaggtagatgtatttatttcctatgaagattataccttgagccagggatcactgaagtataacagagaactggcagcggaatatcttggctatctgaaagaaatggcacaggattttggtctggactacgacatgaaagtatctgcactttccagatatccggatgtttttactatggaggagcagtcactggatgaagaggagttatggaactgtcttgaacagcctcttatggaggcatgtgagaagtttgttgcagccagggaacgtgaaggcgagcacctgaagaatgatctggttttgaagctgcaggggctggatgagaaggtgacgatggtagagcagcgttctccacttgtagtagatgcttacaaagagaagctggaggctaaggttcatgaacttctggcagatacccagtttgatgatgccaggatcgcagctgaggttgttatgttttctgataagatctgtaatgatgaagagacagtacggcttcacagccatattgccgggatgaggaagatgctggaggagtccgaaggtattggacgtaagctggattttatggcacaggagatgaaccgggaagccaataccattctttccaagtccagtgatcttgtgatatcagatattgccattgatttgaaaacagagatcgaaaagatccgtgagcagattcagaacattgagtaaagaacctggagatttgttttatggcaaaattaattaatattggttttggtaatgtggtaaattcccagaagattgttgcagttgtaagcccggatgcagcacctgtgaagcggatggtgcagagtatcaaaggcacccgttcactgatcgatgccacacagggacgaaagacaaaagcagtgatcatcacatcagatgattaccttgtattgtctgcattacagccggataccattgccagaagatttgcagaagtatatgaatatgaaagcaggggagagaaccatgagtaaagggatacttgttgtagtatctggattttctggtgccgggaaaggcactgtaatgaaacgtctgatggaaaaatatgacaattatgcattgtctgtttctgtcaccaccaggtcccccagaccgggagagcaagatggaaaggaatattttttccgtacaagggaagaatttgaggagctgatccaaaaggatgccctcattgaatatgcccagtatgtaaagaattattacgggacgcctcgtgcctatgtagaagaacagctaaatgtaggtaaggatgtgatccttgagatcgagattcagggagcccgcaaaatcaaagcaaagaatccggaagcattgctgatctttattgcacctccatctatggcagagctgaaaaaccgtcttgttggcagaggtacagaaacaccccaggtgatcgagagccgtcttcacagggcagcagaagaatcccagggtgtggaggaatatgattatcttcttttaaatgatgagctggaaatctgtgtggatgagcttcacaggatcatccaaagcgaacacagccggatcagccggaatcttggttttatccaggaacttcgtaaggaggccagtcagctgggctgaaaagtgcatatgataagataagatcacagggcatttacgtattacaggtgtgaaaggtttgaacctgtccggactatgtcaggacaggagaatgactttacaatataaaattataaaaaggagcaggatagatatgattcatccatcttattcagaattaatcgaggcaatcaatacaaataacgaagacgacgacgagagcatggttctgaacagccgttattctctggtacttgctaccagtaagcgtgcacgccagctgatcgccggatccaaaccacttgtagaaggagcagccggaaagaaacctctggccattgctattgatgaactttacaaaggaaaagtaaagatccttcctggcaagcatgaggatgaggaagaagcagctgcagcagaagagacagcaacagagacatcaaaagaggagaatactgcttctgcagaggagtctttgtcagaagaggcatgattatatgaaattattatttgtttccctgggatgtgacaagaatctggtggactcagaagaaatgctggggcttcttaccaggaatggtcatgagattgttgacgatgagacaatggcagatgctattattgtaaatacctgctgctttatcggagacgccaaagaggaaagtgtgaatacgatccttgaaatggcagaatataagaaagccggttcctgtaaagttttgatcgttacaggatgtatggcacagcgctataaagaagaaattattcaggagattccagaggtagacgcagttcttggtactacttcttatggggagatccaaaaggcaatggaagccgcaaaagccggaaaacatttccaggaatttaaagacattgactatctgccggaagatctgggcaggcgtgtgcttactacaggtggtcattatggatatctgaagattgcagaaggctgtgataagcactgcacttactgcattatccccaaattgcgtggcaggtaccgtagtgttcctatggaacgccttcttaagcaggctatggatatggcagaacaaggtgtgaaggaactgattcttgtagcccaggagactacagtatatggcaaggatctttatggtaagaaatctcttcatgtccttctgaaagagctttgtaagattcaaggaatcagatggatacgtattctgtattgctatccggaagagatttatgatgagttgatccaggtaatgaaggaagaagaaaagatatgtaattatctagatcttccaatccagcatgccagcgatccggttctgaaaagaatgggccgtaggacaacaaaagcagaattggtggagatcatagagaagcttcgcagtgagattcctgatattatccttcgtaccacgctgatcaccggatttccgggagaaacagaagaagaccatcaggaactgatggattttgtggatcagatggaatttgaccgtctgggagtttttacttactctcaggaagaagatacaccagctgcttccatggagggacagatccccgaagaattaaaggaagaaagaaaagatcagctgatggagcttcagcaggaaatatccctggaaaagggccagcagagggtcgggcaggtagtatctgtgatgatcgaaggtcagatttcaggagaaagtgcttatattggcaggacttatggagatgcaccaaaggtagatggctatatttttgtgcagacaggagagcttctggtaacaggagattttgtgaatgtacggattaccggtgcattggaatatgacttgataggagaattggaagatgaatataccgaataaacttacggttgcaagaatgatcatggtgccgttttttgttctgttcagccttacaggctggggaggtgctgcgaaccgctatatctgtcttgttatttttgtaggagccagcattacggactggatggacggtcatcttgcaagaaagaataatcttgttacgaattttggaaagtttatggatcctctggctgataagcttctggtatgctcttccctgatctgtatggtggaattgaaccgtctggaggcatggattgtgatcatcatcatcgccagagaatttattatcagtgggttccgcctgatcgcagctgagaacggagtagtgatcgcagccaattactggggcaaattcaagacaaccgctcagatgatcatgattattttgctgatcctgaactttgatggcatctttcacattcttgcccgtggttttgtatggatctcactggcattgacgattatctcactgttgacttacattatggagaataagaacgtattatccatgcaggaataataactgcgaaaggaaaaaatatgattgcagagattgtaacggtaggaaccgagatattgcttggtaatattgtgaataccaacagtgcatatctggcagtggaatgtgcgaaccttggtctgactgtatattatcagagtgtggtaggagacaatgaagaacggatgaaggcagtgatccgtacggcactggaccggtctgatgttgtgatccttaccggtggtcttggacctacagaggatgaccttaccaaagaggtaacagctgaagtgatggggatgcctcttgttgaggatgcacattccaaggagcgcatcgagcgctatatgaaagaatataagaaaaataattcccagcgccgcatcacatcgaataactataagcaggcactcattccagagggggcacttgtactggataatcacaatgggacagctccggggctgatccttgagaaggatgggaagattgccattttgcttcccggacctccggtagaattaaagcctatgtttacagaggaggtttatccttatctccgcaaaaaacagccggaaatcatttactcccaggtagtgaagatctgcgggattggcgagagccaggtggcagaggatattcaggatatgatccaggcacagaccaatcctaccattgcaccttatgcaaaagtaggtgaagtacatttgcggatcactgcaaaggcgtctgacgagaaggaaggcaaaaaactgatcaagcctgtggtcagggaactgaaacgcaggtttggcagaaatatatttgcaactgaggcagagaaaacactggaagaagcggtggtagatatgcttcgtgaccagcagctcacacttgcattggctgagtcctgcacaggtggagagatttcagccaggatcgtgaatgtgccaggtgcatcccaggtatttacccatggttttgtcacatacagtaatcgtgccaagagaaaatgccttggtgtaaagaaagccacactgaagctggaaggtgctgtttcagccaaatgcgcaaaggaaatggcaaagggaggatgtaatgcggcagaggccgatatctgcctttccattacagggctggcaggtcctgacggaggcacaaaggaaacacctgtgggcactgtatttatgggctgttgttataatggcaaggttgttacacgggagttccatttcacagggaaccgcaccaagatccgacagcaggcaactgcacatgcccttgcttttttacgtgaatgcatgatggaaggtatttcaaaatctgagtaaaatgattcagccatgaacatcagaaattggttcatggctgtttttatattcattttatcattttcataagttgtattacctgatccagtttccgggtttcttccgggctttttccaatttttagtacctgtatgatggtatcaatttcattatctgaaaaattcatacctgcctgctttccccgggcagctgcactcatgatgtaaggcagcatctgggaagggcttttccctgctccctgcatggccagttgggaaagcatatctaatttcccacggtctaattgtgacagtttagggttgtctttccagttttgatccatttaaaacctcctgaaataggggcagatctgccccgtgatctttactaatttatgattttattattaaaatatgacaggacagcggcctgtgacataaactgatagaaagaatgaaagcaggagatcgatatggaaaagaaagagaatggcaggcagcgaattatttttgatggaactgccttttatgaaatagatctggaatgtgtggaacaaaaaagaaaggatcaggagaaacgggaaaaagagagaaaccgacagacaaaaggggcgcattaagcgccccaaggacaggaatgatcagcatccacatccgcatccgccatagcctgacaggagcaaaagtacaatgatcagccagctgcagtcattactgccgcagctattgcagttgtttccataaccattgcatccgctaaggcaaagtatgatgatgagccagagtatgcaattacagttcccgttgctcaggttgttgaagcccaggcatccattgttgccgcatccgcatccattgttgccgcatccgcatccgttgttgttgcatccgcatccgttgtcacatccacatccgcatccggatctttcctcagaacatccacagttggcagctgctaaatcactcatgttaaaatcctccagaaattgtttacacttcatcttatgaaacggacaagatctgtgtgaatcataattacacctgtgcacagcaacctaattacaatgaattgacagattcattctattaggatataataagagaaatttaacaactttgtaatctttgaaatgaaatcgacacaatttaacaaacggagagacgaatatgagtgaaaaagcaaaaaaatcttccaggaatcatattttactggtgctgttagcggtatttgctgcagtactcacattacacatgggagcaggggaagtgaaggctgctgccaagggatttcgtacagtaaaaggtaaaacatactacatagatgacagcggcaagaagcataaaggctggctgaacctgaacggaaagaaatattatttcaataagaaaacaggggtacaggtaaagggctggcagttagacagtaagggccggaaagtacggtacttttccatgggcaaagggatcatggccactggctttgtaaagaacaagtctgggatcacacgttatttttctcctgcaaatggccgtatggttactggatggatgaaagatgctaatggataccggtattattttaaaaagaacacaggtgccatgctgaagggatgggtaactgtttccggcaggaagcggtacttttccggttccggccgtatggctacaggctgggtagtgaattccaaacagcatgcccggtatttcagcccaaagagcggttttatgtataccggtcttcagaaggtagatggagcatattactattttgtaaaatcaacaggcttccgttaccagaagggcttttacaccatttcaaagaagaagtattattttaatccagcggatggacgtgcacagaccggttggcttacattaaatggcaaaacatattattttaattccaaaggggttatgtataccaatacaacagcagtgatcgacggtatatcttataagttcagctccagcggcgttgcttctcaggttgctgctccaaatgtggttgccaatgataagaccatgattgtctatgatgagaaaaatgccagaaattatacagtaatgaaggaatacttaagccatccgggtgttgctaacggagaaaagtctgatctggatctgttggcagctttctgcgagtctgaggctggcaatcaggggctggtaggtatggaagctgtagtacttaccgtgctgaaccgtaccattaaggcagacagagagtttccatccagcgtacgttatgtgctgtaccatggcaccacattcccacagtattcagttgtgacaaatggagtacttctgaaacgtctgaatgggcagtttgataacagggagcttgcttatcaggcagccagtgaagcgatgaagatttttaatgaatatgtgacaaatgggactaagaggacgctgaaaggcattgatacaaaagacttcaattatatgtattttatgacgatcagtgcatactggaaacagcctcttaatttcagtaaagtgaaatcctgtcaatataaggatcatatgttttttgttgactgggtataaaggaggctgggatgaatcattcataccttacagcgattttgatggcagcaggatttatcctgctgtttgtcatatggatgctgtatgaaaacaggaaaaaccaaaaacagcttcttcaaaagatcagaaatgcgtatggaaagccgtcgcagcgtagatatgagccaggggatctggataagatctctcattactacaaacggataaaagaagatagattttatattgatgacattacctggaatgacctggatctggacagtatgtatatgatggtgaatcagaccatttcctcaccaggagaggatgtgctttattccatgatgaggcttcccgtgttttcaaaagaagaagcagataaaagagaagatctgattcagttttttgctgcttcccagcaaaaaagagaaaggcttttacagtctttggccaaaatcagcaaaaatggcgcaggctctctctcggatacagtactggccttaaaggatgcgccaagagtgcatacagggattcatgcggtccttcttctggtccttctggccagcctggtgctccttcctttttcgccggtttatggatttttctttttgctgatcatcatgatcaccaatgtggtggtgtattatgccggcagggacaggaagctgatcgaagcctaccttatctgtttttcccagctgatacgtatgctttcagctgcagatgaattggaaccagtggattggccggaaatcaaggagcagatggatggtatcagggagggcaggaaggcctttcacaaaatttggaaaagatctgtttttgtcactggcagtaatggggctggggatggccttcaggtagtgatggactatgtgcgtatgctgacccatgtagatattcttgtatataacagcctgctggatcaggttcagggaaagaccgggcagatcctgcagatgatccaatgcatcggggaactggatgctgctatttctatagcatcctttcgtgaaatgctgtcttactggtgcaggccggaatttctgccgtatactacagcacagcctgtttccctagaagcggttgatctgtatcatccccttcttacagaagccgttgccaacagtatccaggctaagggcggcacacttgtgacaggctccaatgcttccggaaagtctacattccttaaaaatgtggctttaaacagtattctggcgcagaccttacttacctgcacctgcagctgttacaaggctccttttttgaaggttatgacttccatggctcttagggatgatttgtccggcggcgaaagttattttattgtagagatcaaatccctgaaaaggattctggatgaaagtaaaaaagaagttcctctattgtgcatcattgatgaggtccttcgaggaaccaatacgattgaaagaattgctgcatcctctcagatcctgaatgctcttgacaaaaaatggatcctgccttttgcagccactcatgatattgagctttcttatatcctgaatggtgtttatgagaattaccattttcaggaagaggtacgtgagcatgaagtggtgtttgattatatcctgagaaaaggaagggcaaccaccagaaatgcgatacgtcttctggatatgctgggatacgatccgaagatcgtaaaagcagcaggaatggcggcagagaattttgaaagaaccggtgtatggagaacaataaactgattttttataattttggtatggtgcagatttcttttaaaacggtgactgcattgcattaagttgtaaaagcaccctggaaaagccttgactttttgggggcatctttgtatacttgcaaatatatcagaaaacgacttggatgggaaagagtagcataaggataagcctacagagagcagccggagggtgagaggcgcaggtggaaattatgtgaatacctcccggagttccgcacccaacagatgatctgtcttagtaggctgcggcggtgtggcgtccgttacaaggctgaagtgatttgctataagagccagtcacttgcggaggcagagaatgtgagttctcagcaaatttaggtggtatcacgggatcccggttctcgtcctaaaaggacaaggagccgggacttttttattaacaggaggaaagaaagatgacagtttgggaagaactgaaagcgagaggtctgatcgcgcaggtgacagacgaggacgagatcaaggaattggtaaataatggtaaggctacattttatattggctttgacccaacagcagacagtcttcatgtaggacactttatggcgctttgcctgatgaaacgtcttcagatggcaggcaaccgtcctatcgcactgttaggcggcggtacaggtatgatcggagatccttccggcagaacagacatgcgtcagatgatgactaaggaaaccattcagcataacattgactgtttcaagaagcagatggaacgctttattgatttttcagatggcaaggctatgatggtgaataatgcagactggctgatgaacctgaattacgtagagcttttaagagaggttggccctcatttctcagttaacagaatgctgacagctgagtgttacaagcagcgtatggaaagaggcttaagcttccttgaatttaactacatgatcatgcagagctatgacttctacatgctgttccagaaatacggctgcaatatgcagttcggcggcgatgaccagtggagcaacatgctgggcggtacagagctgatccgccgaaagctgggcaaagatgcttatgcaatgaccatcactcttctgcttaattcagagggcaagaagatgggcaaaacccagtccggggctgtatggctggatcctaataaaacctctccatttgatttctaccagtactggcgtaatgtagatgatgcagatgtgatcaaatgcatgaaacttcttaccttccttcctttggaggagatccaggagatggagaaatgggaaggaagccagctgaacaaagccaaagatatcctggcataccagctgacagaacttgttcacggagaagaagaggcaaagaaggcccaggccggtgcacaggcactgttcggcggcagtgcagatacagcccatatgccatgtacagagcttgaggaaagtgattttgcagaggatgggaccattgatctgatcactcttcttgtaaaatcaggtcttgttcctacccgttccgagggtagaagagccattgagcagggtggagtctctattgacggagagaagaatactgacatccgacatgccatgaaaaaagaagacttccagggtgaaggcgtgatcctgaagcgtggaaagaaaaaattcaataaagtttgcttaaaataataagatatgctaagataaaaaacagtgcttccgcagctgcaaacaagcggctgtggatattttgaacgatgtaggaggaaatagaaatgaagaaatacggagtgaacgaacttcgaaagatgtttctggatttcatggaaagcaagggacaccttgtaatgaaaagctttcccctggttcctcagggagacaaaagtgttcttctgatcaatgcaggtatgacacctttaaaaccatactttacaggagctgagaagccgcctcgtacaagggtaagtacctgtcagaagtgcatccgtacaggtgatattgagaacgtaggaaagactgcccgtcatggtacattttttgagatgcttggtaatttttcctttggcgattactttaagagagaggcactgaactggtcctgggagttccttacacaggtagtaggactggatccggacagactgtacccttctgtatatgtggatgatgatgaagctttccagatctggaataaagagatcggcatcccggcagagcgtattttcaaattcggcaaagaagacaacttctgggagcatggagcaggtccctgtggtccatgttcagagatctattatgatcgtggtgagaagtatggctgcggtaagccaggctgtacagttggctgtgactgtgaccgctatatggaagtctggaacgatgtttttacacagtttgagaatgacggaaatggcaattatacagaactgaaacagaagaatattgatacaggtatggggcttgagcgtctggctgtagttgtacaggatgtggattccatttttgatgtggatactatctgctccctgcgtaatcttgtaagcaagatttcaggcaaagagtacggcgtgaagcatgagtatgatgtttctatccgtctgatcacagaccatatccgttctgctacatttatgatttctgatggtattatgcctaccaatgaaggaagaggttatgtacttcgccgtctgatccgccgtgcagcccgtcatggacgtctccttggtattgagggagcattcctttccaagctaagtgaggaagtaatcaatggttccaaggacggatatccggagctggaagaaaagaaggatttcatcttcagggtacttactaatgaagagaatcagttcaataagaccattgaccagggtctgcgtatccttggcgacatggaagaggatatgaatcaggcaggggagaagacactttccggtgccaatgcattcaagctgtatgatacttatggattccctcttgatcttacaaaagagatcctggaggaaaagggataccaggtagacgaggatggctttaaggctgcgatggatgagcagaggaaaaaagcccgtgatgcccgtgaagtaacaaactacatgggcgcagatgctacagtatatgaccagatcgatacctctgttactactgagtttgtaggctatgatcatctgacttttgattccaaggtgaccgttcttactacagagacagaagtagtatcttcccttatggaaggacagaagggtactgtatttgtagagcagacaccattttatgcaactatgggcggtcaggttggcgacactggtgtgatccagactgcaaatggcagatttgttgtagaagataccattaagcttcgtggcggcaagtttggccatgttggttacatggagtctggcatgatctcagagggagagaccgtttctctgatcgtggacagccaggcaagaaaagatacagagaagaaccacagtgctacacatctgcttcagaaggcattaaaggctgtacttggtgcacatgtagagcagaagggttcccttgtaacaccagacagactgcgttttgactttgctcatttccaggcaatgaccagtgaagagctgtcaaaggtagaggatcttgtaaatgaaaagatccaggcatcccttcctgttaatacaaatgtgatggacatcgaggaagcaaagaaatccggagctatggcattgttcggagagaaatacacccagaaggtacgtgtggtttccatgggagatttctccaaggaactttgcggtggtacccatgtagcaaatacaggggagatcatgctgttcaagattgtttccgaagcaggtattgcagctggtgtacgccgtattgaggctcttacaggcaaaggtgttatcgaatattacaagaaacaggaagaaatgcttcaggaagctgccaaagcattaaaggcaaatccatctcaggtagtggagaagatccagcatctgcaaagtgaattaaaggcagtatcttccgagaacgaatcccttaagagtaagctggcacagggagcacttggggacgttatggatcaggttgtggaagtgaagggtattcgtcttcttgctgcaaaggtagagggcgttgatatgaacggacttcgtgacctgggcgatcagctgaaggaaaaactgggcgaaggtgtagttgtccttgcagcagtgaatgatggtaaggtaaatgtacttgccatggctacggatgctgcccagaaggcaggagcgcatgctggtaatcttgtaaaagctgtggctgctattgttggcggcggcggcggtggacgcccgaatatggctcaggccggcggacgtaatcctgaaaaagcagatgaggctattgcagcagctgctggtattctggaaggacagctgaaataatccgtcttttggaaaaagattcagacccggcaggaatatgcaaaaagattttgcaaaaaaagccaaaagttgttgacgaaccagcagggtatgatatataataatgttcgtgcaagaaaaatacccatacagttgtatttcagcacaatctacaactggagggaggttaggtgtgggtctatgtcaaacgtaatcgtcaaagagaacgagactttagatagcgctcttcgcagatttaagagaagttgtgcgaaagcgggtatccagcaggaaatccgtaagagagagcattacgagaagccaagcgttcgtcgtaagaaaaaatctgaagccgcaagaaaacgtaaatataattaattgtgcgcaagaaatccctgactgatacggtcagggatttttatctaaacggatatactttgaaacggatatactttctgacggtggtatcactatgtatgatagggaaacagttggaaagctggcgggaaaggacaggagattatgatcatactgaagaaaatcgcaaaacttatttttaatcgattgttttatgtggtgcttgccatggctgtacagctggggtggctcctgcttctgttcttaaaagctgccagctattccagatatatttcagtagggcttaccatcttaagcattcttgttgtgctgtggatcgtgaatagagagatcaatccttcttacaagctggcctgggcaatgctgatccttagtcttcctattttcgggctggtactttatcttgtgtttggacagtccaggatcgccaggaccatgcagatgcagtttaatgaaatgcttgtacagaccagtgattatttgaaggatgattcagataccagaaagaagctggaggtggcagatcgttcagcctgtatacaatcggattacatttttcgttcttccggatatccggtacatgagaatactacagctgagtattttcaagtgggcgacgatatgtttcctgtacttataaaagaactgaatcaggcaaagcattatatttttattgaatactttattatccatgatggagtaatgtggcggaccattttggatattctggagaaaaaggttaaggaaggggtagatgtacggctgatctatgatgatatgggatgccttacaacgcttcctcacaaatattatcttcagctccgtgaaaaagggatcaagtgtgaggtatttaataccttccgccccattttgaatattgtcctgaacaatcgtgaccaccgaaagttctgtatcattgacggatatgtaggatttacaggcgggatcaatcttgcagacgagtatattaaccagaaggaaaggttcggacattggaaggatactgcagttatgctgaaaggcgaggctgtctggaatatgacagccatgttccttcatatgtggaaggtagtgacaagatccagagattatgctgaatttgaccattacctgcctcatacatggcacaaggatcagtttgaaagtgacggctttgttcagccattctgtgatacgccgctggatggagagacggttggtgagaatgtatatctgaatatcattaacagagccaaacattatgtatatatctgcaccccctatctgatcattgataatgagatgatgactgctctatgtcttgctgccaaaagtggtattgatgtaaggattatgacaccgggtatcccggataagaagatggtcttcctgctgacacagtcttactataagcagttgttggaggcaggggtgaagatttatgagtaccagccaggcttccttcacgccaagtcctttgtgtgtgatgatgaactgggagttgtgggtaccatcaatttggattaccgcagcctgtatcttcattttgaagatggcgtatggatctgccgtaataaggtggttatggatattaaagaggactttgtggagacattgcattattgtgcacctgtgactttggaattttgcaagaaccgaaatatttttgtgcggatcatgcagaatattttaaggctcctggcgcctatgttgtaatatatgaatgaaatccctgtggattcctgttggtaatatttgccaataaggatctacagggattttttgtgcaataaatgatgccaaatttaaataggaatgtgaaaattgttatgaatctatgaaaagttatatagagcagataaaggaagaaaagtataatatcatttatagtgccattgtaggctttttataaggcacacaatgagggaggcaaacatgttgagaagaaaattatggaacaaaatgatagccttagggctttgcatttccatggcagtgggcggaaatgcagcaggctttttgacagaaagcatggcatatggatctgaattttctgatggagaagaacagaaccagaaaggatcaaaggaagcggctccatcaccggcagaagaacctgaagaaattgatatatctgatgaagaaggacctgaagacataaatgagcctgaagaagcagatctttccggccagattcaggaggcagaagatgcacctgaggacgtacaggaaatcacgaatgtgcctcaggaggaacagaacacagaccaggatgaacaggaatatacagaagcagaggaatttctggatgatccggacctgcttgaaacctccaatcagcctgtagatgggatagaggatataattgatgtgaataacccggagtgcgggattatttatgatattgatacaacaggtatgacattggatgaaacatacaatgacattttcttagatgaaagctctagatatatgtcttctatgtattacaatggcacatggtatcaaggaaatcatgggtatcttttatatggctggaatgatatagaaaagaagtatgaatttttagttgcaaaagaaattagtcagagtacaatcagacttttgaagcaactggaacaatatggagatgcagataaatacagcaagtatcgtatgataataatgccattttattaccacgtctatccgaggaaatatattcctgcaagcatacttataaaatataaagccaaatggatagataatatgaattattcggtaatagataatatggttttttatgaaaaaaaacaagtatcagatgcaggcaatggcagcccaatgccaacgatgccagacacttgggagacaaattattctgcgcctgaagattctgtgagattaaccgattctgatttacgtgttgttacgcaaattcagaatattcaatcacgtaaggcggtttcttataaagaaagtggacttccagatggaagtgtgatgattacaaataccggtgaaaaggatgtgacaattaaggcggaagcagaacttacagggaaaactgaatttgttgacgataatggggactgtaaaatattcgataattcatcagatgcatatcattgtggcttgaaaggcacattgtatgagaaaaatgaacagggaaactggaaagaaatagagaacagcaggtcttctatttctttgggaagtaatggtacatactgtggagaaaaaagaacattaaaacctggtgacgcttatgttgtgtatgcaccggtttcagctctttataattaccaggtatggataaaacctcaggttcaggaagaggaattgtctatagagtataaagaattgacagaagggaatgtgtggaaacagtcaggagaaaagtggactgctgtattgtcctcagatagtgaactggaagagtcgccaatacttggtattcaagcagaagaagcttcgcttcctacatataaagagaatgggctgcctaactatgcgcttcttgtacgcggcgctccaaataccggaacagttaccggatacgatggagttgaaagatatccagggtattttataagggtgaatccctgctgggacaaaaatcataacaatcagccaaataattaccagaactctgcacttcgagctgtgtgtatttattataaactgaatcaggaaaccggaaagtatgaactggaagaagaatataagagaccaggcgaacatggatcttatactactgatgcaatagaaatatatacagatacttccgattatgttcattgtttttatgtagatccggagcctgatgaagtagtggcagtaattcctttggattgtacagtgcctgttgaatttggatattcttccaataagctagcagattatttaaagaaatgcagccgtaattactgttttcagtatcaggtattcctgaacagtactcaagattggaagataacaggagtaacatccctggacggagaaagtaccccatactacagtgaagacatggtaaaaggaagctggctgacctatggacatgatccggcagatcataaaggtactgtaggggcagatcttatggtttctgtaaaagaacagacagatggaactgttcttgggtatggggcagatggtctccccaatatcggacttcgattagaggtgggcgatattccggacaccggtttggacggactgttgaagataaatatctcagtgcctgaagcatacaaaaatggcgaagctggaatgggatacagtacaaatgaactgtacaggggttctgatacgtatgaatggcgatatcagattaccggcagaggcggaaccaggatgctggcagcgcaatacaggctgggagatgagggaatctatgaagagaaagaatatcagatcttgaatgtttcctctgaaaagaaaaccggttttgatctttcagatttggatcttcaaaaaggagatattatctgtatccttccttacagcccggagtatacgggaagttatgttgtaagagagaactcaagctatgatagaagaaatgtttattctaacggatattatggagtgggtgccccagttctttccgaggcgcagtatggaagcagtcagaagatcagatattttaattttgattataatgtagaattgtctggaaatgaagagaaccttatgcttacagggcagaatgatacccagatccagaaggaaggccaggttttttatggcatcaagtcagtcagtgatgatgggctgagtcttcagaaagcagaattgtctgtaaaggaagatacaagggaggataagtgcgggatcggagaaaacggacttcctaattatgggatcattgtcctgcctggggttggagaagaggaattgctgctttcttcagatcatcttggatcaggagaatatgattattatataaaagagtattataaaaagggagaggatgggatttatactccttattctgatacagtaactgtatatcgggcgaaaaaatcaggggacaggatcaagaaggttaatgaagaaacagatccttctatcgtggcggttataagaccaatccttccatcggctgctttaaaaaacaaatcgtttacatcggattattacgatggtgcatcttatcgggagtttcagcaatctgatggaccatttgaaaaaacagacagcagtggtaaaatcctgtatcctcagaatggtacggtaaaataccggttctggaaatataaaatggattgggattccggttatgcatacagttattattatcttggatctataaaaagatggaagaatcagaactgggagagcatagagcctgttacatacagtacaagccgtactccttatggcatttcaggaactcttgatcttagggatcagaaagaaagaaatcatgtgcttcaggcaactgattggggatcatcatacctttactgcacagatttaagtgaaaacggccttccctatgaaggtcttgtgatccagaataaaaatgtaggcggaacctctgatgagatggcagagatcaatgttcgcctggatatgtcagaacagggaaccggaggcgaatactcccttggccgtatgcatttctgggcctggctgtatcagaaggacgaaaatggagtatggcataaggctgataataaacatgactatggcgactggattaacctgggagttcctggcaaaggctgggcttattgggaatcaggagatctggatgctgactatggttatacagtacacgctcatttgaaagataatgaagccattgtgatcctgcctcagtatcgtctgtgtgatttttcatatactgtgtctttgaataacagtaaagactttgatattatcacggagaaatgccagatacctgcagatgtacagttgtcaggcagacagacctataaaggcacagttttccagtggccgaatcagggtaatccggctacccatctggtattggcaacttcacctaagaatacagcttccggtgaaaacgatacagcttccagactgacagacgtaagatctttgcctgttacattgtttgattatgatttcggaaactgggaaggctttgaactggcaaagcagagtgcacagtacaggttccggtacgatccggtaaatgtaaaaaatacacctgtgaattctatttacaatactgttttcccggggattgtgaagaatcagctgggagaggatgggcttccggtgcttaattacaccacaccgttttcactgtttgaccagactcaggcggcaactccggtaaatgggggtacaaaaacagtttactcaaatgttggatttgattttgtatatgatccggcttccaatgaatacagttatcaaagcagtctgaaccatgcaggctatgatgctggcacaaataagatctaccagtatgacaaggctcttggtattgacggatggggtagtaaaggagctggtttcctgccgtttaacagttttcaggatgaaggcgtatggggaacagcagataaaggcacggaagggatctatctgctggatcagatgaaaactgtagattatcattttggaatgagcatggaaaaggatttcctgatcccggaaaacggaactgttgcagttacagatgcacagggaactgttaatgacaggaaagacctggtattctccttcagcggggatgatgatgcatggcttttcattgacggacagcttgtgcttgatatgggtggtatccatgaggcagtttccggaagcattaattttacaaagggaatctatactgttaccagcagtgtgaccggtgatgtacagaccggttccctgtctgatattttcgcaggatatccaaaggcaattggggcatttgacgattcagagtgggcagcagggacaaagcatacctttgcattctattacctggaaagaggcggcaccctgtcagactgtgcgatcaaatttaaccttcctgtatttaaggaattctctgttaccaaaacagtagaaggtaaagaaacagatcagaaatttgatatggtgctggaactgtttgaggcaaatggggatccatataaaggaagcctgtaccaggttacagatggaacaaagaccagtattcagacagaggaaggtacatacagtttttcattgaaggacaagcagaccattaatttctgcgttcctcaggagtgcatgagttactctgtgactgaaaagaatccggaagggtgttcagtaagctggaagtcctcagatggcttatcaggcgagggaaacgctacagataaggtatcctccacggcgaatacagagatcattaaccagtatgtggcaccaacggctacgcctgttccgactgagaaaccaaggcctacagacaagccgcagccaacaccggacattacggaaacaccgcagatctctgctacaccagagcctgcacctcaggtaacaactccggctcagacagtgactccaaagccggaaaagacaccaacagctacacctgtttcagaagaaaaagagccaacggatacaccggctcctggacaaggtggaagttcatatagaggtggcggttatggtggatcctcaggcggcagcagcacagaaacttcttctccaaaaacaggggataccagtgatatggcattatggcagtgtctgctgctgatggcaattgctgcgattcttgcaacaggctggaagctgcaaaaaaagaaaaataaataaatgaaacggataggcagagcaataagtaaagtatatcagctgggagtcaatcccccagctgatatagcctccggcaggattgcagaggtgcgcaggagaagtatgtcatgcaattgcatgacgcgcacctcgcagcaagaatgccgagcattcttgaagtaaagcaaaagggcggagaaatcactgaaaaaatggtgattcctccgtcctttttcaatatcaaggcataaaaagccctgttcttttttacaatagagtaaagggaatacagggggaagatgatttgaatcaaagaaaatggaaaagagtcctggcattatttctgaccataattctgatggtttgtggaaatggagtgcttacagcctacggtgaggaaaacaaggaggctgatggtgtacaggaagatatactgatccaggctccggcagggatcctgatagaggcagatacaggaacggtgttgtataaaaaaagcgaggaagagaaaagaagccctgccagcattacaaagatcatgactcttctgctgatctttgacagtctggcagatgggaatctgaaacttacagacacagtgactaccagtgcatatgccaaatccatgggcggctcccaggtgttcctggaagaaggagagacccaggatgtggaaacaatgatcaaatgcattgtaattgcctccgggaatgatgcaagcgtggcaatggcagagcatattgctggaagtgagcaggagtttgtaaaaagaatgaatcagcgggccaagcagctgggaatgcaggatactcattttgaagattgctgtggactgaccgattcagagaatcattatactacggctaaggatgttgccattatgagcagagaactgatcaccaggtatcctaaaattctcacatactcttccatatggatggaaaacatcctccacgtaacaaagcagggctccaaagagtttacactgacaaataccaataagctgctgcgaagctatgagggctgtacagggctgaaaacaggaagcaccggaaaggcaaagtactgcgtttctgctgttgcccagaaaaatgacatcaccttgatcgctgttgtgatgggggcaccggattataaggtgcgtttcagggatggagctgctttatttaattacgggttttcaaagtgcagtcggtacatagatgatcatcctatgaaacttcccaggttaaaggtgcgacatggaaaagaagaatatgtggctttgaagtatgagaaaacatttgtctggatcggaacagatggaaaaaacattgaagaagtgacacgaaagctttcccttccggaacaggtatctgcaccggtaaaaagaggaaagcaggtgggaaaaatggaatattatgcaggaaaaaagcttataggcagtgtaaacattctgtatgatcaaagcctatcccaggctacatggctttggagccttggaaaagttatgcaaaaatttgcgtttcattaaatcttcgtgaatgttctatacattcatagtcatgaaggaaaatttctggataaaaacaattttgaaaaagagagggctgattttgacaaaaacaggcagataggcttataatagggaatacaaaaatcggaaagaggaaatgaatcatgaacaagggtaaaggaaaagaccacaaattaaaattgcttgcagcatattataagccttataaaggcctgttttttgccgatttgttttttgcgatcctgggcgcagccgtaacgcttgtaatccctttgctggtaaggtacattatgacctctataggttctatgtcggttgcacaggcacagaagaccatcttatatattggcattggtatgctggctctaattcttgtgcagctgggaagcagatattttatcacctattatggtcatatgatgggagcttatatagaacatgatatgcgtaatgagatcttcagtcactatcagaagctttcctttgcattttatgataatcagaaagtaggccatcttctctcaagaatcaccagcgatctttttgatatcagtgagctgctgcatcatggaccggaggatattattatttccgtgatcaaattgtttggcgcattgatcattttgatgaatgtgaactggaaaatggcacttctttgtttcctggttgttttggtaatgcttatttatgctcttatatataaccgtaaaatgaaaaccgcttttaaagaaaaccgtgtacgtattggggatattaacagccagatcgaagacagcctggcagggatcagggtggtaaagtcttttggaaatgagaaacgggagattgagaaattcaaaaaaggaaatgaaagatttgtagaggcaaaaagtgtatcatatcgttatatggcaggatatcatgccggaatggatgcatttactactttgatcacagttgtagcactggtttccggatctatgtttttggcaggaggaagtattttggcagcagatcttgttaccttcctgctttatatcaacaattttacggagccggttacaaagcttgtgaattttacagaacaattccagaatggatacagtggatatgaccgtttccttgaaatgatgtccattgctccggatatcgaagacacaccggatgcacagccccttgaacatgcgaaaggggatataaggtttgaggatgtatcctttcactatgaggatcataaggagagtgttctttctcacgtgaatctggaagtgaagccaggagagtatgtagcattagtgggttcttccggagcagggaaaaccactttatgcagtctgatccccagattttatgatgtttcaggtggtgctatttacttggatggaaaggatatccgcaacatccgtctgaaagatctgagaaataatattggtattgtacagcaggatgtttatctttttgcaggaacagtcctggataatatccgttatggaagaccggatgcgtcagatgaagaagtgatccgtgctgctaaggctgccaatgcacatgattttattatggaaatggacaataattattatacagacatagggcagagaggagtgaagctttccggagggcaaaagcaaagactgtcaattgccagggcatttctgaaaaatccgcctattcttatttttgatgaagcaacttcagctttggataatgaaagtgagaaggtggtacaggattcgctggaacggctggcaaaagacaggaccacatttgtgattgcacacaggctgtcaacgatccggaatgcaagaaggatccttgtgctcactgaggatgggatcgcggaagaaggcacccataaggaactgatggaaaagaatggtgtttatgcaaaactttgcagagccggtttataaaggaggtttggcatatgaaagagatttgtaccaaggatgcagtgggtagtgtgttgtgtcacgatattacgcagatcattaaagatgaaaaaaagggagttctgtttaaaaaaggccatgtgatccgggaagaggatattcctcttcttctttcagtgggaaaagagcatttatttgtctgggagaaaaaagaagggattcttcacgaaaatgaggcggccaagatcctatatcagatatgtgcaggagagcatatgcacggaacggaagtaagtgagggaaagatcgagctgatcgcagatatagacggagtgctgaagatccgaagggatgcacttctggcagtaaacagccagggggaaatgatgatcgcatcaagacatggagattttcctgtgaagaaaggcgacaagattgcagggaccaggatcatccctcttgtgatccaacaggaaaagatggataaagcctgtaaagcggcaggagcagatccgattttttctattcttccttacagaactatgaaagtaggggttgtaactacaggaagtgaagtgaaaaaggggttgataaaggatacctttacaccggtgctggtagaaaaattaaaggaatactccatggaagttataggccagactatgccaggagatgataaaactcagatcacagaggatatccttcagttcataaaaaacggagcagatatggtgctttgcagcggtgggatgagcgtagatccggatgaccgtacgccgggcgggatccgagatacaggagccaggatcgtaacttatggtgcacctgtgcttcctggagcgatgcttctgatttcctattatgagaaagacggaaaatgtattcctgtgatcggactgccaggctgtgtgatgtatgcaaaacgaacggtttttgaccttgttcttccaagactggcagctggagatgaaatccacgaagaggaagtggctgcatatggcgagggcggactttgcctgaattgtaaggtctgtacttttccgacctgtgggtttggcaaatgatccgttttcgcacacaggtgtacaagcttacatcatccaaaatccctgaagggaaaaaactgaaagcagcttttcttacagatctgcatggcagagaattcggtccgggaaatcaggtgctgttggaagaaatatgcaggcagcagccggatcttgttttgtgtgcaggagatatgatcgtgcgtacattaccccattccattccggtggcaagggagctttttttgaagctttcagaagaatttccggtttatatggctcttggcaatcatgaatgcaggatgaagcttcagccggagaccacccggatctatacagattatgaagaggaactggtaaaaggcggcataaagatccttcacaatgaaaagaaggatcttaagataggggatattccgttgactatttacggactggagctccctatggagtattatcataagccaaattcaccaacgctggcatgtggacaaatcaagaatttactgggctcaggtgatccatccaggctgaatattcttctggctcacaatcccaaatacggaaaagcttatttctcctggaatgcagatctgactctttgcggccattatcatggggggattttaaggttgtccaggcatcgtggcctgaccagtcctcagtatctgctgtttccaccattttgctgcggggattttgaaaaagaaggaaaatatattctggtaagtgcagggctgggggagcataccatacctgtccggatccataatccaagggaacttctgatcattgaactggaaggcacaggatcttgaaacatttgtaatatgcaaagccaccctttacaatcccatgcagaacatgtaaaatgaaacaccgggagaacgatacgaatggctatatctgtaaagttaaatgtgtttgaaggaccactggatctgctccttcacctgatcgataaaaataaaatagacatctatgatattcctatcgtggagatcacagatcagtatatggaatatatccatgctatggaaaaagaagatttgggtgttatgagcgagtttatggtcatggcagccacacttctggatattaaatgcaggatgcttcttcctaaggaagtcaatgaagatggagaggaagaggatccaagagcagagctggtgcagaagcttcttgaatacaaaatgtataaatatatgtcctatgaacttcgtgataagatggacgatgcagaagggatttattacaaaaaacctacggttccaaaggaagtgctgcagtacagagagcctgtggatccgtctgctcttcttgaaggattgaccctggaaaagctgaatgagatctacaagtccatcatacgaaaacaggatgacaggatcgatcctatccgaagcaagtttggaactattgagaaggaagaggttagtctttccgacaaaatgcttcagatgaaggattttgcaaaaaatcacaggaagttcagcttcagacagctattggaaaggcagtgttccaaagttcaggtgatcgttactttcctttctgtactggagcttatgaagatggggcatatccatgtggtgcaggaagaattatttgatgatattcagatcgatgttgtaacagatcctgacacatggaagaatttgactgaatttgcggaggatgcctaagcagcttccgtataaatggaacatagaagaggttagtaagtggagatcaagacaatggaagcagcgatcgaggccatacttttcacaatgggagattctgtagagttaacacagatcgcaaaagcagtagagcaggataaagagacaacaagaaaggtgatccatcatatgatggaccgataccaggaagaagacagggggattcagatcattgaactgggagactcctttcagatgtgtaccaaaaaagaatattacgggaatttgatccggatcgccatgcagcctaagaaaccatcccttacaaatgtaatgctggaaaccctttccattattgcatataagcagcctatcacaaaggcagagatcgagaagatccgcggggtgaaaagcgaccatgcagtgaataagctggtggaatattcccttgtaaaggaacttgggcgcctggatgcgccgggaagaccgattttgtttggtacaacagaggaatttttgcgtacctttggtgttcagggactggaagaactgcctgctcttgaccctgtaaagctggaagattttaaggcagaagcagaagaggaagtacagcttcggctggatgtgtaaagggagatgaacaaatgccaaccacatatgcacatgatctgtttggaaaaatggtttacaggcagctgcctgcccctttgcagcagctgatccgggaaaatggagaattatacaggatcggtgttcatgggccagatattctgttttactttatggttacgccgaatccggtaacagcgaaaggtatttccatgcaccggcagaaggctgccgctttttttgaggcagggatgaaacaagtaagagagacagacagtcatgcgctgtttgcatatatgatagggtttgggtgccattatcttctggattctatttgtcatccctatgtaaatcaggtggatgactccggagctttgcgtcacagcaccctggaaacagagtttgacagatatctgatggaaaaaacaggtaaaaatccctatgcatattacccttcttgcggggttgtgccggatatccgctatgcaaaggtgatccatcaggcgattcctcaggtgagcagcaataatatttgcatttccatgaaaatgatgaaatattttacaaatcttatggtctgtgatgacggaggcatgcgaagaaaatggatcgggcacatcttaagactgggcggaaagaatttccaggaggatatgttagggcattttatgactcctgcacctgtaaaggaaagtcagatacctgtgaggcagttggaagaatacttccgtaaggctttgcttgcagctccgaaagatctgatggaattatacagcctggcccttatgccgggcagtctgtctgaacgatgggataaaacatataacggttaaggtatattcaggacatgcctgcatatgattattataaaatcaggtatctggatccgtgtatccggatatcaggctgcggggtgtcagatgaaaggaaaactgaaaaagacagcagtgtgctggtgtctgctgcttcttgtaactatttatattccagcatatggaaaaagccaagttacggaggtgcagatgatccccaatctggtggatctagtagaaaacagtgagccagaagagccggggagcctctattccctgtcagcagtgctgatggatggaaattccggcaggatcctttatcagaaggacggagaagtaccaagaccaaatgcaagtaccacaaaggtgcttacctgtattctggcattagaaaacggatctggagatgactatgtgagtatttcaaaaaatgccgctgcccagccggaggtgaggctgaacctgcatgaaggagaacaatattacctggaagaccttttatattctctgatgctgaaaagtcataatgatacggcagtggcagttgcagagcatatcggcggcagcgtggaaggctttgctgacatgatgaatgcaaaggcaaaagagatcggatgcaaggatacttattttattacaccaaatggtctggatgcttcggatgcaggcggggtacatcataccacggctgaggatctggcaaggatcatgaattatgctatttccaatccggtatttcttaaaatcacccagacaagggattattctttttcagatttaagtggcaaaagacatttttccctgcataatgcaaatgcattccttgatatggaagaaggggtgctttcaggaaaaacaggatttaccggcaatgcaggatactgttacgtgtgtgcttgtgagaaccaggaaaggacatttatcattgcccttcttggatgtggatggcctggtaataaaaattacaaatggcaggatgcaaaaaagcttctgaaatacggggaaacctgtttcagatatgaaaattactggaaagagcttaagatcccaaggatttctgttgaaaatggaacctcaggaggcagcaggccgggacaaaaggtatggatccagggaaaattaagggcaaaagaaacagataaaaagaaaaaagtactggttcgtaccgatgaaaaggtaagctgcagcctgaagctggaaaaggaacttcaggctcctgtgcaaaagggacaggagatcggagaagtgcgatacatgcttagagatgaactgctggctgcttatccggttgttgcagataagaatgtggaacggatcagttatttctggtgtgtggatcaggtgtttcacttattttttcatagctgaaacaaaaaaaagaaagaagaaaaagtatggaaaggagcttttgccgaaagattcctgcagggaactttttgcaaggctcttttttgctgtttcagtataaaaagacttgaaaaaaaggttgaaaaattgtacaattacaatcggcagattttttggttatacttttaaatttttataaaacggagggcaaataagaatgagtaatgcaacacaaagcttagcaggcaaaagaattacttctttgcttgatgcaaacagttttgttgagatcggccaaagtgtgacagccagaagcactgatttcaacttagctgaaaaaaaagcaccttctgacggagttattaccggatatggtgtcattgacgggaatctggtttatgtatacagccaggatgtatccgtattaaacggtacagttggcgagatgcatgccaagaagatcaccagactttatgaccttgccattaagacaggcgcaccggtgatcggcctgatcgactgtgcaggacttcgtcttcaggaagctaccgatgcactggaggcttttggagagatctacttcaaacagactctggcatccggagtgattcctcaggttacaggtattttcggtacctgcggtggaggtatggctgttgttccggcgcttactgattttacttttatagagagcaaaaaaggaaaaatgtttgtgaattccccaaatgcactggaaggcaatcacattgacaaatgtgatacatctgatgctgcattccagagcagtgagacaggactgattgacggagttggcaccgaagatgagatccttgagaagatccgtgagctgatttcctacctgccgtctaataatgaggattctgatgcatatatggagtgcacagatgacctgaaccgtgtatgtgaggatattgcaaactgcacaggagatactgctattgcactttcaaggattgctgacaatgagcaattctttgagatcaaaccagacttcggcaaagatattgcagcaggatttatccgtctgaacggagctactgtaggtgctgttgctaacagaagcgagatttatgatgcacaggacaacaagtccgaagagttagacggaagcctttctgcaagaggcgcaagaaaagcagcagattttgtgaaattctgcgatgctttccagattcctgtacttactcttaccaatgtaacaggctttaaagcagacaaatgcaacgagagaactcttgcagcttctcttggacagctggtacatgcttttgcagatgcaactgtaccgaaggttaacgtgatcgtcggcaaagcattcggaagcgcttatacagtgatgaacagtaaagcccttggtgcagatatggtttatgcatgggaagatgcacagatcggtatgatggacgcatccctggcagccaagatcatgtatgcaggtgcagatgcagctacattgaatgagaaggcagctcagtacaaagaacttcagtccagcgttgagtctgctgcacagagaggatatgtagataccattatcagccctgcagacacaagaaaatatgtgattggtgcatttgagatgcttttcacaaaaagagaagcacgtccgtccaagaaacacacaacggtctaagtgaggtggagcatatgaaaggtatttttaagaaagtatcctgcttctgcgcttcgatcttatgtgcggcagcccttgtactgggtacagccggagctgtatgggcagatgtggatgatacgctgaagcagcagatgatcacaactgcagaaggcctgacccagaccattgtccagctgacagatgaccaggtagaggcttattccaagtccagtgacagctttactaccagtgctatgacagcatgggctggtgcaaaggatgagcttggaaccatgaaagaggatcagaaggatgccggagagacagacttctctgaggcaaatggtgagtataccattactgttcctgtagcatttgagaaatcagatgcaaagtttgtatacgtatttaatgagtctggtgctcctacatctgtaaatgtggacatccaatattcaatgagtgatacactgaaaagagctgcaatgaatacagtgatgggtcttgctaccgtatttggagttctgtttttcctgatgtttgtgatctggctgttccattttattcccaatggcagcaagaagaaaacagaagcaccggcacaggctcctgcaccggcaccggtagcagcacctgttgttgaagatacagcagatgatggtgaactggttgcagtgatcgcagctgctattgcagcagcagagggcaccagcacagacagttttgttgtgcgttctatccgcaaagtgaatcgtaagaaatggtaaataacaggaggatttcaaaatgaaaaattatacaatcacagttaatggaactgcatatgatgtaaccgtagaagagaatggaagtgcagcaccggcagcagctccaagagcagcagcaccggcaccgaaggcagctcctgcaccaaaggcagcaccggcaccgaaagcagcagctgcaggcgcaggttccgtaaaggtagcagcacaggttcctggaaaagtattaaagatcgttgcatctgtaggacaggctgttaaatccggtgacagcattgtgatcgttgagtccatgaagatggagattccggtagtagctccacaggacggaactgttgcaagtattgatgtggcagaaggtgcctctgttgaaaatggagatacccttgcaacattaaactaagtcgggaggtattcagatgtcttatgtaacagatactttgtccaacctgcttcaccagacagcattttttaatctgacatggggcaattacctgatgatcgtggttgcatgcgtattcctttatctggctattgcaaagggatttgagccgcttcttctggttcccatcgcattcggtatgcttttggttaatatttatccggatattatggctaatccggaagatatgtccaatggtgtaggtggacttcttcactatttttatattctggatgagtggagtattttaccatcccttattttcatgggtgtaggtgcgatgacagactttggtccgctgatcgccaatcctaagagctttatcatgggtgcagctgcacagcttggtatttatgttgcttacttccttgctattttccttggcttcaacggaaaggcagcagcagctatttccattatcggtggcgcagatggtcctacatctattttccttgcaggtaagctgggccagtcctctttgatgggacctatcgctgtggcggcatattcttatatgtcccttgtacctatcattcagcctccgatcatgaagctgtttactacagaagaagagcgtaagatcagaatggatcagcttcgccctgtatccaagcttgagaaaatcctcttcccaatcgtgatcacaatcgtagtatgtatgatccttcctaccacagctcctcttgtaggtatgctgatgcttggtaatctgttcagagagtctggcgttgtaaaacagctgacagagacagcatccaatgctttgatgtatatcgtagttatcttactgggtacctctgtaggtgcatctacaagtgctgaggcattccttaatgttgctacacttaagatcgtagttcttggtcttgtggcatttgcatttggtacatttggcggtgttatgcttggtaagcttatgtgcaagctttccggcggcaagatcaatccgttgatcggttctgcaggtgtatccgctgtgcctatggctgcccgtgtatcccagaaggttggtgcagaggcagatcctaccaacttccttctcatgcatgctatgggacccaatgtggcaggtgttatcggtacagcagtagcagccggtacatttatggctatttatggagtttaatattttagaataatataaggagtacaatcatggcagaaattgaaaaaaaacctgttaaaattgtggaaaccattctccgtgatgcacatcagtccctgatcgcaacacgtatgaccacagaacagatgcttcccattgttgataaactggatcaggttggctatcacgcagtagagtgctggggtggtgctacctatgatgcctgccttcgttttctgaaagaggatccgtgggacagacttcgtaaattacgtgacggattcaaaaatacaaagctgcagatgcttttccgtggacagaatatccttggatatcgtccatatgcagatgatgtggtagagtattttgtacagaaatcccttgcaaatggtattgatatcatccgtatttttgactgtatgaatgaccttcgtaatcttcagacagcagttaaggctgctaacaaagaaaaaggccatgcacaggtagctctttcctatacactgggtgatgcttatacaatggaatactggacaaccatggcaaaacgtatcgaggagatgggcgctgattccatctgcatcaaggatatggctggtcttcttcttccatacaaggctacagagcttgtaacagccctgaaagagactgtaaagatccccatcgatcttcatacacattacacttcaggtgttgcttcaatgacatatctgaaggctgttgaagctggtgtagatattattgatacagctatgtctccgtttgcactgggtacttcccagcctgcaactgaggttatggttgaaacctttaagggcacaccatatgacacaggatttgaccagaagcttctggctgagatcgctgattacttccgcccaatgcgtgatgaagctcttgacagcggccttctcaatcctaagaaccttggcgtaaatatcaagactcttctgtatcaggtaccaggcggtatgctttctaacctgacctcccagctgaaggagcagcatgcagaagacaaattctatgatgttctggaagaggttccacgtgttcgtaaagatcttggtgagccgccgcttgttactccgtcatcccagatcgttggtacccaggctgtattcaacgtgatccttggcgagagatacaagatggtaacaaaagagacaaaggatgtactctccggtaaatatggtgctacagcaaaaccgtttaacgaagaagtacagaagaagtgcatcggcgatacaacaccgatcacatgccgtccggctgaccttcttgacaatgagctggataagcttgaaagcgagatggcacagtataaggagcaggatgaggatgttctgtcctatgcactgttcccgcaggttgcaactgagttcttcaaatatcgtcaggctcaggaaacaaaggttgatgaaacaaaagcagatacaaagaacggagcatatccggtataatgaaatgatgtaacgcttcagttacagaatacatttcgcagctttgcagattgataagggggtggggtataagcaggcataagtttgcaggcttatacaacaaccccttacttttataggtagtgatggttccaacaggccatataaccatattgagacacagaaaacagaaagttgagaatttatgagcagagttttgatcataggcggcggtgctgcagggatgatggcaggcgttcatgccggaagactggggcatcaggttcatatcctggagaaaaatgaaaaactgggtaaaaaattatatattacaggaaaaggcaggtgtaatgttacaaatgcctgtgatgtggaagagctttttcctgcaatgatgagtaatggaaagtttctgtacagcgcattttatacttacaccaatcaggatgtatataccttctttgaagaagcaggggtgcctttaaaggtagaacggggaggcagggtttttcctgtgtccgaccattcttcagatattatccgagccctggaaaaagaactgaaaaaggcaggcgtacagattcatttgaatacgaaggtaaaagaactgcagtttcatgatgaccatgtggaaggcgtgatccttgatcatgggaaagtattggaagcggatgcagtgattattgctacaggaggcttatcttacccggctaccggttccacaggtgatgggtatcgcttcgctaaagatgcaggacataccattgccagactttccccatcacttgttccactgaagaccaaggaagattatattcccatgatgcaggggctttccttgaagaacacacagcttactgtgaaatcagggaaaaaggtggtttaccaggactttggggagatgatgtttactcattttggcgtaaccggccctatgattctttccgccagtgcgcatctgggcagatatctggacaagggagaagaactgaaaggatatctggatctgaagcctgccctttcaaatgagcagctggatgccagagttctccgggaatttgaaggtggacagaaccgacagtttaaaaatgtgatcgggcatatgtttccttcttcccttacccctgttatgctgcttcttggcgggattccgggagataaagtgatccatgatatatccagggaggaaaggatgcattttgaagaggtagtgaaagcatttccttttaccataaccggtatgggtgagtttaaggaggcaatcatcaccagaggcggcgtttctgtaaaggagatagtcccacagacaatggaatcaaagaaaatgaaaggcttatattttgcaggagaggtactggatcttgatggcgttaccggtggctacaatcttcagatcgcctggtctaccgcttatctggcagcacaggccattctgtaaaattgaatgaattagatggttacaaggagggaacttgaaaatgggttttaatatagccattgacggcccggcaggtgccggaaaaagtacaattgccaggactgtggcaaaagagctttcttttatctacgtagatacaggagctatgtaccgggctgtagcattatatcttatggagcttggcatcactgctgagcagaaagaccagatcagtgaaaaatgccaggatgcccatgtttctatccgttatgtggatggggaacagcaggtatggctgaatgacagggatgtgagcagccagatccgtaaagaagaagtgggtaatatggcttctgtggtttccgcagtcccggcagtacgccagcatctgttccagcttcagcgttctctggcagcagagaataatgtggttatggatggaagggatattggtactaccatacttccggatgcacaggtaaaaatcttccttactgccagcgtagaaacacgagggaaaagacgtgccctggagttggaagccaagggagaaaaacacagtattgaagaaatctgccaggatatccgcgacagggatcacagggatatgacgcgggaaatctcaccccttcgtcaggcagaggacggagtgcttgtggattcctcagatatgaccatttctcaggtggtacagcggatcctggatatttaccgggaaaaggcggaagactaatgaaagtagtaactgcaaagacagcaggcttttgttttggcgtgcaaagggctgttgataaggtatatgagctgatcagccagaatgtggcaccgatttatactctgggaccgatcatccataatgagggtgtggtggaagacctggagaaaaaaggagtccaggtgatccaggaagaccagctggagacgattcaggaaggaactgtggtgatccgatcccatggtgtggggaagaatgtatacgacaggatcaaagcacagggtctggattatgtagatgccacctgtccttttgtactgaagatccatcggatcgtagagagagaaagcctggcaggatcacagatcgtgatcattggtgatcgtgagcatccggaagtgcaagggatctgcggctggtgcacaggacctttcaccgtgatccgcaacaaggaagatgcagatcaatttgtaccaattatgggtaaaaagatctgtgttgtgtctcagacgacatttaattacaacaaatttaaagatttagttgaaattcttaggaaaaagaggtatgataatactgttttaaatattctcaatattttaaacactatttgtaatgctaccgaagaacggcagaaagaagcaaaacacatagccggagaggtagacactatgctggttgttggcggccgacatagttccaatactcaaaagctgtttgaaatatgtaaaaaggaatgtgaaaatacttactatatacaaacacctgtagacttggattctgaaatgttccaatgcagtagttatgtaggtattacagcaggggcttccaccccaaagaaaattattgaggaggttcaagaacatgtcagaattaagttttgaacaaatgctggaagattccgtaaaaactattaggaatggagagattgtacagggtactgtcattgatgtgaaagaggacgagatcattctgaatatcggctataaagcagacggtatcattacaaagagcgagtactctaatgatgcaaatgttgtattaacagaagttgttcatccaggtgatacaatggaagcaaaggtactgaaagttaatgatggtgaaggtcaggttatcctcacatacaagagacttgcagcagagaaaggcaacaagcgccttgaagaggcatttgagagccaggaagttctcaaagcacctgtaacacaggtacttgatggcggtttatgcgtgaatgttgaggagacaagagtatttattcctgccagcctggtatctgacacatatgagaaggatctgtccaaatatgcaggacaggagatcgagtttgtgatcactgagtttaatcctagaagacgtcgtattattggtaatcgcaagcagcttctggttgctgagaaggctcagaaacagaaagagcttatggagaagatccatgttggcgataaggtagaaggcgttgttaagaatgttacagatttcggtgcatttattgatcttggcggagctgacggacttcttcacatctctgagatgtcctggggcagagttgagaatcctaagaaagtattcacagttggagagaagctgactgttctgatcaaagatatcaatggtgacaagattgccctttctctgaagttccctgaggagaatccatggcttacagcagatgagaaatttgcagtaggtaatgtagtaactggcaaggttgcacgtatgacagactttggtgcatttgttgaacttgcacctggtgttgacgctcttcttcatgtatcacagatttcccgtgagcatgttgcaaagccatctgatgtattatccatcggccaggagatcacagcaaaggttgttgattttaatggcgaggacaagaagatcagccttagcatgaaagcacttgagagcgctgctcctgcagaggaggaagagccggtagaagaataatctatctgctgctgccaggcaagttgcttgggacgaagcaaacagtatcgatcatttgacactgatgctttgctcatacaaagagattaatacaaagaaataattaaccgcagttaaattagttgagtgttcatctggtttgactgcggtttttgtatggctttttgcatgatcaaagagaatttgtaagcgttattctgcattaatgaatggtttgaatgatccagggcaaagtgtgctccaggtattttttctgaatggccggatctgtaaggaaagcgcctgtgcagtcaaaccaggtataacagttgtttttggtggctggctttcgcaagcttttgtccataaagcgggtcaggcttttgggcattatggtatcttctcctggaatataatcatattccttgtaattcatataatattgtctggctttgccctgataagtatttatcaggatacgaacttttttaccttctcctgttatataaaaatcctgaattttgttggaaaaggcaacaggaagaggataaggaagctcaagcgaaaggataagattgtccgatgtacaggtaagatccgtgcatgtgtatctgccatcaagaagacagagataggccatcatttcatagacgcagccaagtccgagaaggtcttcctggttgtgtccaagcaaagaggaaagaagtgccggatcctggtttttgatgtaatctttgtataaatggatacattctcctccgttacagtactgtctggcggaaataccaaggaaattttccatctgctcctgcttcatgccaggaagcttcagaagggccttcacaggctttaatttcttatatagatcaacagaaaaaagttctgtaaaaggattttccatctgatgggctgccagccgtgcttcaagataaggctggtcaaactgatccccattatactggatggagcaggtaaaaggcttaaggaaggatgaaaaagcagtgagaatttcttcttcctgctgtggggattcccccatccactgacacatctgccaggtttcaccggtataatagataactccgatcaaatataaaaaagtggaatttcgtgatagtccggtggtttcgatatcataaaaaacagggttgaaatcagaggtttgaccggttgaaattgataattttctgacacactcaaagtctggaaaaccttgtaaaatcggcatttttttaacaatcattgatctcgttcctttttatgtatttttatttattatatacaaatttttttgaaaatggtagtgaattttttcataaaatgagttatagtaataaaaagataaagttgtgaaaggggagcatatgtggagtttaacaattagaggcatagacatgtatcatcttgtcagctggttttttatatacagctttttgggctggctttgggagacctgctatgtgtctgcaaaggaaggggaatgggtgaaccgtggttttattaatggccctttttgtacgatttacggatgtggtgccctggctgtttatctagtgctgtatccgtttcaggagaatctgctgatcctgtactttggaggcgttattgttgccactgcgctggagtatgtaactgctgtgctgatggagaacattttccatacttcttggtgggattatagcgataagaagtttaatttccaggggcggatctgcttgggagcttccgtcgggtggggattttttacagtggggttatttaagatccttcatccggcagtagagaagatcgttgctctttatcctcagagggcgggagagattgtgatttatgtgatcgtagttgtatacgcagtggatttttgcttttctgcagcagcagccttccatttgcgagatcgcattccggcatgggagcaggctctggagcagatgcaaggagaacttttgctgaaaggcaggcagaagatggatgccttggaagagtctatgggggttacaaggcaggcactgaaagagaaaatatccttaaagccggattatccggcagtacttgtggagcttgagaagaaaagggctgccatcatggctgacatcaacaaagagcttcggaaatacaaagaaagtatggccggtaaatttggtcataatataaaacgtttcgtgaagtcatatccgaatctgaacagaggttacaagctgcacagaaaagaacggcaggaacacgaagctaaataaaataaactggaggaggcaataaagagtatgggatttttaacctttaaaggcggcgtgcatccttttgacggaaaagacatgtcaaaagaatgtcctacagaaaagtatctgcctaaaggagaactggtatatccggtttcccagcatatcggtgcaccggccaagccgctggtaactaagggagatcatgtgctggcaggtcaggtcattgctgaagcaggcggttttgtatctgcccctgtgcatgcatccgtatccggtacagtaaaggggattgagccacggttgacctcgactggttctatggtcagttccattatcattgagaatgacggagaatataaagaagcagaattcgtgccagccagactggaagatctgtccagagaagagatcctggacaggatccgtgaaggcggcgttgtgggtatgggcggtgcaggctttcccacccaggtcaagctgtcgcctaaggatcctgataagatcgaatatatcctggtgaacggggcagaatgtgagccttacattaccagcgattaccgcaggatgatggacgagccgcagaaggtggtggacgggctgaggatcgtgcttaccctttttgaacatgccaagggctgcatctgtattgaggataataagccggattgcatccggaagatgaaggagttggtacaggatattccccggatcgaagtaaaagagctgatgacaaaatatcctcagggtggtgagcgtactttgatctatgcagtgactggcagagagatcaattcttccatgctcccggcagatgtggggtgtgtggttgataacgtagagaccatggtagctatctctaatgctgtactgctaggacgcccggttatgagcaggatcattaccattaccggtgacggcatcagccatcctgcacattatgaagtgcttaccggtaccaatgtggaggagctggtgcaggcagccggaggtttaaaagacaatgttaaaaaagtgatcagtggtggtccaatgatgggatttgccatgtttgatttgcatgtaccctgtacaaagacaagctccgcacttctttgtatggcagaggatcctgcttccgaatcagaagctactgcatgtattaactgcggacgctgcgtaaaagtctgtcccgggcatgtaatgccttcaagactggcaacacttgcagaacatggggatctggaaggctttcagaagatggatggtatggaatgctgtgaatgtggatgctgcagttacatttgtcctgcaaagcgtccgctgacccaaagcattaagtccatgcgtaagattgttcttgcaaaccgtagaaagaaatagagggggcatacattatgggagaaatgttacatgtgtcatccaatcctcatgtaagagacaggatgacaacagcaaaaataatgcagatggtatttgtggcactgcttccggcagctgcagtaggtgtatggaattttggacttagggctctccttgtgctgtgtgtgtctgttttgtcagcagtctgttcagagtgggtttacgatcatttcatgcataaacctaacacagtaaaggattggagtgcagctgttacaggacttttgcttggcatgaatatgccggtttccattcctttatggataccggtgcttggaagcgtttttgcaattattgttgtaaagcagctgtttggaggattaggacagaactttatgaatcctgctctggctgccagatgtttcctgttgatttctttttctgcaaggatgacagacttttctgtttcagacagttttaagggagtggtggatactgtgacaggtgctacaccactggcagcattaaaggatcatgggtttgtttctgggtctgttcctatcaggaatctttttgtgggaaatatccagggaaccattggcgagacttctgcactggcgatccttttgggcgcagtgatccttcttacctttaaggtgatcgatctgaagatcccgcttacatatctgggtacattttctgtttttgtagtcctgtacctttgcttttcaggaaagggctttgatatgaattatctgcttagtgaactgttttccggcggtctgatgctaggtgcatggttcatggcaactgattatgtaacatcaccgatcacgcaaaaggggcagtatgtatacggtatctgtctgggtattgttaccggtgtgttccgcctgtttggcgcttcagcagagggtgtttcctatgcgatcattttctgcaatcttcttgtgccgcagatcgaacgttttacctgtcctaccgcctttggaaaaggagggaaaaaacatgagtaacagaatcgtaaaagatgccattgccctgactgtgatcacactgatctcaggtcttctcctgggattggttcatgatattactgcggatcctattgcaaagcaggaagccaaagaaaagtcagaggcctataaagctgtttttgcagatgcagcttcttttgaaactttaaccgatacagaggatccggatctggaagcttatctggatgatcagggatatccaggtgaaagcatcaacgaagtgatgcttgcaaaggatgattcaggtaatgtccttggttatgcgtttaccgttaccacatctgaaggatatggcggagatattaaatttgctatgggagtaaaggacgatggtactatgactggtatttccttcctttctatcagcgagactgccggcatgggtatgcgtgcagatacggatgactttaaagaccagttcaaggacagaaagacagagaagatcacatataccaagactggagcagccggggctgatcagatcgatgcattaagcggtgctactattactacaaatgccatgacaaacggcgtaaatgccggactgtgtgcttatcgttatgagatgcagctggcaggagagggggacaatcagtgatgaaacagaattcgccttcagaacggctttataacggaatcataaaagaaaaccctacatttgtgctgctgctgggcatgtgtccaacactggcaatcaccacctcagctgtgaatggtattggtatggggcttaccaccacagtgatcctggcggcctccaatctgatgatctcccttctgcgtaatttcattccagacagagtcaggatgcccgcatatattgttgtagttgcttcttttgttacaattgttcagatgcttctccagggttttataccaaccctttattcttcccttggtatttacattccgctgatcgtggtaaactgtatcatccttggaagggcagaggcctatgcatccaagaatccgccggttgcatccctgtttgatggcattggtatgggacttggttttacggtaagtattacctgcatcggcgcagtgagggagctgatcggcgcaggtgctcttttcggacatcagatcattccactggcagatgcggcaggtaaaggcggctatcagccggttaccatctttgttcttgcaccaggtgcattttttgtacttgcagccctttcggccatccagaataaatttaagattggtgctgcaaagcggggaatcgatccaagtaattccggttccggatgcggcggcggatgtgctgcctgcggcaataccatgtgcagtgggaagggaggcaaagaatcatgaaggaaatgcttttgatcattgtaagtgcagctcttgttaataatgtggtacttagccaattccttgggctttgtgcattccttggtgtgtccaagactacaaatacagctgcaggaatgggcggcgctgttatttttgttatcacattgtcctcctttgttacaagcctgatctacaagttcattcttgtaccgttggatctgacttatctgcagaccatcgtatttatcctgatcattgcagcactggtacagtttgtggagatgtttctgaaaaaaaacatgacggccctctataaggccctgggtgtgtatcttccgctgattactaccaactgtgcagttcttggtgtggccctgatcaatgtacagaaggattacgggatccttcagggaactgtaaacggatttgccactgcagtgggatttacgatctccattgtacttatggccggtatccgtgagaaaattgcatataacaacattccaaagtcattccagggctttcctatcgtgctgatcacagccggtcttatggccattgcattctttggattttccggactgatttaaggagggtgtaagatgaatattggggcgattgtaacagcaactgtactcgttgcccttgttggcctttttattggtattttccttggggctgcagggaagaagtttgctgtggaagtagatgaaaaagaagttgcgatccgggaggcactccctgggaataattgtggtggatgcggatatccgggatgtgacggtcttgcagctgccattgcaaaaggagaggcgccagtgaaccgttgtccggtaggcggcgaaccggtaggcaagatcattgccagtattatgggacaggaagcaggagaaagtatccgccagactgcatatgtaaagtgcaaaggtacctgtgataaaacaaaggattattatcagtataccggcgtggaagactgcgagatgatggcttttgtgccaaatggcggcgctaagatgtgtacttatggctgccttggctttggaagctgcgtaaaggtctgtccttttgatgctatccatgtgatcgatggtgtagcagtggtggaccgggaagcctgtaaagcctgtgggaagtgtgtggcaaagtgtccaagacatctgatccagctgattccatacgaacagcagatctttgtgggatgcagttcccatgcaaagggtaaagcagtaacttctgcttgtgatgtaggctgtattggctgtaagaaatgcgagaagacctgcccgaatggagctatcactgtaacagatttctgcgcacagatcgatcctgacaaatgtacgggatgcggtcaatgtaaagaagtctgtccaagagggatcatccggtaatcctaacaaaatagctgtaacatgaaagaccgtcctgctaagctgtggggcggtcattcatatgaattcaggggttgagaaacttgaggcggatttgtctactttgttttatcgaatggatgtttgcactttttcctgacctgtggtatgataaaacaaatttatggatttaaggagcacttcatgatttcatttgttaagggaaaagcagcagatatgacagaaacatctgtgatccttgagaatcatggcattggctatgagatctttatgacaggaaatgacctttccaggatccatatgggtgaagaatataaaatacatacgtatttccaggtgagggaagatgctatggttctttttggatttcttcagaaagatgatctttctatgttcaggcttttgcttggggtgaatggcattggccccaagggagctttgggagttctgtccggcctgtctgcagatgaactaagattcgccattctggcagatgatgccaagactgtttctaaggctcctggcatcgggaaaaagactgcccagaagctgatcctggaacttcgtgataagttaagccttgaagaagcctttgaacagaagctgtcccatgagaccgcagggatagtggtatcctcagacggcatgacggatgccaaaagagaagcggtagaagcattgacagccttgggatacagtagcacagaggcttatgcggcagtgcgatctgttgcaggggtggatctggagaatgtggaagagattctgaaagcagctcttaagaatttctgacgtcagataaggggaatataagaaatggagaacaggatcattaccacagatgtaacagaagaagactatacgctggaaggaagccttcgtccaagaaccctggaggagtacatcggacaggaaaaaaccaaaaataccctgcggatatacatagaagcagcaaagcaaagacatgatgctttggatcacgtattgttttacggtcctccgggacttggaaagactacactttccggtattattgccaatgaaatgggcacccacctgaaggtgacgtcagggccggctattgagaagccgggtgagatggcggctatactgaataatcttcaggaaggggatgtattgtttgtagatgaaatccacaggctgaaccggcaggtggaggaggttctttatcctgctatggaggactttgccattgatattatgatcggtaagggggcgtcggccagatccatccgtctggatcttcccaggtttacactggtaggagccaccacaagggcaggccttttatcggcacctttacgggatcgttttggggtggtgcatcatctggagttttacagccagcaggagctgacaactattgtaattcgttctgcacaggtacttggagtagaaattgatccaaagggagctgctgagattgccaagcgatccagaggtactccccgtcttgctaaccgccttttgaaaagggtcagggattttgctcaggtaaaatatgacggaaggatcacactggaagtggcgaattttgcactggacttgttagaggtggattcctatggactggataagctggatcgacggatccttcagactatgatccgtaattttcagggaggtcctgtgggtctggaaacactggcagcagccataggagaagatgcaggtacactggaggatgtatatgagccttatcttctgcagaatggatttcttggaagaaccccaagagggcgtattgcaactgccgcagcttatgaacatctggggtatcccataccatccgaaaaataatgctatacatttttacacatttcgattataatagaacggcagaagtgccaaaaagagaaattattccatttatattggttaaatgattacagatagaagaaaagcaggaggcttgtacggatggcggtcaaaaatacggcgcaggttattatcggcgggaaaatcattacattgggaggttacgaatcttctgagtattttcagcaggttgcgaattatatgaacagaaagctgtcagagcttagcgagatgccaggttatagcagacagcccatggagacgaagcatacccttctcagcctgaatattacagatgattattttaaggcaagaaagcaggtagagacttatgaacaggatctgcagcagaaggatcaggagatgtatgatctgaagcatgaactgatttcgctgaaaatgcagatggaggaagccagaaagacagagcaggatgcgattgaccagaagaaccgtctggaaggcaaagtaaaggaactggaaaaagaactggatgaaatgctgaaataagaacgagggggattgcttacaggtaatcctcttttttataggagggagcatattgggtcaggacagaaagatagaactgctggcaccggcaggctcgtatcagggctttgaagcggctttgggcgcaggtgcagatgcagtatatgtaggaggcaccaggtttggagccagagcctatgccagaaatttttcagatgaagaactgcttcaggcaattgatacagcacatatttatgggaaaaagctgtatcttacagtgaatacccttttaaagaataaagaactttatgaggaattgatcccgtatcttcagcctttttaccaggctgggctggacggagtgatcatacaggattttggagtttttacagcactaaaagaagcttttcccctgcttcatcttcatgccagcacccagatggcagtaacaggacctaaggggatgagatttcttgaacagcagggagcggtcagagtggtggcagccagggagctgacccttaaagaactggaaaaaatgcatcaggaaagcaacctggagatcgaagcatttgtacatggggctttgtgctacagctattccggccagtgtctgatgagcagtattcttggcggcagaagcggtaacagaggcagatgtgcacagccctgtcgccttccttatgatacctccttggacggaagaaagaattataaaggtaaaggccagatgtgcccgttaagcctgaaagatatctgcaccattgagatattaccggagatcctggaagcaggagtgacttctcttaagatagaaggacggatgaaacagccggagtatacagcaggagtgacggctgtatacaggaaatatctggatcttctggaaaagaatggaaaagaatcctatcatgtggaagaaaaagacaggaaatatctgctggatctgtttaataggggcggatcttgtacaggctattataaaatgcagggcggaccttccatgatggccttttccaatgagaagaaaacaggggaggtttccctgaatctaagaaaaagtaaagaaaaaatttatgggaatttaatactttttcccggaagtcctgttatactggaaataacctgccagggtaagaaggtaacagtcttaggcggagaggttcagtatgcgagaaataatcctatggcacaggagcggatccggcagcagatggagaagctgggaaatacaccgtttgtctggggagatcttaagatccagatggaggacagtatttttgtgcctatgagtgcattgaaccagattcgcagggatgcgcttaccaagcttcaggaagaattgcttaagccctaccgccgcagccttacaggaaagcttccctctgctttgacagacagtcagaagagcatacttcactctccggggatcagtgtatcttgtgaagacagggatactgcacaggcacttttgaagactggtggttttcaaggcatgtacctgccttttgatctgatggaatttttccttgataaaggagtcagagcagggatttccatgtatcttgccctgccttatattaccagaggtcagatgccagatatagtgcaggagaagataccaggctggcttgcaaaggggatgaaaggattcctggtacgtaatctggaatcctatgccatgctttccgaaatgggatatggagaaaaatgcaggatcgaccatactctttatacctggaacaatcaggctgtggatttctggagagcgcagaaggtgcttggcaatacggtccccttggaattaaatcagggagaattgggacacagggataatcaaggcagtgagatgctggtttatggttatctgccactgatgtattctgcacagtgtgtccgcaggaatgtatatagctgtaagaaaactgactgcacacagcagaaaataaagaaagacagggcagatgtatatctgaaggatcgatatgagaatctgtttcctgttgtatgtgaatgcgatccctggaaaacaggaaatacagaaaaaattctgccctgttataatatcatttacaatacacttccttttggacttctgaaagaaagcaggcaggtaaagaatctggggatagattcagtgcggctttcctttaccatggagtctcctggtgaagctgtccatattctgaaggattttacagctgcttacagggatggacaggatgtgccggaccggaagtttacaaaaggacattttaaaagaggagcccagtaaaggcctatgattaatattattgttgaactgtcaaaatatgtgatcctgactttgatgatcgtatatacctttcattgcttttatatggtaagaagacaggatcaggaagagcggcgggagatgcttaccaggcagctgatgcttattttctttattgattttacagcatttcttgtgatctatctgaagacctttgatttcagcgtgatcctgttttatgtggagatgatggtttattttgcactgatccagattctgtaccggatcatctacaagaatgcgtcgctgcttctactgaataatatgtgtatgctgttaagcattggatttgttatgctttgccggctggatatcaagtctgccaataagcagttgctgatcgtagcagctggtagtgtggtatctcttctgataccggttatgatccgcaagatgaaatttcttaagaatctgacctgggtatatgcagggattggtattgtgcttctggcagctgtttttcttctggcaaagaccagctacggggccaagctatccctgatggggatccagccctcagaggccattaagctttcttttgtatttttcatggcatctcttttatggagggatgtgaacctgaaaaaggtgatccaggccactgtgatcgcaggcattcacgtagggatccttgtactgtccaaggaccttggaagtgcaatgatcttctttactgcctatctggtgatgatctatgtagctaccaaaagcccggcacttctgggaatcggagttgcaggaggaagcggggcggcagtggttgcttatttcctgttcggccatgtgcgccagagagtgagcgcatggaaggatcctatggctgtttacaagaatgaaggataccaaatcgttcagtctttgtttgccattgggacaggcggatggtttgggatggggctgtgccagggttcccctgaaaagatcccggtagtaaagaatgactttattttcagcgccatatgtgaggaactgggcggcatatttgcaatctgcctgattcttgtatgcatgagctttttcctgatgatcctgaatattgcactgcagatcaagaatcctttttataagctgatcgcacttgggcttggtacggaatatgcctgccaggtattcctgaccattggcggtgttaccaaatttatccctatgaccggagttaccctgcctttggtggcttatggaggaagttctgtagtaagtaccctccttatgattgccattatccagggaatatatatttacagagaagacgaggatgaagaaattgagagattccgaaaagaagcggcaaagagagctagagaaagaatacaggcgcaaagagaaggagattactaagaaaaagaagaaaagaaatcgggaatatgcctttgtttcttatttctttgcagctgtttttttcagtatgatcgcatatctgatctattttaattctgtgaaaagtgacgattttatcaatagtccgtacaataccagacaggacactttttcagaccgtgtggtaagaggaaagatcctgtccgcagacggacaggtacttgcacagaccaatgtggctgaggacggtacagaagaacggtattatcctttttccaatatgtttgcccatgtgatcgggtatgataccaatggcaagagcgggctggagtctgaggctaatttctcgcttttaagttcccatgcctttttcctggatcagatgaagaatcagttcctgaaccagaagaatatgggagatactgtagtctccacgttagattccagattacagcagactgcctacaatgcccttggtgacaggagaggggcagtggtcgttttggaggcttctacaggtaagatcctggcagaggtaagcagacctgatttcgatcccaacacattgtcacagaactgggatatacttgtaaatgatgagaatgacagcagtcttttgaacagggctaccaatggagcctatcctccagggtcaaccttcaagattgtaactgctcttgattatttccgttcaaaaggcacctttgaaggatattcttatctgtgtcagggaagtattacagtaggagaccataccattcagtgttatcatggccatgtacatggacaggaagatttttacagtgcatttgcaaattcctgtaattgtgcttttgcagatatagggatcagtctgggaggttcatccatcagaaatactgccgaggatcttttgtttaataaggcacttcctcttaattcctacaggaagagcagctttaccctggatggaaagtctggcacttctacagtgatgcagaccgccatcggccagggcgaaacactggtttcccctatgcatatggcactgatcacagctgcagtggctaataatggtgtgctgatgaagccttatctgatcgaccggatcgagaatgattccggtgatctggtgaaaagaacacagagcagtacctacaaaaggctgatgtcttccaatgaggccaatcttcttgggaaaatgatgcgccaggtagtgacttcaggtacagcttctgcgttgaatggcaggtcctatactgttgccggcaagacagggtctgcagagtttaatgagcagggagacagccattcctggtttgttggttatacgaatgtagataatccggaacttgtgatcgcggtgatcgttgagaatggcggagcaggaagtgaagctgcagtgcctatcgcgggacaggttttcgatgcatattatgcttcctgataacttatggttgccagtattctaaaaaagaggtatactatacagcagtaaaacacacgcattacaggagggattgcaagatgatagaagcaacgagctgtggcggtgtggtaattcatcgaggtaagattctggcactttacaaatcctacaaaaaccgttatgaaggatgggtattaccaaagggaacagtggagctgggagaaagccatgagcagactgctctgcgggaagtaaaagaagaagcagatgttaaggcttccattgtaaaatatatcgggaaaagccagtataattttacagttccggaagatatggtaagtaaagaagtacactggtatcttatgacggctgataattatcatagcaagcctcaaagagaagagttcttcgtggattccggctattacaagtttcatgagatttaccatttgctgcgtttttccaatgagaagcagatcgtagaaaaggcataccaggagtatctggagatgcgaagtgcaggtctgtgggcaagaggacagaaatatttttaaaggagggactgctgcatccgtgatcagatccgtgcagcagtccctgtttagatcatggataatatgggtatgctcagattacagataaaggggtgacaggcttatgccaaaatggatcacagactattatataggagcagggatcaagcatcctcagaagacccgtaagaagattgatgcagggcaccttacagtagatgtatacctgatcactttgtcagagaatccaggcaatcttctggagatcattcctgcatctatgctggtgcagaagtcatatgccaggatctgccctacgattgtagggatggagaaaggtaaggatgcggctattgatatggcagcagggatcataaaagagatttatgagacaaccggtcattttcaggtaaaagattattttaagaacaggtgagcgtatgttacatatattatgggcgatcataaagttcatactgattctggcaggcgtgttgatcggacttgccttggcagtcatacttcttatactgttctgtccggtacgttatcggatgtggggcagcaaagaccggggaaactgggaacatgccaggtgcacagccagggtcagctggcttttaggactggtatccttgcggatctgttatcaggatggaaaagaaaaacacagtctgaagcttgctggtatctcgctgtttggaaaaaagaaaaaaagaagaaaaaagaagcctgaaactgatcaggtacaatcagtaaccgccccaaagaagcctgtttctaagcagacagatgaaatgccatccatgccaacgcagacagaagaaaagctgacagtatcaatgcatacagactcagaacagacagatacagcatcaggtaacagaaaggtcaaagaaccacctgctccaaagcctgagaaatctcaatcttcacaaagaaaaggatttttccttggaatcagggcaaaactaaaaacagtgcttcaaaggattaggacattttttaaaaagcttaaaaatatcaggcaaacatttgcacacatcatgaaaaaggcaaaatggtggatgggctttttaaggtcagaagaaatgaaagaagcatttggccttattaaggaacagtgtacaggccttctgaaacacatttttcccaccaagattagtggaaacgcagcattcgggtgcgaagatccggcagtaacaggaatgatccttgcagtgcttggcatgagcattccccttcataagaactgtatccaggtttctcctgcttttgaaaatgaagagagttttctggaaggggaaataaatatgaaaggacggatctacggaatcgtcctgctgcgaacaggaatccgtatttattttaacaaaaatataaagcatatcattaaccagtggaaacataaggaggatctgaattatggaaaatgaaaacaattttaaagaaactgtcaattccctgtttaaaggaatggatggctttgtagcagctaaaaccgttgtaggtgatgcgatccatgttggggataccattatccttccactggtagatgtttcctttggcgtaggtgccggagcatttgcaggagataagaagaataatggcggcggcggtctggctggcaagatgagtccatgcgcagtactggtgatccagaatggtactacaaagcttgtaaatgttaagaatcaggacgggctgaccaaggtgcttgatatggttccggattttgtaaaccgctttgcaccggatacagctgcttccaaagatcaggaagaacaggagtaatagatactaaaaccaaaggaagaacaggagtaatagatactaaaatcaaaggaactgcataagatataataatcccacagaaagaaaggatagagatgaacagactgttaggactcatcctgttctttatagggatcgggatggtcattgggattcttgtaacagaaagcctgctagtttttatggtggcagccgcctgtatgctttgcggttatcatatgttttgtcattaagcttcatacgttgtatatcaggatcgcatatcttaaaaggggagtgcggtcctttcacataaaatggcaaaaaaataccctcgcatctctgcgagggtaaggtgtcatttaggctctctctacatttccggatcttaagcaggaagtacatacgtacatcttctttgagccgccttctgttttaactctgacggatttcacgttagatttccacatcttattggatcttctatgggaatgactcacattgtttccgaaatgagcacttttttcacaaatagcgcatttagccatgatagcacctccttgacgctttttttcaacaggttttattttaacagatgaaatggtcttttgcaagtgaaaaaaggaaaaatataaaataatttcttgacaaatttatttatccgctaaaagatagatctatttctccgttaaaatgccttgaaaataaaagttttttgatatatgatggtacgagttaaaactctatcattgcgaaatgatatgaaaaagggtataatacagatacacgaatatgaattttatggaggtaaaccatatgaatggacgcatagattccggattgggtcagattgtcattgatacagatgtaatagccacatatgccggaagtgtagcagtggagtgcttcggtattattggtatggcagcagtaagcatgaaggatggtcttgttaagctgcttcgcagggattccctgaagcatggaattaatgtacggattactgaggacaataagattcgcctggatttccatgttatcgtggcatacggtgtgaatatcagtacgattgcagataatcttgtcagcaatgtaaaatataaagtagaagctttcacaggacttgagattgagaagatcaacattttcgtagaaggcgtgcgtgccatagattaggattaagaggaggaacttgtggtgagtaaacagaccatagatgccaatgtactttccaggatgtttctggctggtgccaagaacctggaagcgaagaaagaatggatcaacgaattaaacgtatttcctgtgcctgacggagataccggtaccaatatgacactgacgatcatgtctgctgcatctgaagtaggaaatatttcccagatgaatatggaggtactggcaaaggccatttcttccggttccttaagaggcgcaagaggtaattccggtgtgatcctttctcagctgcttcgtggttttacaagaggtgtacgtatgctggaggagctggatgcagtagctatcgccgcagccatggagaagggcgttgagacagcatataaggcagttatgaagcctaaggagggtaccatcctgacagtagcaaaggaagcagccatcaaggcagctgagattgcagagtcagcagaggatctggagccgtttttccttgagatctttgatcatgcagagaagactcttgccaggacaccggatatgttgcctgtgctgaaagaggcaggcgttgtggattccggcggacagggacttcttgaggtgttcagaggtgctattgacggattccttggaaaagagattgattatacagagtttgcaggaacatctgcaggtacggctgttacaaagatttctccccaggcagaagcggatattaagtttggctactgtacagagtttatcattcttctggataagccgcttccggatgtggagcttcacagcttcaagaaattcctgaattccattggtgattccattgtattggtagcagatgatgagatcgtaaaggtgcatgtacacaccaatcatccgggtcaggcatttgagcgtgcacttacctatggtgcgctttcccgtatgaagatcgataacatgcgcgaagagcatcaggagaagctgatcaaggatgcagagaagcttgccagggagcaggaagaagcagaagcagcaaaagaaacaaagccggccaaggaagtaggatttatttccgtatccgtaggaagtggactttctgctatcttcaaggatcttggagttgactatctgatcgaaggcggacagaccatgaatccaagcacagaagatatgctgaatgccattgatcaggtaaatgcaaaaaccatttatattttacctaataacaagaatattgttctggctgccaatcaggcaagggatctgacagaggacaagaccattattgttgtgcctacaaagactattccacagggtatttcagctttgatcagctttgtgcctgagaagagcccggaagagaatctggaagcaatgacagaagcgatctctatggtgcagacaggccagatcacttatgcagtgcgtgataccagactggatgagaaagagatccatgaaggggatataatgggtattggagatcatggtatcctggcagtaggcaaaggacgtaccaatgtagcaaaagatacggttgctgcaatggatacagaggatgcagaagtgatcagtatttactttggtgaggatgtgcctgaagaagaagccgagaagcttggagaagaactggaagcagcatatccggactgtgaagtagaagtaaatatgggtggacagcctatttactattacattatttctgtagagtgatccggcagacaggaggacaggacaatgatgaaaccactccgcagtctgaagggagtcggggataaaacagaaaagctttttcagaagatcggtgtgatcacaactgaggatcttctggaatattttccgagaaattatgatgcatatgaagaacctgttaccatcggcagtctttccaagggagagactgccgctgtttctggtacggttatttccagtgtatatgtaaataaagtgcgaaatctgcagatagtgacagttaccattgcagatgccacaggaaagcttcctgtgacttggtttaatatgccctatcttcgttctaccttaaaaagaggcagtagctttgtatttcgtggtcgtgcagtctggaagcagggcaggcttttgatggagcacccggagatttttacccatggcgcttatgaagagatcctgcacagccttcagccaatctacggactgactgcagggctttccaacaaaacaattataaagctggtacatcaggctttgaatgaagaaagtctgcaagaagaatttcttcctgaagacctgagggaaaggcttcatctggcagatcgtaattatgccttgcagaccattcattttccaaagaacatgacagagcttcttactgccagaaagaggctggtatttgatgagttccttatgtttatcctggctgtacagcagctgaaagaaaagacagaaacagccaggaatgcctttcctatgaagcctgtgtggaccacggagaatattattgataatctgccctattctcttaccagggctcagatgaatgtatggcatgaagtggaaagagatctgtgcagccattccctgatgtccaggctgattcagggagatgtgggaagcggcaagacgatccttgcttttctggcaatgattcttacagtggaaaatggatatcaggcagcactgatggtacccacggaggtacttgccaatcagcattttgaagcatttcagaagctgcttgaccagcagcagatcatttcttgcaggccggttcttcttactggatctgtaactgctgcatccaagcgcaagatctatcaggccatagattcaggggaggccaatgtgatcattggtacccatgccctgatccaggaaaaagtaacctatcagaatctggggcttgtgattacagatgaacagcaccgattcggggttaagcaaagagaggcgctgacaacaagaggtgagtcgcctcatgtattggttatgagtgccacaccgattccaaggacattggcgattattttgtatggagatttggatatttccgtgatcgatgaactgcctgcagcacgtcgtcctattaagaactgtgtggtggacacctcatatcggccaaaagcctattcttttattgagcggcagatacaggaaggcagacaggcgtatatcatctgtcctatggtggaagaaagtgaagggatggatggagcaaatgttacggactatactgcatctctgaaagcaatcctgccttctcacattacagtagctgcccttcacggcaagatgaagcctaaagaaaagaatgcggttatggaggcttttgcagcagggcagatccaggtacttgtatctaccactgtagtggaggtgggggtgaatgtgcctaatgctaccgtgatgatggtggaaaatgcagaacgcttcgggcttgctcagctgcatcagcttcgcggccgggtaggaagaggtgagtatcagtcttactgcatcttcatccagggcaatgaggaaaaagaaacctctaagcgtcttgatatcctgaacaaatccaatgatgggttttttattgccggagaagatttaaaacttcgtggcccaggggatcttttcgggatccgtcaaagtggcttaatggaatttaagatcggcgatatttataatgatgcagatatactgaagatggccagtgaggcaggagggcagatcctggaactggatccggagctggatctgccacagcatgcaggtctgaaaaagcatatgagcagctacctgaaagaccatctggagaatctgggattgtagaggtgcgcaggagaagtatgtcatgcaattgcatgacgcgcacctcgcagcaagaatgcctcggcattcttgaattttacggattctaaggctctgtattcacaaaaagtgaaaaactgtctgtacaaaataaatgaaaaattattgaaaaacagaaaaaaatgtgcaacccccccatatatttattggaaagtaatggttatttctatagataatgaccggaaaatccataaattaaatacaaaattactgaatttagaacagataatcagcttttacatgaaaaaactctaacttgaaaaaagaaaaaaacagtagtatcctagattagtaaaaattaatcttcaccttttaaggaggctattatatggctacaaaaagaaccgtaaagaaagcagagacaatggctgccaaggctgctgcaaaggctaccgtaaaagaggctgctgtaaaacctgttgttaaggaagcagcaaaagaggtaactgtaaaagctgcagagacaaaagctgagacagtaaaagcagagcctgcaaaagaaccggttgtaaaagaggctgccaaggtgactactgcagcaaaagagactgagaaacctgctgcaaagaaaaccactgcaaggaaagctccggcaaagaaagtggttgccaagaaggaagtttctgcagatgtttatgttcagtttatgggaagggaactgctgacaaaagaaatcgttgccaatgtgaagaaagcatgggcaggcatgacaggaaaaaaagaagaagacatcaaagagctgcaggtttatgttaagcctgaagagaacaaagcttactatgttgttaatggagaggctgacggtaattacatcgatctttgatcctgtttgttttacacacatatccccgggaaatcttatgattttccgggattttttttgctaaaaatgagaaagtatgttaatattttacggaaaaccttaagagaattttaatcagggtttatgatagaaagtaagacagaataaagggagagacaatattatgctgaatcaattttccagaacccagcttcttttgggaaaaacagctatggatagattacaacagtccagagtagccgtattcgggatcggcggcgttggaggttatacagtggaggcactggtacgaagcggcgtgggagccattgacctgatcgatgatgacaaggtatgccttaccaatctgaaccgtcagatcatagccaccagaagtacggttgggaaatataaagtagatgtgatgaaagacaggatcctggatattaatccaaaggcagtggtaaatgttcataagtgcttttatcttccggagaacaaagatgaatttgatttttcacagtattcctatgtggttgatgcagtggatacagtaacagccaagatccagctggttatggatgcaaaagaagcaggagtccctatcatcagcagtatgggagcagggaacaagctggacccagccgcttttcaggtggcagatatttataaaacatctgtatgtcctctggcaaaggtaatgcgcagggaattaaaaaaacgtggcattaaaaaattaaaggtggtttattcacaggaaaagccaacccgtcctttggaagatatgtccatcagctgcaagagccactgtatctgtccgccaggggcggcacataaatgtacggagcggagagatatccccggatctgtggcatttgtgccttctgtggcaggactgatcattgcaggagaggttattaaggatctggtgaaataagtaaagattatcataaatggggtgaactgtgagcagcaaccgtaaataatcaataatcaagttacattttatcgtaaaaaatcgacttgacataagatataggggatagtacgatttgtataagagatgctgtcagcacagatcggcaggcagtacatgcattgaaagagagggtttatacaaatgggaaaagaacatgaagagcagatcagaattgtacaggagactgtggcaggtaaggagattacctttgcccatgtaatgggcggcccggcacctgtgatctaccagaagctgggattgaatcctcagctggactatcggtcttctgctattgggattatgaatatgacaccgccggagtcagcagtgatcgcatctgacattgcagtgaaaagcggtaatgtatacctgggctttgcagatcgttttacaggtacgctgatcattacaggagagatctcagatgtgatctccgcattgacagagatcgtggattatttcagggattccctgggatatgttgtctgcaatattacaaaaagataggaagtggttccatgtgttcaatgacgaaagaagagcttctggagcggatcttccatgaagactacaaaagcctgaaagggaaaaagctgcgtatgacacgggtaagggtaccgggcaaggaagtatgtctggcacacattatcagttcttcccagaccagtatttatcagaatctggggcttcatatcggcgttcatgaaggggaagatcatacaggggaatccattggcatgatccgttttaccccttgggaggcagttgtggtagctgctgatgtggcagtgaaaagtgcagatatacagatcagttttatggacaggttctgtggctctctgatcattaccggagggttaagccaggtgcagacggctgtagaatcagtagttaaattttttgatgaagttttggattttaaaacctgttccattcacagaagctagggagacagtatgagaaaattatttttgatgggcagaagtgaagccgggaaaacatccctgacccaggcattgaaaggggaagagcttcattacaaaaagacccagtatacaaagtcagatgaggataccattgactccccgggagaatatgcggagtccaagagatttagcgtaggtctggcatgcttttcctttgaagcagatgtagtagggatcgtacaggccgcagacgagccatttaatcttttcggggagggatgccagtcctttattttgcgccctcttattgggatcatcacgaagatcgattccccttatgccaatatccctatggtacgtcagtggctggagaatgccggctgtgaacggatttttcttgtgaacaatgtgacccgggaaggaatagatgagctccttgattatctttctcaggatacaccgaagcttaccatggaagaggccaggtacagacaaagtctgggacttaatgagtgggatcccattccaatggaagagaagcagtctgattattgacactaaaaatacgaaatgatataatataaaattataaattaccaggcgtggtcaggtcaggcgtgatctgttaaaggaaatccggtgagattccggaaccgtttcgctgtgtgaaatgccacagagacattttaagtcagcatatccaacacgttgttaagaggacagaggctcacagcagatcgtggggctctgtttttgttacttatttgtactattcacaggtaatatcccagttgccgtcaccggaggtactgggaatacattttaacagagtgcaaagtaacgataaaattccaggagagaccagcttatatatgtacatagatcagaatgaaccgggatggaatacattaagattcgactcccgtacctatacatttcaggataccaaaaaggaaaaagaacagtgtggggtgatcccgcctgaatatgtctttgttgatgacaagtgttttatgggtaatggaaagatcaaagaggtaatacttccgcctaaatgcaggatcattggaaggcaggcatttgaaggatgccagttccgcaaatccgtacaatttcccaatacattaaaagagatcaaaaagcgtgcttttgcagagaaccataatctgcggcagacagtatttccttcatccttggaaattcttggagcacaggcatacagagaatgtaataatctgaagaaagttgttttttcacagtcttccagatgtacagctataccagagggtgcttttgattcctgtgtacggctgaatgaaattattttgcctaaaagtgtgcgtgtgattgataagatggctttttacagatgcaaggagcttaaaaagattcagcttccttcctctttgcgttttattggagagcaggcattttatttttgtgggcttgaagaattggttctgccgccaggactggttgagattggggatagcgcattttttagatgcaagaacttgcgtcatgtaaggatcccccaaagtgtgcgaacgctgggacgctgggtatttcatggcagcagcaggctggaatatctggatattttccatgatcctgagtatattggtccctggatcgtgaataaaagctgtaccatccgatgcagaaagggcagtaaaatagacgattattgtgatgaatacgaattaaaaagggagtatatctgtgaagaagaccgaaaggaaagctgaaacctttgaggcatcggataccttttccaggtgtcatccgatgctgaatttcttttattttgctgttgtgctcatatttaccatgttcagccagcatccgctgattcttgcagtttcctatgccggggctgtaagctatgggatactgctgaatggagcaggaaagactttgaggcaaagctgtttttttacattacctgcccttttgatcgttgcccttttgaatcctatgtttaatcattacggcgttaccatgctttattatatagagagcagcgggaattgggtgactcttgaagcattgatatatggagtggtacttggaacggtgatgtttgtggtgatacaatggttttcctgttacaatcaggtaatgaccagcgacaagtttgtttatttgtttggcaggatcattcctgctctgtccttggtgttatccatggctcttcgctttgtgccggagtttttgcaccagctaaaggtgatccgtaatggacagaaagggatgggcagagatgtatctgaaggcaatttattccggcgtatccggtatgggctgaatattttgtctattttgatcacctgggcattggagaatgccattgaaacctcagattccatgaaaagccgagggtatggccttccagaacggactgctttttccatatacaggtttacaaacagagataagatccttgggacagtcatggcctttttgtccatgatttttactgtgggcattgctaaaggggcagcttatgcctcatataacccacggatcctgctggctggatttacgatccagggcaggacgtctccggtatcggcgggcagcttgttaactgctgcaacctatttgtgttatggccttttttgttttttacctgtgatcctggagcttacagaacagatacatctgaaaaacagccgaaaacatgcaggtgcggatattggtatgacctaccggcggatctatgaagaactggaacaggaaggataagatttatgaatattgtggagatatgtgacttttgctttgcctatcctgacagttccaaaagggtactggatcatacaaagctgaagatcaaagagggcactttaaacattatctgcggcagaagcggatgtggaaaaagtacccttttacgtcacctgaaatcagcacttgctccttatgggaaaaaacaaggggagatcctctataaagggaaaagtctggctgaaacagatcacaggacacaaagccaggagatcgggtttgtgatgcaggatccggataatcagatcgttaccgataaagtatggcatgagctggcttttggtctggaaagtcttggctatgacagcgaaaccatccggcttcgtgtggcagagatggccagctattttggcatccaccagtggttctataaaaatgtatcagaattgtcagggggacagaagcagcttctgaatctggctgctgttatggcaatgcatccttctcttttgatcctggatgagccaacctcccagctggatccgattgcagcctctgactttctggaaacagtaaaaaaaatcaaccgggatatcggcactacggtgatattgacggagcacaggctgcaggagatccttccatatgcagatcaggtgtatgtaatggcggatgggcggatccagatgcagggaacaccaggagaggttggagctggtcttcatgatgctgataagggaatgtttctttccatgcctgtgcctgtacagatcttcagtgcagtggaaggaacaggagaatgccctcttaccgtaagccagggaagaaaatggctgggtgagtatgtaaaagatcatccccagatccctacaggtataaagaaaacgaaggcagcttcaggttcgacagagcctgccatccaggcaaaagatctgtggttccggtatgaaaaggatagccaggatgtggtcagggatctttccttgcagatcaataaaggggaattctatgcacttgtaggaggaaatggtacagggaaaagtaccactttatcgttgctgtcaagggtgaatcagccatacagaggaaggattcgcctttatggcagagatcttcgttcttataaggataaagaactgtactttggctgtctgggagtgcttccccagaatcctcaaagtatattcctgaagaagacggtactggaggatctgtattctgtgatcggaggaaagaaggagcgtatgtctctggaataccagtcccaaatgaaaaaagaaaaagcaattgaagggatggtaagcctgacaaagctggaaggtcttctggaacgtcatccctatgatttaagcggtggagaacagcaaagacttgcccttgccaaggtgcttcttctgcggccaaaggtacttctgatggacgagccaacaaagggaatggacggagaatataaggaagaactgggaaaaatattgaaaaagcttcaatctcatggaatgactatatttatgatttcacatgatatagaatttgtggcagagtatgcagatcgtgtaggattattttttgaaggaaatattgtaactgagaatgatgtaaatagcttttttgcagggaataatttctatacaacagcagctaaccggatggcaagacaatattttccatatgcaataactggaaaggatgtggttgcatgcttacagaacgggaattagaccatttcctggacagctttcttgcaatacctgaggaagaaccggcttcaagagagaatagcagtgaagccgaagagaacttggaggaatatcagctgccaacagacggactgatcatcagacagatagaaaaagatggtaaggtagggcgccgcacctggtttgcccttgtgctgatgctgttgatcgtgcctgctttgttatatctgtccgtggggatcttccatgggaagaaatatatgatcagcagcctgatcgttgtatttgcggctatgctgcccttttttatggtgtttgaaggcaggaagccaaaggcaagggaaatcatggtgatcgctgtactggctgcacttggagttgcaggcagggctgcttttttcatggtgccaagctttaagcctgtggctgcctttgtgatccttaccgggatttcttttggaggcgaggcaggttttctggtaggctgtctgatcatgctgatctccaatatgtttatgggacagggaccatggacaccatggcagatgttttcctttggaatcattggattttttgcaggaatcctgtataaaaaaggaatcctgaaggccagaaaggcagatctttgtatttatggttttctaagcgtagtgctgatttatggcgggatcatgaatccggccagcatccttatggcctatgggcatattacaaaggaaagcctgctggctttttatatttcggggcttccggtagatctggtacatgcagcatctacagtggtctttttgtgtatcatgagccggcccctgcttacaaagctggaaaggatcaaggcaaaatacgggcttatacagcggtgaaatgaggtaaaactaatatatgatatatatcagccatttatttccggatgaccagatggaggagttgatccgccagtccgggatgggagtagaaagcattgacttttcaattgcagataacctggatcatttttctgaatccatagatgtatacagggaaaaattaaaaaagatgggaaccaggaaactgattctccatggtcctttcctggatgtgaatccggcggcctatgacagactggtacgggaagtaactatgaagcggtttgaccagtgctatcaggcaggtttgcttcttggagccagaaagatcgtttttcattccggaatgaatccttatgtatattataaacaaggctgggcagatcaggtgtcacggtttttcagtgaatttatggacggcaggcaggaactggaaattgtgcttgagaatgtttttgatgatgactgggaattactgtcagatgtatacaagaaagtagatcaccctaattttaagctttgcctggacattggacatgcacactgctattcgtctgtggatgtgcgagagtgggcgaaagcccttgcaccttatgtgacccatgtgcatgtacatgacaaccttggggacagagatgcccatacaggccttggacggggaaatctgccttatcagcaggttctggaaaaccttccccttacagaagaacggacatggactattgaatgtatgaaaaaagaggatgcacagctatgctgggaaaagatcagagcactggaaggaggagccttataatggtgagagaatataaaataagaaaatggcttctgctaggcgggctgtgggcagtaatgcttacaggatgtgggaacagcagcaaatcaccacaggatgctattaagaaaacagctgcttacgaaatggaaacggttacttctcctgaatctaatactcttggaggagagtggacggtgctggcacttgccagatcaggtgccaaggtggaggataattattatgaaaaatacagagccaacctggaaaaaagagtaaaggaacaggaaggtgtattaagcgataaccgttatacggaatattccagggcgatccttgccctgacagccatcggggatgatccgaaagatgttgcaggctatgatctgactaaggctttggaggattatgacaccgtggtttcccaaggactgaacggcgctgtttttgcacttcttgccctgaatgcagaccgcttggatgtggatgggccacttgagaaacaatatctggattttatccttgaaaaagaaaaaccggaaggcggtttttctttgagtgatcaggcagatacagcagatgtggatatcacagcaatggcactgacctgcctggagccttatcagcaggataaggatgtaaaagaaaccatagaaaaagggatcaccttcctggctgatgcccaggataaggatggaggatacactgcatatagtacaaaaagctcagaatccatttcccagacagtgatcgccctttccacatatggggtggactgtaatgaagacagccggtttaaaaaagacgggaagggtctttacgacagactgatggaattttcaacgggtgatggaggctttgcccatattcccaagggagaggcagatcctttggcaactgaccaggctttctgtgcactggcagcctatcacagattacaggaaaagcaaaacagcttatataatatgaccgataacaaatagagggaggaaaggatattggctgataagatcaccctgctgcaggaacagcttgggaaaatcataaaaggtaaaaaacagatcacagataaaatgctgatggcagtactggcaaaaggacatatcctgctggaggatgtacccggtgtaggaaagactaccacagctctggctttaagcaggctgatgggtatggattttaacaggatccagtttacaccggatgtggtgccgtcagatgtaaccggatttacaatgtatgacaaagcctctggccagttcctttacagacctggggcagtgatgtgcaatatgcttcttgcagatgagatcaatcgtacctccagcaagacccagtctgcgcttctggaggttatggaagaaggaagggtaacagttgatcaggaagcccatcctgtaccgcagccttttgtggtgatcgctacagaaaatccggtaggctcccttggaacacagcttttgccggaatcccagctggaccgctttatggtcagtctgagtatgggatacccggatcatgccagcctggtggaactgctccgtgacagacaaaaagaaaacccgctggaacatacagcacctgtgctcacaagagaagaactgctttcccttcaggagcaggtacaaaaggtatatgtatccgatgcagtgctggactatgccgtttctcttgcagaggctaccagggcggatgagttgatcaccttaggcttaagccccagaggtactttggctttgatgcgtatggcaaaggctcatgcctttatggagaaacgggattatgtggtgccaaaggatgtacaggcagtattcgcagatgtggcaggtcacaggatggtgctggataccaaagccaggtatgaggacaaaggtccaagacagatcctggagcagatccttttacaggtgcctgtgccaagggtagacggatgatgaaaagcaggctgatctggcttctgtggctggcgggcatagcggctgcatcagtatttacaggggaatatctgtatatggctttgcttctgatttcctgtgtggcgtttgtaatgtccggaattcttctgatctgtacaggacgtaagctgcaggttcagatcaaactgccaagagcagcagaaagaggcagggaatttacaggggaactgcaggttcggaatctttcggccattcctgtttttgctggaaaaggaaagctgtggtgggaaaatacactgactggagaaaagggatggcttcccataagcttttccttacaaagtaaaggcaaacagatcattgaatttcagggggagagcagatggtgtggatgtgttgcctttacttttgggaaatggtactgccaggatcttttccatattttttcaggaaaaagacagacaaaagaaagcagggaagtggtagttatgcctgacagacagaaaaaaagcttttcttttcttttgggagagagctttgatatggaaagcttccgctattcaggggtgcgccccggggatgatcctggagaaacatatgatatccggtcatacaggccaggggacaatatccgtcagatccactggaagcttacaggcaagctggatgacgtgatgatccgggaaaaaagctatcctgtagatgacacagtattgcttctggcagaaagcttccagaaggatagaaaaccattaagagcagaagcagcagctgaagtatttgctgcaattctggaagattttatggaacgtaagatctcctgccaggctggggtttttgacaggtctgcaggaaggatacatatacagaagatctgtaccagggaagatctggaaagagttctttatcttttcctgcaaagcacaggaactaaagatgaaccggtagttgtacggaaatatctagaaaatccgggtacagtaagatttacagagtatatttatcttacaggagaaccggatgatatctctgcacagtttctgaaaaacagaggacaggttactgtccttaagtgcggaggcaaaggctcagacagcgaaggagttcagattacatggaagtttggcttacaatgccaggacaaaaacaaaaaacaaaatacagacagcaactgcccggtattttgctggaagctggactgatcctggggatttgcggggcagggatatccttgctacttgaaatgcttacaggggccgcagacagacttccttttttatgcagtgtgttttttacggcactgttctgtttatttaccgaaactatgaaaaaaggcaggcagatcacgggaacactgttttttctgctcacaggaaccggcatttttttctttcgcaggtttttactggcaggagctgtggtattctggaataaaggggcagacctgtttgggagcagtgccgggatctatcttgtacggtatcagacagtcacagatgtggatacagaactggcagcaacggtttttctggtctgccttgggatagcggccggagtagcaggatatctgttttttcactggaggatcagcctgatattggttttgtatggtttggcgcctgtggtgcttatggttcttaccggcagtttcccggatcctgatctttttgttattttttatttttcactggtgcttggcttgatccgtatgcacgccggtaaggaagcctttccacagaacctggcttttggggaggggatactttttttggcagctgtgatcctggcggcaggcctgatccttgtaagaatgcttccacaggaagaatatcaggatctgcaagtggtttctgatgcaaaagaaaaagcaggagaagccttgtatgatcttcgtttcaaaaagggcaagctaaatggtcttactagcggaaatctgaaaaatacaggaaattggacgggttctgatgaaacagctcttagaatctccatggaaaagcctcagcccatgtacctgcgtggctttgtgggctccaggtatgatggcagcagctggaaaagcatagatccttccagtgcttatcaggaacgaaatcttttttactggctgcatcagaaaggcttttatggggaaacacagcttgccagtggcgccaggcttacagataccagcatcagcagccagaagatcagcgtaaaaaatctggctgcggacagccgatatctttatacatcatatgaaatgcagcagcttccggaagggtgtcagggagaggatgggttggcagacagtacagttggcgcaaaaggattttggggccagcggaactattcttttaccactgttcagcctcttaccagccagtttacagacctgggggcgcagatataccagcttcttgcttcagggaaagatccgggatacaggcaggcggaaagctattataatgcttttgtttacgccaatgacctgcagctgccaaaagctcttgaaagtttatttaagcaggaactgggagaggcaggagacagaaatcagggacatacggattactatacagccattaccaggatccgagcttatctggaaaagcatatgacatacagcagtgctgcagatccttacagcaaaagtggtgattttgtccgtgaatttctggaagataagaagattggtcatagtgtacattttgcaacagcagctgccttaatgttccgatattatggcattccttccagatatgtggaaggatatctggtcactccttctgacattcaggataagacatcagaagatactattaatatcccgggtaaaaacggccatgcctggacagaaatctatattgatggacttggatggatacccgtggaaatgactcccgaatattatggggttatggaagaggctgacctgaaaacaggcctggaggcaaagggcagacaggcaaaggctgtgccagaagaaacacagaccatgcaggaagaggaaaatatacagactcattggagtttgaagcttgccttgtttggaatagaaaagtttttccttctttttctggctgtttttgatggcttctgcgtgctttttatttttattgtggttatgcttcggatacgtgcttcatacaggcgcaggaaacgatttttaagcagagatgacaagaaagcactttgtgcaatggccggatacgcagaggatctttataacaggggagagaatgggtattcaaaaagggcagaggagttgtatcagcaggtttatcaggctgggcagaaggcggcttttggccagcacaaaatacagcttcaggaaaaggatacctgcagggaatgtatccggatcctgaaaaaggaactaaagaatcagaaaagctggtttgacaactgggttatgaaatatattgaaaggttatattaaagaaagcaatgaaaaaaaggagcaagggaaaaaacaggaaaaataaaatatggacaagtgttcttccactggcatttctgatgttttttctggctgtattgtacggcggattttgtcaggaaaagcaggagatccagacagatcctattcaggggatcaatgcccaaagttccttaaaggggtatcttggtaagggatatgcatatggcggacaggacaaaggcaacagtcgaggggaacaggattttatccagcaggctcagattttgcctgaacctacggcaacaccccaagaggaaaaaataacaccttctcctgttcctactgtaacgtctgaagatccggaagaagaaatacaggataagacggatccaacccctgttcaggtgacagatgcacccacagtgccggatccggattcccagaccaataccattgtgtatgatccttcaggagaagaaaacagcacggagcatgaggaaaatgcttctgatcaggatgacgaccgtaatcaagatggagcacagataccggtaacgcctgctcctaccgaaacgcctgctccttcgccggtgcctgaggagccggtaaatcagtatcccacggttgccacagatctgacggatggagagacggttaatgcttcttaccgaactttctatgtgcaggcaaaggactggtatggcaacagcatttcggcttcggcacttgagatcacaggaaatggacagcggctttcttccagaggagagccttctgatggaatctttgcctaccggctggatctggcagaaggagccaataccatagagatccgtgccacagatgaggaaggcagatgtaccactcttcctgtgtttaccatttataaaggctcagaggagcagcagcctgcaggatctgtgaccatcagtattgaagctggtaccattggtcttggaactattcttccatctaccgccatagggttttatcagggagaacagctgtcttccgtacttttaagatttttgcagacccagggctttgactggaggaatgatggcgatgtttccggaggtttttatctgaaagccattgggagaggcgggattgctgccagcgctgctattccgcaggatctgatggatcatctgattgctgccaactgtcagctatctgagcatgatgcaaactggatcggggaatttgattttacaatggaatccggatggctgtactttgtaaacggagagtatatgaatgtgggaatgtctgcttattttccagcagatggagatgagatacggcttcgtttttccctgtattccggtgctgatgtaggagccggccaaacaggagaaacatggggggactggtaatgaaacgattattaacaggaatgcttcttgtagtttttcttcttgggtcttttcaaaccgaaacaggaggagaaacgataccaaccgaaaatccattgcctacagaaggacctgtgcttacagagatcccggcaccaacagaagtgccagcaccaacagaagtaccattgccaacggaagcaccactgccaacggacgcaccggtaccaacagaagtgccactgccaacggaagcgccggtaccaacagaagtgccattgccaacggaagcaccactgccaacggacgcacctttgccaacagaaactccggcacctacagacgtaccgctgccaacggaaataccattgccaacagaagaaccgctgccaacagaaacacctgtgcttcaggctttatacgtgtccagctcagacacttacggcaaagggatcttgaagctggatccgcagctgtctgtagagcacaataagtataaagcagtttatgagggggaacgaaaaagcctgaatctgtggcctgaggcagcaggagaatgtgagatccatgtatatgcattaagcggtgtgaaagcttctactgtggaaaaggatgaatctatcaaagatcaggatgatagaatggggcatagatactggaagcttgtgtttgcagataacgaaagaaaactggaggtgaggatccaggtaactgctcctgacggtacgaaaaaggattactacctgactctgtctacaatggatacaacccctcctgtattaaagaaaataagtgcaagccgaatttctacggatacggcttctgtggtatataagaccagtgaaaaaggttaccggtattatcaggtgacacaggctggtgcagccctgccaaagctggatacttcccaaaaaggaacccaggtaggtgaaggaacagataccatcgcccttaccggcttgactgcaggggaaaaggatctggtgatagcagtgaaggatctggcaggcaatattagtgaacagcttgtgatccggatcccggatataaaagctgccacatcaggcagcctggcatcaagaccaggatacggagggaataaatcccaggccacaaagcctggttctggcggggatggatctatcgacaagctgaaaaacgtacagggaactgcaggatctctgaaaaatccatccggggcagcaggcagtgccggggcaatgggatctgctcaggtagctgttgggaaaaagaaaagtcagattaaagataaagaaacagctaagaaaaaaaacaaggataagaagaaagaaactgcaaaggaacaaaccaaaaacagtaaaaaagacaaagcggaaaatataaaatcttcttttttccaggataccggtgataaaagccaggcacctgatacgaaagatctgcagaaaaacagcccatccggtaaaaaaagtattttttctgcttttaaggggctgcggctttccacaaagctgatgctggcaggcgcagtggcaggcctggcatatatcctgctttttaccgctgctaaaaggcattacaaaaggatgtacaaaagaacggatagaaggataagggcatgaccaaaaaggagcaaggagggtgtatggctagaaaaatgagaaaatggatggctgctttgctggcattaacacttataaccggaagtgtacaggtgtatggggaagaacagtttgttgatgtggcagaggatatacaagaggaatcccggcaggatacaatagagccggaggatgtattttcttctgaagaatttacttctggtgaaagcgaagcttttggggaagattctgcagatcttgcagatgaagcgacagagccggaagaggtttatgatgtaacagaagaggagtccttgtttgaagacgtacaggataccaatgtccagtcagaggaatacctgacaggtctgaaggtatatgccggcaattctgaaaatacgcctttggaaatgaaccgcagggaggatctggatgaggaacttcagggaaaggtttatacagtagaatacagctccaattatgattcaggttccttttatgtgactggagatctgtcagctgccgcaccggaagaggcgaaggcggtactttctgcatggacccttgaccatacccaggaaacaacagaaatggatgctgctgcttcttcaaaaggacttcgttacagtctgggcagcaggatctttacatccggtatacagggtggaaaaagggcagtttataccattacagcaggaactgaagaaaacagccagatatataaaatcctggtgctccgccgcctggatcttaagaatatcagatgctacagatcttctgacacagatcttacagaaaatctaatccgaagctttgatactacaggaaaaaccagagaatatgaggcgatcgttcctgccgttgatacaagtgtgaagcttctggcaaatgcatatggtgagaactggtaccagctgaaagtgaatggaatcacggtatccacatctgatccagtagatgttccccttggcactgaggaaacaaggatccagctttccatggaagtgcaggatacttatgaggatccggcttaccagggcagtacatatacatcacagggaaattattgtgtgacagtttccagaaaagcaggcacagatcttgcctttcagatcacaccttcccaggctgttgtcagtgtatatgatgcagcaggaaaccgacagataccagattcggataatctgcatttatttcataatatattaaatggagaagcttatacatggacagtctcctgttatggttatgtaggtgcccatggcacatttacaggaggggaaacagccctgatccaggcagaccttcaggaagctgctgcacgccatacagagatccaagacaatgactgggttaatttcagaaacagtgatacgaataatggtgttgtgaactgggaaactccggaaaactcttcaactgcactggaaaaatggtccaaaaaactgggaggcagctgggaagcttctgtaactccgccgctgatccttggaggccagctgtatgtagcttccggaaaatatatttacagactggacaggaacacaggggagatccaggcaaccagtgatccactatcaggaagcatggtctatgctatgattccactgacttatgcagaggggatgctgtttgcacagattggaggcggaaaaatccaggcaatcagtgccactacccttaagtccctgtggatcagtgaatctattggtggacagacgatttcacctgttacatataaagacggatatatttatacaggtacctgggataatgaaacaacagcaggaacttatttctgcctgtctgttacagatgaggaccccacaaggggagatgaggtgaaatactgtacctggaaatataatcataaaggtggtttttactgggcaggagcctatgcatccaaggattatcttgtgtttgggtcagatgacgggtccgaaaacgactacaccaatacagcaattctgtattctgttaatacccatacagggcttttgatagatcagaaaacagggctgaaaggagatatccggtctaccattgtttaccagaatgggtatgtgtattttaccaccaagggtggttatctttacaggatcgctatgaatcaggacggtaccttcggacagacggacagcattagtcttggggggatggcaactgcttctcctgtaatttacaagggcaggatttatgtgggcgtatgcggtacaggcggccagtttaatccggatggaggacaccattttgcggtccttacagaaacatcttccggtctgtcccttgcttataatgtttccattccaggataccctcaggctgcccccttgttgtctaccgcttacgagaaccgggattataacggagacgggcttccggacggccgggtgtatctgtattttacttataatgcaaagcctggcggtatttatatgctgacagatgcaccaggacagacctccggcacagctgcagagattttcagacctgagaaagatcaggcagaatactgtatcagtaccatctgtgcagatcgtgatggaactctttattttaagaatgattccaattatttgatggcagtggaatgtaacggagcatatattgacaatgtaaccgcacaatcggatgcaggtacgatcaagtggaaggatatgttccggaaaagtaaaacagagcatactttgttgatcggggaggaaacaaaaactgtaactttacagttccaggctttggatggctgtaccttgtccgtgaatggacaaaatattaccggtgcttatacggttgatgtatcttcaggacaggcagaggtgcaggtgctggcgcagtgtcttggaaaaagcagaaaatacgtatttcatattacaagggatcagtctgttccggcgcttggaaatctgacagtaagcaccagcaatacttacagtaatgttcaggcacggctggcaatctctccggcatttgacagaaatacagcggaataccgggtgctttataccggagatcgtgattttatcaatatttttgcagaaacagaagaatcagatgcagaagtgacagcagcagggatccagggaaccttgaaggtaagtatttttggcaaaaccacaggaagcggtaatgccagcaggatcgccatttatctggataaaagtcctgagatccaggaggcaaaggtacggatcacagtacgtacccgtaccggaaaaacaggtgattatatattgacgatccaaagaaaagagatcattgttacgccaacacctacgccggtaccggatgaaccagaggtttttggcacctggtcaactctttcacctgctacggtgtttgaaccggaggtacagcagcggacaggcagcaagggtactgtacagacccgtacagtgggtgagaagctgtctcctacagggaagctgaatgtaaagcgcattccccttaagatccggcagactacatctaaggtgtcagtgtcaggcctggctaacggggacttggtgaaaacctgggccagttctaacaggaaaatcgtgtctgtatcgaaaaaaggtgtgatcaagggtttacgtaagggaaaatccactgtaacagctgttctggcaagcggaaagaaattaagtcttactgtaactgtgcaagctaagactgtgaaaaccaaaagtattaccgggctgaaaggaaagctggctttgaaaagaaaagaaaagctggcgttaaagcctgtgctttcacccattacttcccaggaaaaggttagttatatgtcatccaattcaaagatagtggccgtgaataagagaggggtgattaccgggaagaaaaaggggagcgcaaagattacggttaagtctggaagtaagaggaaggtgatacgggtgatggttcggtaggggattgtaaaaatcatttggagaatgtttaaagctaaatgggctgcatttggcggaaaagatatgtttatatatcagggcttcgttttcggatttctcccgggcatttattatctctgtcatttgccaaactcacgcctgcggcgttcagacacggcaaataacagagaaattagcccagtcgaaatctgcgaaagcctcgcatgatatataaccaagatcttttccgcaatgcagctctttaggttctacattctaccaatgaattttacaataaatacaatattgcttttgtgataagattttgataaaattaagataacgtcaagatgatgtaaatgaagggagtgcttggatatgatacaaattcgtcctgtctcggatcttagaaacaagtttccggagattgaaactatcgtaaatagtggagaacctgtttatctgactaaaaacggttatggtgctatggtagttttaagcttgcaggaatacgcaaatttgaccgataatatcgaaatgaagcttgatgaagctgatcgccaggcttcaatgacagaagaacgattatctcacgaaagtgtttttaaaaatgcaaggggtatgattcatgggaaataagtcctataagcttcgatatttgccaatatttgaacaagacttaaacaatacagtgaattatattgctaatgtgttaaaaaatgaggatgcggctcttcgtttaattaatgatgtcgaagctgcaattttgaaaagactgaataatccagtttcttttgaaccatatcattcagtaaaacaaagagactatccttattatcgaatttatgtaaaaaattatgttgtctattatgtggtgattgacgatgtaatggaggttcgacgtttaatgtatggagcaagggatatagataatcatttatagtatggcagatagaaaagattttgaagataaaaatgaaaaaggtaaaatttgataatatgttctggagatataattcgataaatggttcacatattataattcgataatgtgttctggaggttgacagttattgggcaaaatgttatactttctaaacaatgaataaccaggcgtggttcagccttttggctgatttgacgaaatccggtgagaatccggaaccaatgctgtgtaaggtatggcgggtaccttaagtcagcctccaacacgttgtataggacagagactcatgtggacaatggggctctgttttttgttgccatttatgcttatgagagagggacaatgggagtatttctggctgttcaaacaataaaccttgaaaaagaaaaggagaaggaaacgtgagaaaaaaagaactgtttaaaaggttgacagctatatccatggctgcaatgatgacactcacaatgatgccatcgtatgcatttgcatctgacagcgctttttcagatggtcaaaagacctgggaagaagtatctgcagaagatgcattttctgacggagatgtaattgcagatgaacccgaggaaatcctggaagattcagatgatttccatctggctgagccggatgctgcttatgatgaggcagaggatgccaaaactgcagcggcagcgtatctgaaaactaattatattgatggtacaaataaaatcactagcacaggtggtgcaaatgtagtaaaaagtgatgatggattaagctatactgttggactgacaactccctctggatcgagtatttcatctctgcgattaaaaactgaaggaagttccagctcatataaaagtggctggtatattaacagtaaatatgttaattggggaagtaaaaagccttcagcgccagggagtctaggtattactcgtccaaccgcagaagaaggaaaccagagttttacagcgactcttcgtttatttgcagcagataccagtacagatgtgattaatgatgcgacacaggcagaagcagcggctttggcttcacaggattttacgatcacattagtggcagctgaaaaagtatatgattatcgtctgactttaaaggtacaggattcagatcagaaagagattaccgatgccgttgtaaaactggaagagatgtcttatccttttgacactgtttcacaggagtctgatggaacttacaagatgataaaggatatgcagtataagctgactgtaacatgtaatggatacaatgcttatacagaacagtttactttttcaggtaatccggagaagcttgagaaaaccgttaccttatcaaaaacggttatgcatgccattacatttaaggtaacagataaagataccggagatgtaattccagacgtagaagtaacggttaagaaatcaggcgactggcagcctataaatggaaagaacggaagttacagccttgttgaaggttataagtatacttggagtgtaagtggtgtagaaaattttaagaatgcctctggcgaatttactgtaacaaaggatgaagagatccttatccagctgaccaaggagatttctacatataaagttacctttaagccaacctacctgggacaggcagttgacaatgccacagttaaggtgacacatgaggaagaagatgattacgatgagtatgaaacttatactgtagaagacaagcctgctaatggcgtctatagtctgagtaagggtgttgagtatacttatactgttaaggcagatggttataaagatgcaacaggcaagtatacaccttccggaagccagatggagatcgcatatccggttgcaatgcaaaaggatgtggttattgatcctgcagatcaggctaaggttaacgcagcagttgcccagtttaataaagaacttggtgctttaagacctggctatgataaatacaaaaatattaatgcttttgtagaagccaagcttgcttcttacactattgatacagctggcatcaaggttgctgtaaaatcatccgataatacagatgttattggatcagatggcgtgatccattatgttacatcgcagaaactgacatctaataatgtcaatagtgtgagtctggatgttatttttacatttgaactgaatggagcacagacagatactggttctacaagggtaactgttggatgggacagagatcacttcagccgtaagatggcagaggaaaaagacagccttacctgggatatgatcaagggaagtaatgtttcccagacagaggttgagtctgaactttctcttccgcagatgatgacagacagtgcaatgtatgcatggtcacagatcacatggacatcttcagatcctactataattggtgttgaagatggaagcagcacaggattaaccacaccgaagagaggtgcgatccatgctcctgcaaaggatacggaggttacacttacagctacttttaatgcaaatgatacgattcttaattcttattgtggagaaacagtaaatgcttttataagctgcaccaaggattttaccgttaccgtaaaagggacaaacattgcacctcctacagaggaagagcttctggcaatccttaataagtattatacaacagatcagtttacagattttataaataaaaacgaagttgttgatcttaacaattgccaggctgattttagtttgccaaggtacaccagaatcaaggatgaaaacgatcatttagtatttaacaatggtgagatcactgtaacttccgaaaatgaagcagttacagttaatggatatcgcacatatgtagacggtttttataccaaggatattacaggagatcttgtagttacatttaccagggaaaatgtaaccgcagtaaagagattcccgatgactgtgaagcctcttgatgcaagcgttcttgctgatgagcttgcaatgatggagcaggcaaagctgcattactttgacggtattaatgacggccggtatgcggataaggattctattactggaaatctgcatccgttccaggaaatggttctggatgaaaatggaaatccaaaatggatctacagttttactgacagaacaggaaaaggcattattgcagatgatttctttgatgatccatggatcatggagggcgctggatataatcgtttcagatctaccaaccagaggtatatcaatcatgatacattgaatgtttatcctggtgagacagatacagagatcaccatttcgtctctgctcagcagtcagaggtatggtgtatttgcaaagaaacatccggataatgaggcactgcagaagctttacagacagcctgtttcagttaccgttactgttgtaggtaccaaatcagcagcagaaggtctggctgatctgatccagagtacacaggaaatactggatgctatggcagaagggcaggagcctggacagtatccggctggaacaaaggcaaagcttcagcaggctctggatgttgcaaaagcagctcaggtaaaggaaaatgtaacagaggaagagctccgtcaggcaatccgtgagctgaaagccgctgcagcagaggcgcaggatgctcagaatgtggtgacagcagcaatcacagtaaggcttaatcagacacccaaccagccgggacagcttctttccatgacagtagctgcagatacagccagattctatggctatgaaaagccggaggaaatgaagaataaagtggctgttgtggatgttctttatgcaatccataaagaattatatggggtagattttgagaacgatccgggaagatatctggctgtagacaatacaggtaagatcaataccatcttcaaggctcagaatccaaatgtttcttacctgattaatgataagtatcctatggatgcaagtggaaatatgactgctgcacataacagtgtggtaaataacggtgatcagttcagcatctttgtatatgcggatacaaccggatggaccgataaataccttttcttccaggatgttccatcctctgtagaggctggaaaagaatttgctgtaacgctgaagacctacggatatgattccaactggaatactgtggaactgttagtggcaggaagtacacttactctggaaaacaaagcaaccggtgaaaagacacaggctgtaacagatgaaaacggatctgcagtaattaaagcagtgaaggccggttcctacagattatacgtatccaatgcaccatatacctattatgcagtggctatgaaagacattgaggtaaaagcagcagaagtacctgcaacacccacagaggcacctaagccaacggtaacacctgcaccgaatccaacagaggcacctcagcctacaaaggcacctgcgaaacgtggacaggtacttgttaccagagcaaaagcagccaaaacatctgtggcacttagctggacaaaggtaaatggcgctgagaattacaagatttatggtgcgaagaataacggcaaggtaaaacttctgaaaacggtatctggaacaaccagatcctggacacagaagaagctgaaaaaaggaacaacttataagtattatgtggcagcttttgacagctatggaagaatcaccaagtcagcagtgatctatacaaatacaaccggcggaaagaaagcagacattaagaaagtgactgtaaacaagaaggcctttacattaaagaaaggcaaaacagccactatcaaggcaaaagccattgcttccaagggtaaattcaaaaagtataccagcaatattcgctatgtttctaccaacacttctgttgcaacagtaagcaaaaagggtgtgatcaaagcgaaagcaaaaggtaaatgctacgtttactgttatgcacagaacggactttataagaaagtaaaagttacagtaaaataagcaattctgataaaagtatcagaaccatgccagaagctgtagcgttataaaaacaaaaacgtcacttcccgggaaggaagtggcgtttttgcttaaaagaaggtttatcagttacaggaaatcatcttgcagcatttggggaataatctatttaaaaaagatttccgatgccggtagacaccaggaaaaggaccagcattaccacaggtactacaaaacggatcataaagctgtacaggcgggcacgaccaaaatgttccccgtttcgttccacctcgctgataatatatttaggaccgatcacccagcccaccagaatactggtaaggaaggagataaacggcatcaggaagctgttgctgatataatccattacatccagcagctgtgcagtggcaccatttggaagtggcagttcaaagtacagtgcattatatccaagacagatcagcacagctgtgataagagaatagatcccgatcatgctgcacatctgtttacgggttttatggaagatttccatgcagttagcaaccagggtttccataacggatacgcaggaagttagtgcagcaaagcccatcattaagaagaaagcaatggctgttatttttcctacaggccccatggcttcaaaaaccttaggcaaagaaataaagatcaggcttgggccggaagccattccatcggtgcccaggaagacaaatactgcagggatgatcatcataccagccaggaaagccacacctgtgtcaaatatttcaatctggttaatggatttatttagatttacatcatcttttacataggagccgtaagtgaccatgatacccatggaaacacttaaagaaaagaataactggctcatagcatccagaaggatttcaagaaagcgctttacagtcaggccggaaaaatcaggacacaggtatacccataatccctgaaggcctgtacgtactgtgccgtctgtatcttttttggaaagagtcagggaaaaaatggcaatggcaaggatcaaaatgatcagtccaggcatgatgaaacgggagaatttttcaattcccttttctacgccgcgatatacgatccaggctgtcagtgccagaaatataagcataaaaacaataggtgaaatcttggatgtaataaatgatgtaaaatagctgtccttggaaagagcagatccatcggaaataatatattcgcagaaatacttggtgatccatccgccgatcacagagtaataagtcatgatcagggcaggtacaaggaatgtaagatatccaaggaacttccacttaggatgtaaggttccgaatgctttcagggcattttgcttggtctttcttccaatggcaatgtctgtggtaagcagcacaaagccaaaggtaagcaccaggataagatagatgatcaggaaaagtccgcctccatctttagcacaaagatagggaaaacgccagatatttcctacgcctaccgcacttcccgcagctgccaggacaaagccgatagaattactgaagttactctttttctctttcattaatattacctcaattcatattcttttattaaatgactgatgctgacagacatttataatatttaacttttattttaatatacaaggaataaaatgtaaacaaagaggatttcatgtaaggagatttatttgtaaaaaaaatttgaaatattatattttggtcagatatatgatataatggtggtgtccggaaagcagaaagtgttttctggatatttttataaaaaaatgatagtgaagctgcaggatcctttcataagatcctggtatatgttggagaatagactatggaacaggagcgattgatttttcatgtggatgtaaatagtgcttttctttcctgggaagcagtacgccgggtaaaagaagggcttccggatctgagggagatcccttctgcgattggcggagatcccaggacccggacagggattgtggtagccaaatcaattcctgccaaaaaatatggggtacgtacaggggagcctgtagggatggctctcaaaaaatgtcctgagctggtagttgtgccgggagattttggcctgtttttaaggtgctccagggcctttaaggaaatctgtgcatcttatgcaccggtaatggaatccttttccattgatgaggttttcctggatatgacaggtacatccctgctttatccggatcctgtagccctagcctgtgagatcaaggacaagatccacagagaactggggtttactgtaaatatagggatttccgtaaacaagcttctggctaagatggcttctgattttgaaaaaccggataaagtccacaccttatttccggaggaaatccccacaaagatgtggccgcttcctgtgggggagcttcttttccttggaaaagcatcccggcggaaactggaggaggctgggatccacaccatcggtgatctggcacatgaagatgaatcccatatacagatgcttttgggaacaaagaacggacatcagctgtatcagtattcctgtgggagggatgactctcctgttcgggcagaagcagaagaaagcaaagggcttagcgtggagaccacatttaatgaggatcttgtttcgaaggagcaggtctttcaggtgcttttggcccagtgtgacatacttgcagccagacttcggaaaaaagaaaagaaatgcagctgtattgcggtttctttccgtacattggattttaaaaaccgttctcatcagatgaccattgaaagtgcaacagatattacggatgagattttcaaatatgcacagaagctttttctggatttctggaaggggcagcctttacgtttggtgggggtttccctgacaggacttaacgatgggatgtatgagcagatgagcatgtttgaagataccagggacaaagagaaaagacggaagctggatgctgccctggactccatacgtttgaaatatggcaatgacaaagtgaccagagccagtattatgaacagcagcggcaggatcggaagaaaagcaaaagcagagaacggattagataagcatcgcacatgaaagttggggccggattggccccaacagtttggaaatttttgatattcttgaatttgtgttctatgccagatacacgctgccgttgcctgttctttagtaagactggccgccctggcttccggacatctgtctttcctgggactcgatcatttttttgaccatatacccacccactgaaccgttctgtttggaagtcaggtttccgttatatccatctgtaagggggacacccagttcattggcaacttcaaatttgaaacggtctaaagcacttttggcttctggtacaaatgctttgttagaagaagtagaatttgtcatttgattttcctccttggttgttttgtttgatgttacattgctagtatgtgctgacccaaggaaaatacactggaaattcctgctttttttcaggttaaaaaatcccagatgacagatataggataaaaaatcagtcagcagcttttgtaagatcggctttgactgctgtatattttttttcagggattggaagagtggtgccgtctgtcatagtgacctgaaatcttataatctcacgtacatgctccggattgatcaaataacatttgtgaatctgatagaacagctcactgaactggtttttaatggaaagcagattgtcaatagattcaaaatcaccgtccagggtatggatcagggtatgggagccaaggctttccacataaaggatcctgggccattgcagatataaaagggatttgtttacgcttttaatgatcagtctttcagaacgggcttcaccggccatggtataatgtttatagtgctcataattttcatcataatggacagggtagatattgtcacgctcatcataggtgatggcattggaaatgtggcaaagtttgatctgtggccgcccgttttcttctacaaaggtaagctgtattctttggtttacccggcttacgcttttatccggccagatggtatccaccaggaaaaacagaagtatctcacaggtcttggcacttccggcggaaataggtgtaactgtaagattgttaataatgaatttaaggttgtgatgttcatttctgaaggcttcaatcagcgctgctttagtgcggatgatctgtttttcggcaggaccgatccacaatacatctttgtggcaggattccagaaagagccggatatcgttattataataattggttagtatagttgctgcaaattttgcggtttcctgtatattcatacccatcctcctgtattttataatctgccatacataagataccagggcaggattgtgggagcgcatagcacgaagcaatccgtaggtatcataattggtagctttgaatccatatctggatttgggtgtttaacacacttatgatagtaccataaatatgaatatacaggcaagaaatatccgtgcaaaaattggaaaaaatcacctaaaatctgtacaagtatgcaaaaaaaatgtgaagaatcaaaacagaaacagttgttcgagaaaagttgtaacttttagattcttgtgctataatgaacaaaactattgagaaaaggaaagtatagcatgtcaccattattagcaattctgttaggaattatacaggggatcaccgaatttctcccggtaagcagctttggccatctggctacagtagagaagcttttcggcgcagagagacaggcaggtgttctttttgaagtgatgctgcacacaggtacgcttgcagccatatttattgttttctggtcagatcttaaaaggataggagaagagttccttggcatggccatggatcttgcaggtaatcttaacctgtatatacataacagaaggacaggagagcatctgcattatgcaaagatcgtatatggcacataccgtaagtttgcagcactgatccttgtatcatctgttcctacagcggttcttggttatacctgccgcagactggctgcaaaggcggctgtttcaccactgcttccggggatctgttttttgatcacagggattttcctgctggtaacagatctgggtcaggcaggcatgaacaagacccccaaggaagccgggtacgacagtgccatgtggatggggatctgccagggactgagtgtatttccagggatttccagagaaggtatgaccatctgtgcaggacttctttgcgggctgagccgtaagttcgctgtgaaatattcctttattatgagcgttccggcagtggcaggtgctctggtcctggaacttggtcagtttgcatcacctggaatgacagtaggacttggctttacctatattcttgggatgctggctgcagctgtgactggattttttaccatccggtttctgcttgttatccttcagaagacaaagctgcgttattttgcattttactgcttcctggcagggattattgcactggtaattaattacaggtagagaattcagcaagaatgcagcatgtattttgaataattaatttagtaaagtaaaggggagtttgttcactgatggcaggttctaagacatccaaaagacgtacatccgggcgtaaagccagttcaaaaaagaaaaagaagcaggcagcagtcaatggatttcagaatgatattatccttctggtgatcctggctgcgtccattatccttcttgtaagcgattttggtcttggaggcattgtaggcaatgggatcagcagcttcttttttggcattatgggagttctggcttatgcatttcctgtagtatttttcattggagcagccttcctgctttccaacaaaaccagcccgcttgcccggaaaaaggtagctgcagcagctgtcttttttcttgcattatgcggacttgtgcagctgatcacagagggatatatcagcgggaccacactggaggattattacagggagtgttctgcataccataccggaggaggccttatcggtggtgcgatctgcatttccaccacttctgcatttggtacggtaggaggctgtgtgatcatcgttatggtgctgatggtatgcctggtgctgatcacccagaagtcctttttcggatttgttttccgtgagtttgaccgtttgatgcttttgatcaaaggcggcaaggacagctatttggacggccgtcctgaccgtgaaaaggccagggagcttcgtgcaagggcaaaagcacaggctaagcaggaaaagcgtgcactgaaagtccgcaggctggaagaggcgatagagtcagaggaacaggaagaaagaagaaatggtgctgcttccaggcatcatgaaaaacgaaatgacagacctggccccaatacttttgttgtagaggcaccggagcgtgaccagggacagctggagttttccatacaccgggctgagcctgttcagatacaggaagacagcagtgataatataagacctgaggctttggcggaggaagcccaggctttgccggaagagaaggccgcaaggcagccctctaagaaccctaaatcctccaagaaagagattgagaatgggattcgcaatatccagcatgagatcaacagcaaagaaggggaagttaagaaggaatatcagtttcctccaatgactctgttaaagaagggcagtggcaaatcccagggggattcggatgcccatctgcgaaaaacagcccagaagctgcaggaaacccttcgcaattttggagtgaatgtaacgatcacaaatgtaagctgcggtcctactgttaccagatacgagttatcaccggatcagggtgtgaaggtgagcaagatcgtaggacttgcagatgatatcaagctgaatcttgccgcttccgatgtaaggatcgaggcaccgatcccaggcaaggcagcagtaggaatcgaagtgcctaacaaagagaacagtccggttatgctaagggatcttcttcagtcaccggagtttcagaatgcaagatcaaagctttcctttgctgcaggtaaggatattgcaggcaagccggtagtaacagatattgccaagatgccccatctgctgatcgcaggagctacaggatcaggtaagtctgtttgtatcaatacactgatcatgagtatcctttacaaggcaaagcctgaagaagtaaagatgattatgatcgatccaaaggtggtggagttaagtgtatataacgggatcccgcatttgtttattcctgtggtaacagatcctaagaaggcagcaggcgccctgaactgggcggtatcagaaatgactaccagatacaacacctttgcagagtatggagtacgtaatctggaagaatataaccgtaaagtggattctatgcctgcgtctcaggacgaggcagcacctgagaaaatgcctcagatcattattattgtagacgagcttgcagatcttatgatggtggcacctggagaagtggaggatgccatttgcaggctggcacagttggcccgtgcagcagggatccatctgatcatagctacacagcgtccatctgtaaatgttattacaggcctgatcaaggcaaatatgccttcaaggatcgctttttccgtttcctcgggtgtggattccaggacgatccttgacatgaacggagctgagaagctgcttggaaaaggagatatgcttttttatccacagggctatcagaagcctgccagactgcagggagcttttgtttcagatgaagaggtgagtgcagtggtgaatttcctatctgacaagaatcctgcagttacctacagttcccagatccagcagcaggttgatacaccggtgatgcctggtgcagcggctgaccgggatgacagagatatatactttgaagaagctggtaaattgatcatcgaaaaagaaagagcgtccattggtatgctccagcggatgttcaagatcgggtttaaccgggctgcaaggatcatggatcagcttacagatgccgggatagtaggtcctgaagagggtaccaagcctagaaaggtacttatgagtaaagaagaatttcagtcttatatagacggaagctcacaacaataaaaggaggattttacaaatggtaaagcatattgtaatgtggaatttcaaagaagatgttccggaaggtgagaaaaaggctatcaaagagaaagccaaaaaagaactggaagcactggtaggtgttgtacctggcctgatcagcgcatttgtgatcacagagccgctcgcttccagcagtcatgatttctgtcttgttacagaattggagacaccggaagcattggctgcttatgcagtgaatccaaatcatcagaatgtagcaaatacatacgtccgtccatatacctgtaatcgtgcagctatggattatatgatggactaatagaagtaatataaaaatggaaattcgtattttatcagtagggaaaataaaagaaaaatatttgaatgatgggatcggggagtatgcgaaaaggcttggcagatactgcaagcttaaatttatccaggtaccggacgaaaagaccccggataaggcctcagaggctttaaatacccagatcagggaaatagaaggggagcggctccagaagcacatccgggagcaggattatgtgatcgcattggctattaacgggaaaatgcttgattctgtccagctgtcagagaagatcgcagccttaggcgtacagggaatcagctccatcacatttgtgatcggcggatccttaggcctttcggatcagatccttaggagggcagattacagtcttagcttttcgccaatgacctttccacatcagttaatgcaaatgatcctgttggagcagatctaccgctccttcaggatcatcaatcatgagccatatcataaataaatgggaatcgttatcagatcccgctgatgcggatcgcctcaacagcttcacggatcttctcaggcgggagtactaatgcaaaacgtacataaccttctccgtgaggtccgaagctggatcctggtgttacgatcacccctgctttttccataagctccatacaaaatgccatactgtccatacggccgccggggatccttgcccacacaaacatggtacctttgccattaggcatttcccagccaatttcgtgaagaccattacaaagggcgtcacgccgttcctgatacatgcgacattgctccgttacattgtccagagggccggtaagcgctgcgatagcagccttttgcaatggcaggaacataccgaaatcgatctggctgcgaagttttcgaagggcagcaatcacttgtggattgccaatcaggaaactaagtcttgcgcctgttacattaaaggatttggaaagactgaaaaattcaacacctacttcttttgcacctggtgtagctaggaagcttccgccgtatacaccatcaaaaataatatcactataggcattgtcatgtatgatcaaaatattgtatttctttgcaaaggctacgatctcttcatataagccgggggttgcgatactgcctaccgggtttgaaggaagagaaaccaccatatattttgctttctgtgcaatattttcagggattccatttacataaggcaggaaatcatgctctgctaccagcggatagtagtaaggagttgcaccgccaagcttgctgccagctgcaaaaaccggataacagggatctggcaggagtacaatgtctccttcgtcacaaagagccatacccaggtgtcccataccttcctggctgccatatacagacattaccatatccggggtaatacttacctgaaaacgcttctgataataagcacagacagcatcaagaagttccggcagatcccgcaggctgtaccgccagctggagtcctcctttgctgcttctatcagtgcttctttgatataatccggtgtatggaaatcaggcgttccaacactcatattataaattttcttaccctgctgttcaagctggatccttttgttgttcagggcagcaaaaatctcatccccgaatagttccaatcgtttggaaaactgcatcttaagttccttctttcctaaaatattgggtcgggctttattttatcatcctgttttttatctgacaagagaaaatgattcggattctggctcttatttgcatctgccgttctcatttaccaaggaaaaaatagggattgtttcaaaacataaatgtatgtataattaagaaaatattttagggtggcgaaaggagaacaaaaagagcagtgaaagattatatggcacctatggagggaatcaccaaccatgtttaccgcagtgcttaccatcggtattaccatcctatggataaatattttaccccttttctgtcagccaagccggataagaaattaagctttaaggaaatctgtgaggtttctcctgaaacaaatgaagggcttcatgtagttcctcagattctggcaaataatgcagatgatttcataaatacagccaggatcctgcgggataaatacggacataaagagatcaatctgaacctgggatgcccttccggtactgtaacagcaaaaggaaagggggcaggcttcctggcctttcccctgaagctggatcgttttctggaaaagatctatgaaggtctgccggacatggatatttccataaaaacaagggttggctttgatgaggaagaagagtgggatgcacttttttccatatatgagaagtatccggtaaaggaactgatcatccatccaaggatccgtcaggatttttataagaatcagccaagacttcaggcttaccaaaaagcatatgagaaaaggacgcttcccctttgttataatggagatctttttaccagggaagattatgtacagatatctgggcaatttccggatacagaatgttatatgtatggacgggggctgatcacagatccggggcttgtaagtcagatcagggagggaagccatccggataaggaccggctttctgcctttcatgaggaggtttatatccgttatcaaaagcttctttccggagagaaaaatgtgcttttccgaatgaaagagctatggtcttatatgggactatcttttacaaattatgaaaaatatctgaagaagatccgtaaagcccagcattttaaggaatatcaggctgctgtttccagcctttttgcagaacaggagctgatatttggcagtaaggatgacacatccggtgaaaatgcagcaggagagaatacttcaggaaagaatataccaggagagaatacatggaactagatacagccagattggagaattttattgcagattatcctatatatgagtatcgtatcctggacgccggggccattgccattgaagaacgggttcgggtgatctgcagacaggaatgtgaaagatatggaactacctgggcgtgtccgcctggcgtaggaagcctgaaagaatgtggagataagatccacagcttttccaaggggattttcttttccagtgtggcagaggtatcggatcttatgaatatggaggagatgctttcaacccgccatgcccatgaggatcttaccggacaggttggagaatttctgaaaaaggaaggctttcagatctatattctatctacagaatcctgtgatatctgtcctaaatgcgcctacaaagaaggcaaaccctgccggtatccggatcggatgcatccctgccttgagagccacggagtggtagttagtgatattgtggaagaacagggcatggaatacaatcttggcgggaatactatcttatggttttcactgatcctgatccgctgatggctttacctgtatattttgaaaaacagatgcatacaatgttgaaaaagccgggaatgaaatgccatggaaaaaaggctgaactggaaggataatctggtaaaagctgccgggatcccggaggatctggcttatggccagcctgtggttacagtgacagggcataggcgggctgtgatccagaactatcgtggtattcttttatataccagtgaaaagctggtgttacgaacatcccatggtacagtaacggtctgtggcaaagatcttcagatcttatcctattgtggagatgaaatggagatcacaggatggatcggtgatatccacctgggataactggctggcaatgagaaaggtgcagctgtaaagggagtatacagctgcgaaagggttcagatatgatgaatctgtggaagggctttgtatggatccgtatctgtggcggtgagcaggaacgcttcctcaatctttgcagggcaaaaggtatcatcttggaaaagcttttctttacccagggtgagctttgggcaactgtttctaccaaggattttttcagactttcccatgtacggagaaaagcaaaagtacatattcatatattaaaaaaacagggaatgcccttcttttttctcagactgaaaaaaagaaaggcgttttttcttggaatccttttatgtatcagtatactgattttcttctctggccatatatggaatatccatatagaagggaatgttaagaacagttccgggcagatcctggattttcttgcaaaacagaatgtttatcacggaatgagtatccgtcaggtagactgcagttttcttgcggggcagatccgaaaagaatttacaaatatgatatgggttgctgtccgcagggaaggtacgcagctgctgatttctgtaaaagagggcatttccaaggaagaaccggagaaggaacagataccatacagccttgcctcaggcctggacggtgaaatcgtaagaatgatcacaagagcagggactcccttggtgaagactggggatatatgtgaaaaaggacagctcctggtgcaaggacaggtggagcttgtaaatgaccgccaggaaattacaggatatgactacgtctgtgcggatgcggatatttttgtccgacatgagatctcctattatgatcagttttccatgaaaaataagcaggcagtttacacaggagaaaggaaaaaaggatttttcataaaagcaggtccttttttctggatgtggggcaccagtcagaagcaggacagcagcagatttacagaagaacaaaagatctgtcttaccgagaattttgtgttgcccatctcttacggctttgcaacagatgagaaatatcggatccagacagggatccttacagacaaggaagccaggaaaaaggcagttcttcatatacagcagtttgaaaaaaaacttcttaaaaaggatattgaagtgatggaaaacaaggtgaaaattaaaacagaccaggaaaattgtacagccagcggtaaccttgtagtgatagaaaaaacaggaatccgggttcctgtagaaaaaaggggttccaatatcctgaaatagtgttaaaatgtaagcagtgcctgcttgctgggcgcaatggaatatacgagaaaggacagcacagatggcaagcaatattattgaattacacacccagataccggcagacctggagggcaatgtatttggacagtttgacgggcatctgaagcagatagagaggacactgaatgtaactctgatctcaagggacggttttctgaagatcattggagcagaaggctgtgccgcacaggccaagcagctgattgaagagcttgtgacccttgccaaaagaggcaatgtgatcacagaccagaatgtaaattatgcgctttccctggctcttgagaaaagaaatgaagtgattacggagattgataaggactttatctgtaataccatacaagggcgtcccatcaagcctaaaaccctgggacagaaggaatatgtggatcagatccgcaagaaaatgatcgtattcggtgtgggtccggcaggtacaggtaagacctatcttgctatggccatggcagttactgccttccgcaatgaagaggtaagcaggatcattcttacccgtcctgccatcgaagcaggagaaaagctgggatttttgcctggcgacctgcaaagtaaggtagatccttacttaagaccactttacgatgcattgtatcagatcatgggggctgacagctttgcaaagaatatggagagaggcctgatcgaggtggcaccccttgcgtatatgaggggacgtaccctggataatgcttttattatcctggatgaagcacagaataccacgcctgcccagatgaaaatgttccttacacgtattggatttggttccaaggtgatcgttacaggagatgcatcccagaaggatcttccaagagatgcggtttccggtctggatgtggctatgaaggtgctgaagaagatcgacgatatcggtttctgtgaacttaccagcaaggatgtggttcgtcatccactggttcagcagatcgttcaggcttatgagaattatgaaaaaagacagccaaagcaggataaaggattcaaatacgatggaagacgtagacatggaggacaataaaatggtatctgtgcaatatgaatgtgaaacagacatttctctggaactggactgtgaagctcttgcaagggaagtggcacagtctgtactggaactggagaactgcccttatgatagtcaggtgaatcttgttcttacagataattcggggatccatgaagtgaaccggcagttccgtgggatcgatgcacctacagatgtgctttcttttcctatgattccttttgaaacgcctgcagattatcagatcctggatcaggatgaatccttttttgatcttgatacagaggagcttcttcttggagatattatgatctctgcagaaagagtgatcagtcaggctgaggattatggacatagtatcaaaagagaattctgttttctggtagctcacagcatgctccatcttctgggatatgatcacatggttccggaggaagctgtcattatggagcagaagcaggaagcagcacttgagaaacttgggattacacgttaagtctgcgtatcaggtataattaacaggacttatgccatttgttcagcaacagtaaaggagaaaaaaatgaagaaaaaattattcagaatgcttaccgggttgattttatcctgttcccttgcaggaagcagcacagttatggctcaggaagcagacagttcagatactgtgaagagttaccttacaggagaggatgtaccggcttccattggacggagaagacctgtggcagtgatgcttggcaatgatcgcaacggcgcgccacaaagcgggcttaccaacgcaggagtgatctatgaagcacctgtagaaggacagatcacaagattgatgggtatttttgaggactatgacaatctggagaagatcggctctgtccgcagctgccgtgattattatattttctatgccaatgaatttaatgccatttatacgcattatggacaggcagcttatgcacttccttatcttgagcagcatgctattgacaatctgaatggacttaccatgggatcaactgcattcttccgtactacagaccgtcaggcacctcataatgcatatactacacctcagcttcttcagaatggcattgatgccatgggatacagccaggaatacaagtctgattacacaggccattatctttttgcagaagacggcacagagactactctggacaatggtactgctgccaatgtggtaaagctggacaattacggagacaatcacccctggtttgagtataacgctgataccaaggagtacagtcgttttcagtttggagaagcacatattgatgaattgaacggacagcagcttacctgtgacaatattatccttcaatattctgcatataagccttacgattctaatggttatctgaatgtggatgtgatgacacccggacagggcaagttcattaccagaggcaaggcgattgatatccgctgggagaaggattctccatggggtattactcattattatgatgccaatgatcaggagatccgtctgaatcctggccgcacctgggttgctatcatccagaatgacaaggtggattccatttcttaccagtaagatcttgccagaggtgagactgcataatctttaaccttagcgctgatactatcagaaaaaggagcgattctcatgcgtaaatttttctgttgtatcagcgtattttttattttagggatcctgtgcctgggatattatcttacttatacaggcgggaaagatggatcccagggcctggccctggagcagatcactacaggcaggtctgtcaatgcaggagaaacaaagggcgaatatgggatttattatctgcagcttgagggagatacggtagtgatctatgaaaataacaaacagaccgtatatgataggatccctattcaccgggatagccttccaaaggagctgctgcagcagctgaaaaaaggaaaatatattaagaataagagagaattatacgcatttcttgaaaattattccagttaataaatatgaattttttctgaaattccttccagctgctgaaaaatcatagacgaatgacgcaaaaaggtgtaatataatttgatgaaataaagggtaaaagcgtattggagcaaacaggaagatgaattacagagaacgactgaaagataaaaaaagaattgttattaagatcggcagttcttcccttacacatgcagccacaggaaggctggacctgcttaagatggaggtgctggtgagagagcttggagatctgcgcaatcagggtaaggacgtagtccttgtttcttccggagccattgcagtaggggcagcggctctgggcatgaagggcaagccttccgatcttcgtgtgaagcaggcatgcgcctccgtaggccaggccagactgatgctgatctaccagaagctgttttcggagtataaccagatggcaggccagatcctgatgacaaagaatactatggttaataatgctaatcgaaggaatgcacagaatacatttaacgaattactttcgttaggagtgattcccattgttaatgagaatgactccatttctacatatgaaatgcagtctcttgagaaattcggtgacaatgacactctttcggctgtggttgccgcattgatcgaggcagatcttctcattcttatgtctgatatcgacggtttatataccgacgatcctaattccaatccggatgcaaggtttatagatactgtagataattttgacgaacgcattttgaatatggggaagggatcatctaccagtaatgtgggtacaggcgggatggctactaagcttacagctgcaaggatcgctacagctgcaggagtggatatggtgatcgccaatggaagtgattttcataatatccatcgtgtcacagatggagatgactgtggaactttgtttgttggaaagaagcaggaagaattcttcctgatcgactatatcgaaaagcttttgtaaggagagaattatggacgcacgtaagatagacaggatcaacactctggctcataaggctaaaagcgttggtctgacagatgaagagaagagagaacagacacttcttcgtgaggaatatctggagtcaataagggcaagccttcgttctaggctgaacagtattgatattaaagaggctgacggaagtataacgaatcttggagagaaatatggaagaaaaaaaggtcattagaaaaaagatatttgccatccgtcaggatatatctgaccagtgggtacaggatatcagtatagagctttccaagcatttgatcgatcttccggttttccagcatgcaaagaaagtgatgatctacgcagactatcatcatgaggtgaagacagattatatcatcagggctgcctgggaagctggaaagcaggtggcagttcccaaagtggtgggaaaggagatggttttccatcttctcacagattttaagcagctaaagccagggtatttcgggattccggagcctgtatccggagaagccgtctgctgggaagaagcacttatgatcatgccgggagttgcctttgatagaaagaaccacagaatcggctatggcggcggcttttatgaccggtaccttgaaaagcatccggggcttgataccgttgcactggcttttgattttcagataaaggatcaggtgccctgtgagatcacagacatctgcccgcaggttattgttactgagacagagactctgttcagaagggaggactagacatgaatgaaatgctggaaatacttgggaaaaatgcagtagatgcagagaatatccttcgcaatctttcaaccaataagaagaatcagatccttcgccaggcagcagagcagttggtgaaggatacagataagatcctagccgccaatgccattgatgttcagaagggcagggagaatcagatgtcggaaggcctggtagacaggcttatgctggatgctgaacggatcaaagggatcggagagggactgcgccaggtggctgacctggatgatcctataggggaagtgcttggcatgaagaagcggcctaatggccttctgatcggacagaaaagagtgcccttaggggttgtggggatcatttacgaagctcgtcccaatgtgactgcagatgcctttgccctgtgctttaaaacaggaaatgcggtgatcctgaagggaggcagcgatgcgatccactccaaccaggcgattgtagaatcgatccgtaaggtgcttgcaaggaacgaagtgacagaagatgccattgccctgatccaggatacttccagggagacagcttctgaatttatgaaactgaatcagtatgtggatgtgctgatcccaagaggaggaaagggtctgatccaggcagtggtgaataatagtaccattcctgtgatcgagacaggtacaggcaactgtcatatttatgtggatgacagtgcagatctttatatggctgctgatatcgttatgaatgcaaagacccaaagagtaggggtatgcaatgcctgcgaatccctgcttgtccacgagcaggtaaaggacgtgttccttcctgtactggcagagagacttcgccagaagcatgtgcagatgcgtgcagatgaggcggcacgggcactgatcccggatgctgtagcagctacggaagaggattggggcagggaatacctggactacatcctgtccattaaggtggtgggcagcgtagacgaagcgatcgcccatattaataaatataataccaagcattcagaagcgatcatcaccaataattacgagaatgcccagagatttctggatgaggtagatgcagcagctgtctatgtgaatgcatctacccgttttacagatggctttgaatttggctttggagcagagatcggcatcagtacccagaagcttcatgcaagaggccccatgggacttaatgcactgaccactacaaagtatataatatatggaaatggtcaagttcgttgatttttggggacgggtatgctatacttgacccaatgttaatattttaagatgttgctctttacgaggaggactagcaatgaagaaaaaacaacttttagcttttatgatggcgggagccttatctgtaagcgctgttccgtattctgcttttgcagaagagggcgctgcagcagtatccatagatgaaacagcagtagcagcggaagccccggcgacggatccggcggatgcagctactacagagggacaggccacaggggattctttatcagcagctccggctgcaacggaagctccggctgcagaccaggctgccgctacagatactaaccagacagataatacagttacggagacacctgcccagacagatcctaacgcccaggcaggcacggatgcccagcccacagaagctccggcagtacctgacactacacagaatccagacaatacccaggatacagacaatatccaggatgcggtgcaggatatcacagaagataatacagctgtagatactgccaatgatggtacgaatgggggaactacagtagatgagagccttccggttcatgtgatcgatccagcagatggcaagacaatctcagctacctataacactttgcaggaagctattgatgggatcgcagacggatccagtacaaaggatcagccagtgaagatcatattaaagcagaatattaagatcaacgctgctgtagcagttgggaataagcatgtgatcattgcagcaggtgaagctgatctgactgtggagcgtgcagcggattatacaggcgatctttttaccgttgatgagggctcccttcagtttgcagccggtgtgaaggatgattccactgtatgtaagctgacggtagacggcggtcaggcagagaatgtgaccggtgcgctggtacatatcctgaagccggctggtacattcggccttcagtcaggtgtaacccttcagaataataagacaaacgcagccggcagtgcgatcttaaatgaaaacggcggtaccattgtactgacaggcggtacgattaccgggaatgtttccacatatacagatgcagataaagcagccggtggtgctatttacagtacagacctgatcacggtagctgcatctaaagatgttgcaggcacagcagttcctgccactatcctgatcaaggacaatacaaggacagatggttctgcaggtaatattgtattaaatggcgcaggtgcatatgtacagatgcagagcactgtacaaaattctgagatccatatcacatccactgcagggcttgcccagaatcagccattggtagtttctgcggcggatgttagcggcgcacaggttgtcacaccggcggatatgattgcttctgtagcacagatgacctatgacgataccaattataaattacaggcagatcctaatacaggtgctgcatatctgacaccagccacaccggttcccacagccataccggttcctacagccacaccgattcctactgtagatccgaagccttcggatgtgcccacagccacagctacacctactcctacacaggcagtgaagaagatgaagctttccaataagcagaacatcaaatggacaggccgtgagaaggctatgtttaagtttaccgcagacaagaatggacggtattatatcgcctggaaccaggacaagagcaagattccttcctttaaggtaagcgatgccatttcttcattcgcagcagatcagacagtgactgtaaatgtacctaatattactgctgaggatggtaaggatgtatatgtatatctgttcgctgttgacgataataatgtaaaggctacgccgcttcgctatacactgaaggcaagtgcccgtccggcagcagctgtagttacccgtgagccaattgttcccaatgtaacagagagcattgtccagggtctggataaggcactggagttctatcctaaccagttctacaagtttactgtgattggtgcaggtacagcaagtactgcagagcaggtgaagagccctgtagagggagacgttcagtggcgtccgatctactggagtacatccaagaatccatcagctaagaaccagaacaaagagtggcagattggcgccaagaatggtatcaaagaggccaagacctttaagctgtatgtattcttccagaaatatgtatataatggcaaagaatggcaggcaagtgatacggttcagtcagctgcctacaccttcagatccgcagagatcacctttgagccttcaggtaccccatccggtacgccggcagcaggcagcggcggttattatggaggcggcgaaaccggagagaccggtgaggatacagatggcgatggaggaagcgatgcagcaagccgtgatggagatgattccgacacaggcagcacatcttccgcatccaatgcttccacagcagataactcaccaatcggtgctatggtatctctggcagccctttcacttctggcaggcggctatgtgatcgtaagaagacgtaaaagagcgtgatctattataacttgtgtatatcagcctgaagctttatgctccggctaagatatctacagattcttttaagagacaggtctattggcctgtctcttttcatatacttttatgaatgatttacggcattggacaaggaggatgggttttatggaaaaggcatctgatacatatgaaaaattatattactctctgtgggagctggcaggaagatacagcagctttgtacaattccgggtgattggcagcagccatgatgaaaggatgatccctatgctggaaataggaaagggaagaaatgtactgttttgccttggatctttggatggcagagatcagatcacccctgatatcctggtatacatggcagaggaatatgcaaaagcctatgagtgtggatggcttcttgaggatttttatgatatcaggaaacttctggatcagatcaggctatgtgtgatcccgttagccaatccggatggttatgaaatctgccgaaacggcttttctgtgatccgaaatcctatctacaggcagatgctgaagatgcagcagattccctgggaagaatttggatgcaatgcaagagggatggatctttccaggaattttcctacatccgggtacaaaaggacaagagcagggcaggggccagccagcgaaaatgaagtaaaggctttgatccggatttttcaggaatatcagggagaaggcctgctctcctttggacaggcctggcaaaggattttgtactatacaggagatattaatggcagacagatatataaaagccataaaattgccagaaatcttcaacagtgtacagacagaagaagagtaaaaaaagaacaggcatccggtttgaagatgggttaccatctggaaaaacaaagcatcatagtccctgaaaataaggaaagcagatattttaccgctggggccccggaacctttttatcagcagatcacaggacggccagccctgcgtatagaaattggaaaaacatggggacaagaactgaccagggaagaactttcagaatgtaccagggatatccgtattcttcctttggaatatattttttcttatacaagtggattggtgtcttagccgcttgttgataagattcctcaataactgtttttttataaatacagtcttgacgggctgtccaaaatcaggtatcttaatagcaagttagcacagactaacaattatgagaatgatatggacggcctgataaaagaatattggatgggagatcacttacaccagtaggtttgacagatcagccctttattttttaatcatgggttagaaacaactaataaatatttgccagctaaaggaggacgcacatgagtattgtaattatcggtggaaatgaaagaatggtatgtcagtatacagatatctgcaaaggatacggatacaaagctaagatttttccaaaggagaacggatccatccgtaagaagatcggaagtccggatctgatggtcctttttaccaataccgtatcccacaaaatggtattaagcgcttcacaggaagccaaaaagaacaatattcctgttgcccggatccatactagcagtgcaagtgcactgaaaacagcccttgaccagcattgcgtatttgcttaaatcgcggtattgtacagattggatttcatgctgccaaacagcccggacagcaacggctgacctttgattcgcctgaataaatggttcatacaactgttgattcgtccgaataaatggtagacaaactgctgtgaataggataaaataaaataataaaaagatacatgcagccccagaagagtcgttttttggggttgtttttctgttataatcatgcatatgtgaaacgggaggaattatgtttaacgaaattgattttactaaaatagatcttacaggacagccgccggctgacgagaccaaaagacagtattactttatgggaaagatcagggaactccttgcaagggagagtgctgttcttggcagaccggtaacttattgtcttcagacctttggctgtcagatgaatgaaaagcagtctgaggttgtagctggtattatggatgagatgggctttgaccggaaagaatccgaagatgcagatatcgtgatctacaatacctgtaccgtccgtgagaatgccaatctgaaggtatatggccgtcttggcaagcttcataatctaaagaaacacaatcctgatatgaagatcattttatttggctgcatgatgcaggaacagcatgtagtagataagatcaggaaggattatccatttgtagatcttgtatttggaacccacaatattttccggtttgcagagctgttctatgagatgaaaaacagggacagccagctggtggagatctgggaaggtacagaacagatcgtggaagaattgcctacagagcgtaattactctttcaaatccggggtaaatattatgttcggctgcaacaatttctgcagctactgtattgttccttatgtacgtggacgggagcgcagcagagagcctgaggcgatcgtaaatgaagtgaagtctctggtagcagatggggtgacagaggtgatgcttcttggacagaatgtaaattcctatggcaaaaccctggagcatccgataacctttgcgcagcttcttcagatggtagaagctgttccaggtcttaaaaggatccggttcatgacttcccatccaaaggatctgtctgacgaattgatcgaatatatgggaaaaagcaagaaggtatgccatcatcttcatcttcccatgcagtctggtagcagccggatcctgaagctgatgaatcgacgttatgataaagaaaaatatctggagcttgtgcagaaaatccggggggcggtgccggatatttccctgactaccgatattattgtaggattcccaggtgaaacagaagaagacttcttggaaacactggatgtggttgataaatctgattttgatacagcttttacatttatttactccaagcggagcggtacaccggctgctaaaatggaggatcaggtacctgaggacgtggtgaaagaccgttttgaccgtctcctttcacttgttcaggaaaagggcaggacggtatcctccagattccagggcactgtgcaggaagtgctggtagagacagaaagcaaggaaaaagggatctttacaggcagaacccaatacaaccttcttgtacattttccgggaacttctgatatgcttggaaaatatatccaggtacatctggatacctgtaaaggattttactatctgggaactgcagtgacagaacaggagtgatttgcacatgaatgatatgagacggctgctgaagtatatgggatcatataagaaggatatggtgcttggcggggtgcttgtattgatcgaaacctgttttgagttgtttatccctattatgatcgcagacctgatcgatacaggtgtggccaatcatgatatccattatatttatataaaaggcatacagatgatcctgtgtgccggagcagcccttcttaccgggcttttgtatgcccgttatgcagccagggctgcatatggatggggagcaaagctgcgtgaagccgaatatgcaaaggtgcagcaatatgctttttccaatctggatcactttgcagcctcatctcttgtaacaaggatgacaacagacattactgtgatccaaaatatggtatgctcaggcttcaggccggtgacaaggggcccctctcttttggtaatgggggttcttctgtctttttggatgaatgccaggcttgccattgtttttcttgtatgtattcctgtactggctttgatcctgtactggatcgtctctaaggtagcgcctatgtataccaggcttcagcagatcatggaccgactgaaccatgtagtccaggaggggcttacaggcattcgggcagtaaaggcttttgtgcgggatgaatacgaagaggataagtttgcaaaggttaatacagaccttacagcttccagcgaaaagacttttcattatgcagttctgaatctgcccgcttttcaggctgtgatgtaccttgcgattgtactgatcatgtggtttggaggcaatatgatccttacatcagggctgaaagtaggagatcttaccggatttttaagctatgtgatgcaggtgatgaattctcttatgatgatcgccaatgtgtttcttttgcttaccagatctctggccagcgctcatcgtattgtagaagttctggatgaaagaatcatcctggcatcacctcaaaacggccggaaggaagtgcctgacggcagaattgattttgaggatgtatcctttaaataccatgaaaatgcaaaggaatatgcattatcaaaggtggttcttcatatccggccgggacagacggtggggatccttggaggtaccggagcatccaaaacaaccttggtacagctgatccccagactgtatgatacaacctgcggaagtataaaggtaggcggtcatgatgtgcgggaatatgatctgactgcacttcgcagggcggtaggcattattcttcaaaaaaatatactgttttccggcactgtgagagaaaatcttctttgggggaatccggatgcttctgatgaggaggtctggaaggcctgcaaagcagcctgtgcagatgaattcctggaaaagcttccggatggtctggataccatgctggagcagggcggaggaaacctgtcaggagggcagaagcaaagactttgtattgccagagccttacttggaaggccacagatattgatttttgatgactccaccagtgcagtggatactgccacagaaaggaagatccgtgaagcgcttgccggatatccgcacattacaaagatcattattgcccagcggatcacatcggttatgaatacagatcagatcattatcatggatgacggcaggatccatgccaccggaacccacacgcagcttcttgctaatgattcgatttaccaggagatttatgcttcgcagatgaagggaggggacgaagatggcttccagacagtatagtgggaagaaaccccagaaccttaagaaaacgctggcattttttctttcttatataggcaggcacagactgatcttccttgctgtggcagttatggttgctatcagtgccattgcaaatctggcaggtacttacatgatccggcccattgtcaatcatctggcagatggagatatacattccctgttgatgggagtattattggctgccgggatttttgccacaggagccttttctgcctggggatacacacagactatggtaaaggcttctcaaaaggtgctgtatgatatccggaaagatctttttgaacatatccagacacttccgctaagattctttgatactcatggccatggagatattatgagtctttttacaaatgacatcgatactatttccgaggctttaaataacagctttgccatggctatccaaagctttatccagatggtgggcactttgactgtactttatatcctgaactggaggctgtctttgatcgtaactgcctgctatggaatcatgttctggtatataaggttcagtgggaagaaaagtaaagcatactatgccgcacagcagcaaagtctggggcagttggacggttttattgaagaaatgatcaccggacagaaagtgatcaaagtattcaatcatgaagaagcaagctttaaggatttttgtaagaaaaacgaggagcttcgccaggctggtacaggtgcacaagggtatgcggcaaccatggttcctgtggtagtgactatttcctatattaattgtgctattgtggcagtgcttggaggacttctggctcttcagggaaagacggacatgggcagtcttgccagctatcttgtatttgtgaggcaggcggcccttcctattaaccagtttacacagcaaagtaattttatcttgtcagcacttgctggtctggagcgggtgttccaggtgatggaattaaagcctgagattgatgagggaactgcccggctggtaagggtacgtcaggaaaaggaccagatcatccaatgtaaggaagctaccggaaaatgggcctggcgcacagcagatggcagcctgatccctctttgcggggatgtgcggtttgaacatgtggattttggatatataaacggtcgatcgatcctgaaggatatcagcttatatgcaaagccggggcagaaaattgcttttgtaggctctacaggagcaggaaaaactaccatcaccaatctgatcaaccgtttttatgaggtgcaaaaaggcagggtggtatatgacggattagatgtaagacagatcaaaaaagcagatctacgccattctcttggcatcgttcttcaggacacccatctgtttacaggcacagtagcagacaatatccgttttggaaaactggatgcaaccatggaagaagttaaaaaagcagccaggatcgcaaatgcagattcttttatccgccgtctgccggatggatatgatacgatgatcactgcagatggagccaagctttcccagggacagcggcagcttctggcaattgccagggcagctgtggcagacccgccggtgctgatcctggatgaggcaacctcctcagtagatacccgtacagaagcactgattgagaaggggatggatcagctgatggaagggcggacagtatttgtgatcgctcatcgcttaagcacagtacgcaatgccaatgccattatagtgctggagcatggtgagattgctgaaaggggagaccatgaggatcttctgaaacaaaagggaaaatattaccagttatatcatggaatgtttgagcttagctgaaatgggggataatagtaagatgagtaacagtaagaagtacgagatcgatatgtgtaatggcacgatcatggataaattgatcacttttgccgttccgcttatgctgtcaggtatcctgcagctgatgtttaatgcggtagacattattgtggtaggaagattcagcggcagccaggctttggctgcggtaggttctactacagcattgatcagtgtatttacaaatctttttataggggtttcccttggggcaaacgtactggctgcaagattctatgcagcaggaaagcataaggaaatgtcagaaactgtgcacacagccataacacttgctctggtaagcggtattgtaatggctgtgatcggtttcatcatgacaagacctgcacttgaattaatgggtacaccggatgatgtgatcggccagtctgtgttgtatatgaagatttattttcttggaatgcccttttttatgctgtacaattacggggcggctatccttcgcgcagtaggggataccaagcggcccctgatcttcctgatcatttccggccttaccaatgcagtattgaacatgatccttgtgatctgcttccatctggatgtagcgggcgtagccattgccactgtagtttcccagatgatttcctgtatactggtgctgcggtgcctatgtcatacagatggcagttatcagctgaagttttcaaagctgactatgaaaggcttttatctgaaacagatcttccaggtagggattccggccggaatccaaagcacagtgatcaatctgtccaatgcactgcttcagtcctctgtaaattcctttggttccattgccatggcagggtatacggcagctaacaatatttttggcttcctgtatgtatcggttaattcagtgacccagtcctgtatgagctttaccagccagaattatggagtagggaaatttaagcgaatggataaggtgcttgtagactgtatgatcctttctgccggcttttctcttatcttaggctgcggtgcttatttctttggccctcagatcctgaagatctatacagatgatccccaggtgatccagtgcggtatggagatcatggcttataccacaatcccttatttcctttgcggtatgatggatctgtttccaggcgccctgcgtggtatgggccactctgcagtacccatgatcctgtctgtgatcggtacggttggaatgaggatcctttgggttttcgggcttttcccttcccacagatctcttcggttcctgtttatttcttatcctgcatcctggaccgttaccattttactccaggtggtgtgcttctatttcgtccgcaggaaagtacacaggatgaaacagcctgcattataaacgtactttcagccctcggaagctgaagacaaaataaaggacttccgcaacagaagtaatagaccaggagaagaaataaagaagatacagggatgggatcgtgtgaaaatgtgcgaacactgtgtagatccacacaatacggaacacacaggagccaaggatcacaacaaccgttggaaccacacttttcccgatccctctggaagctgcaatggagcagtccataaaggcactgatgcagtaggagagtgccatgattcgtatcctttccattcctgcgtcaataaccgcctgctttgtggcaaaaagagaaaggaattcctttccaaatacaagcagcaggatacccaaaataagtcctgcggcaaaggaataaaacagactgaccagatagctgttcagcatacgtttcttattgcttgcgccccggttctggctgataaaactggcacagcctgtataaaaggcagccattacattaaaaatcaaagcgtcggcatttgctgctgctgcatttccggaaaccataactgcatcaaaggaatttactccaacctgtacaaagatatttgcaatagcaaaaatgccgttctggatccctgcgggaatgccaagcatcaggatcgcacgtgcagcatccttatggatcctcagctttgacaggaaaagccggcagccatctgtccgtttcagaaggtggcgtacaataaggaaagcagaaatatactgagcgatcacgctggccagggcaacgccttcagctgccatatggcatctgatcacaaagaaaaggttcaggagcacgtttaatacgcctgccacagaaagatataaaagaggccgttttgtgtcacctgctgcgcttaaaacaccatttccacagttataaacagccattgctggcatgccaagggcatagatcttcatgtacaggacagcaccgtccagcagctccggttttgtattcattaaggaaagcataccaccagcaaaaagaatacatagaattccgatcaaaagtcctgctgccaggcaaagtacaaatgctgtatggacgctctggctgacggcttttttatcctgggcaccaagcttatgtgctacgcgcacatttacaccgcttcccataccgatgagaaagcctgtgaacagcgtgatcaacagggtagtagagcctacagacccaagagcctgataactggaaaacttacctacaactgccacgtcgctcatgttaaacatgatctccaggatctgggccagcattaaaggaacgctgaataaaaagatatttttccataacgaaccggacgtcatatgaatggcaccggtttttattttttcattggttgcttccattttcaaatcccctcatcacaaaaaacttgcttacaggctttgctttgcatttgcactcctgtaagcattgtaatcatacgatactattattgagaaaaaatgtaaaggaaaataatgaaaaagatgtgtaaatttccttgacaaaataccctaacggggtatatagtgattttgaaatgaggaatacccatacggggtatgcgaagaaaggagagaatgccatgactgaaaagaaaaactgctgctgcagcgaaaagcatacagaccgatcccaagaggagcgtaagaagctgatcaaccggctgaaacgtattgaaggacagatccggggtatcatcggtatgctggagaatgatgcctactgtaatgatatcctgatccagtctgcagctgtgaatgcagctgtgaattcttttaacaaagaactgcttgccaatcacatccgtacctgtgtggccagggatatccgtcaggggaaggatgagaccattgatgagcttgtggcaactcttcagaagcttatgaaatagatgtatggttatgtggcggtcaggccacatgtccgtttaccaggaggaatgaagatggatcaatataatgtaacagggatgagctgtgcagcctgcagcgccagggtggaaaaggcagtatccaaagttccgggtgttactgcctgcactgtcagtctgctgaccaattctatgggtgtggaagggactgcatcaccggctgagatcatttctgcagtaacagctgcaggctatggggcatccttaaaagaaaacaaaagcaatagggtttctcagtcagaagcggaagaagcactggaggaccatgaaacaccggcattaaaacgccgcctgatcgcatcggcaggatttttacttgtgctaatgtatttttccatgggacatatgatgtgggaatggcctctgcctgcatggtttaaggataatcatgtggctatggggctggtacagatgatcctggctgccattgttatggtgatcaaccagaagtttttcattaatggttttaaaagcttatggcaccgttcccccaacatggatactttggttgcattaggctccatggcatcctttgtatggagcgtgtacgcgctgtttgccatgacccgtgcacaggtggatggagatatggcagcagtgatgaattatatgatggaattctattttgaatctgcagccatgatccttaccttgatcacggtaggaaaaatgctggaagcacgttccaaggggaaaactacagatgcgctgaaaagtctgatgaagctggctcccaaaactgcttccgttgaaagagatggtaaagaggtttctgttcctgtggaacaggtgcagaaaggggatgtattccttgtacgtccaggggagaatattccggttgacggcgtgatactggaaggaaacagtgctgtaaatgaatctgctcttacaggagaaagcattcctgtagacaaggctgctggcgaccaggtgtcagctggtacagtgaaccagtccggatttatcaaatgtacagcgtcccgtgtaggagaggataccacactttcccagatcatcaaaatggtcagtgatgcagctgcaacaaaagctcccattgcaaagatcgcagataaggtgtctggtatttttgtgccgacagtgatcaccattgcagtgatcaccactttggtctggctgcttaccggacatgattttggctatgcccttgcaagagggatttccgttcttgtgatcagctgcccctgcgctcttggcctggcaactccggtagctattatggttgggaatggcatgggtgccaagaatggtattttatttaaaactgctgtttctctggaagaagccggaaaggtacagattgttgcccttgacaaaacaggcaccatcaccagcggtcagcctgaggtaacggatgtactgccagctcctggagttgacaaagaggagctgcttcagtatgcttatacattagagagcaggagtgagcatccgctggcaagagccattttaacaaaaggaaaagaaatggatctggagcttcttaagatttctgatttcacggcacttccaggcaacggacttacaggtactgtgaatcacaggattatggcaggcggaagtcttgcatttgtttcttcaaagacccgggtgccagattcttttaccgtacaggcaaagacactggcagacgcaggcaaaacaccgctgctctttatgagggatggaaagctgcttggtatcattgctgtggcagatgtgatcaagaaggacagtcctcaggctgttcgggagctgcaggctatggggatccgggtagttatgcttactggtgataatgaacgcacagccaaagcaatcggtgcacaggccggtgtggaccaggtgatcgcaggagtacttcctgatggtaaagaaagtgtgatccgtaagctgaaagaaaagggcaaggttgccatggtaggtgatggcattaatgatgcgcctgcacttacaagagcagatttggggattgctattggggcaggtaccgacatagctattgatgctgctgatgtggtcctgatgaagagtcgcctaagtgatgtgccggctgcagtaaggctgagccgagccacccttcggaacatccacgagaacctgttctgggcatttttctacaatgtgatcggtattcctcttgctgccggtgtatggatcccgctgtttggctggactttaaaccctatgttcggtgcagcggccatgagtctgtccagcttctgcgttgtcaccaatgcgctgcggctgaacctgtttaggattcatgatgcagggaaggataaaaaaatccatccggtggatcttgattacatggtcacaggggatcatgtaatcaataatcatgaaatcaataatcataaaatcagcaataatgaaacatgcaatcatgacgaatgtaatcatgaagcatgtaatcataaaataaacaatcataacgaaaaggagaagaaaaacatggtaacaatcactgtaaacgtagagggaatgatgtgcggacactgcgaggcacatgtaaatcaggcaatcaaaaatgcattccaggtagaagatgtggtatcttctcacgagaagaacaccacagtgatcactgcaaaggagcatttggatgaagacaagatccgtcaggtgatcaaagatgccggttatgaagtgacagggatccaggaagcatgaatgagttatttgaactgattgaaaagaagatcaaagcctccggttatccacgtgctatcaggggagaagatgtgtacgaagacatctgcgaccagatcgagggaaaagagaacggaagttacatccttctttccaaatttgaggatgatgtgatctttgagtatcatatcactataagagaccaggactttaaccttgggattttgacaatgagaacaccggaaggtgtatttgaaacagattttgatgcctgatgtgagctgccgtactgattttcagtacggcagtttttgcataattcgcataaaactatccaaaaggatagttccttaattgacttttttctggtaaaattatactatcataattggaaaaggacaaaggagggggatatgaatacaagcgtccgattgatcaatgacaattacataagtccggagatagcagtccgtaagttcagatctgcccgtaaattccgaacaccgttgtatctttacggagtgaccggcattgggaagacttctctggttatgaataaccttaacatgaaacgctgcacctattacagcgctgctgatactgctgcagagatggtagagataaaagaatatgaaggagagcgcacggtgatcctggatgatcttcactgtgtaacagacagtgcacaaagagaaattttctctgctaagatccgtcagttactggatcaggataatgtttggctgattttgatcggaagatgtccctttcctagatggctgctgggactacggacgaaatacatgtttgtagagatcccggagaaggattttcttctcacattagaacagcagaaattatatacagagcgcgccggactggttctctcagaggaagagcaccggaaggtctggcaagtaggacggggcattcccttgtctttggtattttttgttatggaaaaaggagatctggagcgtaccaagaaacgtgtctgggattttctggaaacccaggtatatgaccagtgggatacggaattacaggatttcttcatggatgtttctattacagagactttcactgtgcagctggctgccatgcttacagggagaaatgatgtagaacagttgatcgcagaagcagagcttaccggcaatttttttgatatcagtgggacagatggtatttggaaatgcagatgggaaatgcgtgtttccatgcagcagaggcttcacaggaaacggaccccggaccagatcgaacggctgtattatacggcaggtctgtattacgaacttgcaggcaggattcctgaagcccttgcgatgtatgaaaaatatcaggatatggatagtatttccagactgcttatttccaacgcaagaaagaatccttccagtggacattattttgaacttcgcaaatattatctggctcttcctcatcggatcgtggcagacagccctgttttgatggcaggacttagtcttttgcattccatgctgctgaatatagatgagagcgaacgctggtatcatgaactggaggcatatgcccagaagcattccggcagttccggcaaagaggcaagggaccggcttctttacctgaagatcggactgccccacacaggaactgtgaagatgatagatcttctcaagaatgcagatattctgctgcgtaatcgtaaagttgtattgccggagtttgccgttaccagtaatcttccttccattatgaatgggggcaaggatttttgcgaatggagcaaacgggacagagaactggcagcaagcataggaaagcctgtgtcttttgttcttggcaaatatggaaagggcctggtgcccctggctttggcagaaagttatctggaaaaaggaggcgatacctttgagatcttttcctgcgctgaaaagggcagaatggaagctgacagcagcgggaagatggaacttgtatttgtaggaagcggtatattggcctggctgtccattttaaaaaacgatgctgcaggcgccaggaccacgttattaagcctgcgggagcgggctgaatcagaagcaccgaatcttcttgaaaatctggatacgtttctttgcaggattggcttgtatcaaggggaagatgtatctgcatggctgaagacagcaccggatgaaaaaaaggaattttatacaatggatcggttccggtacctgacgaaggtgcgggtttatatccggatgggcagatttgaagcggcttattgtcttctgcagcagcttttgtactatgcagttatgatgaagcgtacatatatccatatggaagtgcagcttctgttagctatcgtacaatatcagacaggacagaccggatggaaggatacattccaatggtgcattacacaggctgaggaatatcattttgtacggatcttcagcagagagggctctcttgtttatccgcttttcggaaaggaaaagttcatttggaaagatgtagcttacaagaagcaggtgctgtcagagtgtaaacagatggctgaaaattatccttcttacctgcaaggcgatgaagaaacacatattgtattaagcagcaatgctacccgtattctgaaattacaggaagaaggtctttcagcttcggagattgcagctatgctgaagctttccgaagccacagtgaaatatcataataaggagacataccggaagctgggtgtgaaaaacaaaaccgcagcaattgcagaagcaaaaaaaagaaagctgatctagtacagtgaaaattaaggaaagccaatatggtggttacttaatattcactgtaccaggcaacaataaaagcagtaataaaagcagcaataaaagctatattattaccagagggaggacaaccaatatgaaaaaaaggaaaattgcatggatcctggcaatggttatgacggctacaagcattgacagcaccgctttgatggctggtgccacagagtttgccaccgaagagcaggaaagcctgacccaggatactgacaaggtgtttgatgtgccggatgaagattctcaggcagcagagcaggttacggaagcagacaacgcagatccggatctttccttttacgatgtggaaagcgacagcacatacgtagaagatgagggagagcagcttttttcatcaggagagagcatgacagagcctgaagaagtatttcaggacgtatatgatgcggatgcttctaatggggacagtggctcaggtactaccataacctatccgggtttctgtacgcagatcaataccagtatggattttacagcagagatcaaaacaaaaggagaggaagcctggtttcatttcacacctgaggaagatggcaaatacgttttcatgactgatgagaatactgcttttgccagaacccatgcaaatttatgcgaggatgtagaagaacaggaaaagcctcttttgaaagaggatgaaatatccggaaattggacacatctttccaggatcacctatgatctggtaaaaggtaaacagtatttattccgtacctggcttgattatggcacaggaagctacaaagtaagagttgttaagtactctgaagattatgatattacatctgttactttaaatgcagagaacgcccggaagcaatacgtgcagtgttctgaatatgtatatgcagccggggctaagcttacatttaattataggaatgcactttcacagacagttaccgttacagcgagaaatgcagtccctatggatacttatggacatacggccaggtatttgtactatgacagcgcggaggaacaatgtggcggcgctggttctgctatgatgaaagcaggaacctacaaagtcagatttgaagtggaaggctacactcctgatgctcaggattccttatcttatgagtttactgcaggggatccatggacggatatcaatgaaggcaccacagctgtaaaaagggttcattctcaggatgatgccctgtggtacaaatttgttccaaccaaaagcggaacctatgcctttgattccccaggatggatgcaggtaaaagaccgggatcataattttgctaaaatgtctcccatatccgaaaaatggggtgtgtactccggcgtttctcagtatcggagacaatatatacttgatcaagaccaggtttattatgtgcgtttttacagtatgaatgaggatcagggcgaaactgctgatgttaccattaccagaatccccaatattaaaaagatccagatcaccagcacactgggggaagcggttgccggtcttaaaagctacacagaagcaaagattttggtttcctttgacaatggaaactcaaaagaaggcacattaacatttggctctaccgttatccggattgatgagatggtctttgaaccttatctgatcgatacagaaggaaaagagcatgaagtattagacgttctgcctgccggagattatcagctgatattcaggagcggtagtgtttccagtgatcctgttccctttgcagtaaaagaaatcaaagattctgttctttaccggggcgctattgactgtggagaagagatttctgttgtttctccatatgtccagcatgccttttacagctttacagcaccggcaacagacagatatgctatttctgatattacgtccaaatactatgacatttataagaaaaccgacagcgtctatcagtcagtaaaatatgaaaatatccaggctttgaatgcaggcgatacaatcttttttgaatttcacggtggaggacaccagggagaaaatgcagctctgagcctgattagaagacagaatattacagcgatgtctttccctaaaaaagagtacatccagatcgaaggtatttatccggaaatctggataccaggtgatttaagtatagactatgtagatggcagccatgctgaaatagctgttctttttggtaaaacttcagttgaagataatataggtaacaccattgctgtagaatggctgcgtgaagatgaaaacggaaattatattccatggtctgcacaggaaggttccgttgccggagaatataaagccatctttacagcaggaactgtccgcgaagagatcaggctttccatcctttccgtacaaaaagatgcatcacgtctgcctcagttaaaaatgggccgtcaaaagcttccattgaatgaggatggcactaattattatatcttcatcccggaaacagatggacattattcctttaattattcagacgggcatgtaaatgcatctatagggctttgggatgaagcgaataataagctaacatatattgggcttttggctggtgacagagaactgacaggaggagtcaagtatttcatctcattctataccaatcaggcgcaggattttaatctgcatatttacaaacagccggtggctacgtctgtggaaattctgcctggctgggagaatgataacaatgttttcattcagaatctggagacagtatatttcgataaccttcgggctaaagtgaaaatggacgatggaacagaagagatcctttatcttggagagacagatcagtacaataagcatcttgatggatggctttatctccggaaggaagatggaacattggaaaccagtccgattccttatgataataggtggtctgtttctacaggagattacattcttaaattaggctatggcgagaaaatgtcagagcagggcattcctgtaaaaattctttcactgaaggattctggtgcgcctgttcttgaaacagatcaggtacagacaggctctgcagcttcaaaccgtctgttgtatcagttcaccccaggtgcttcaggtgtgtatgaactggaagtgaatacagatgcttcgttgactgtgtatgatgaagatggtaagtatttaatcaattcaaataatgaagcttctgatatggcctttaaccttgaagctggtaaaacttatttctttagtctgtacacaaataatgaatatggcccggatgtacagctgtgcatcaaaaaaaatgagctgcctgtaaagcttgaaacaacattgctggaggatgtgacttatattccaggtatggacagctattcagatgtaagactgcagacagtggctatatatgaagatggccgaagagaaaaggtaaaggcgtatgatcagatcgccggttgcaatgtgtattacagtgttttgtcagaatcagggaaagagatggattttgatgagaccatgaaaaagggtacttatacaatcacaccggttcttacgaaagataaccaaaatctgcagatagctgctgcaggtgtgcaggtgaaagcagaaaagccgcaggttacagaaacattgattctcggacagtggacagatgtaaaagaaacctatcgtcacctgtaccgattcactgctgctaaagatgctacttatcagattcagacagaagagggtgctgacgcaagcttttaccgggaaatgagcagccggttcaagaaaaaaggacagacctatcagatggatgaaggggaaatctgtattgttgcagtcagtgcctacaaggattccaggatccgcatagtggaaatgtctgaggagaatcctggacagccaggtgctgacggagaaatcactttaacagatggttttaggcaggaagttaccataaaagctggaggtgaacagatttttgttttcactccaacggtcagtggggattaccggataaaatcagaaggtggatcggacactaaggtagtgttatattcagatgagaatcagcttggtgaggacgatgactccgggtctgaatctaatttttcattgaaagcttctcttgaagccggcaagacctatcgctatatagttgacttatatcacaaggatgaaagcggaaccactactgtatgcttcggttttgttcagaataaggatatccgcaaattagagctggtattgaaagagggattttccgacgcaaatattacaatatttaccaaccctttggggacttacagtcttaaggttacttatcaggatggaagcgaaaaaataatagaagatgattattatcctaccctgaaagatgactatggaaatgaaataaaagtggaggcttcatccgaaatggacggcgatcctgaaacgaatgaagtgttttttgtatatgatctgatgtataagaaagaggatggcaggacctggaagagcagcacaaacgggaagataccttgtgggagcatatcagatatagaggctcttcagatcggcaccccgaaaacaacttccttacagtcaggccaggaatgtttatacagatttacagttcctgaggatggcaattattttattcattttgattccgggaatgatgagcttttcctgaatactgagtttggttcctattacacatattttcaactgggacagtgggatgttcgtctaaatcccatcaggaaagacaatagtggacttgtatcgctgaaaaagggagtttcttaccttgtttatcttggaaatcatggtgaagagcctgccaatgcattctcattctatatagcaaaggcagacgaactaacatctgtagagttgaaaaaagctccggataatccttttgtatatccaaatgcggatgatagtatttctcttgatggaatggtgatcactgcccattatgcagatggaagcagcaaagatattttacagggtgagacggatccggcaggccggtatgtgcgtgtcctgtactggaaatggattgggaatgatacccttcgtgttttctttgcatttggcagctgcagaagctttgttgacctgaaagcagcttctacagaacagctcccggtacttaaaaccggagaaaccatccaggtgcctgcagccggcaaccagctcactgcatttcgatatacaccggaggaaagcggtttttattcctttgatatggatcaggatgactggatcaaggttgtagaagaagaaacaggcaaaaaagtgaaggagcttaatggctactatttggaagccggaacttcctatcaggtttatacgcgcacaaggtatggtgatgacactattactgtactgcgtggtgtgtgccagtgggcagaagagactgagatcagtgctacctgtacaacaaatggcagcattacttacagatgtaacgttcacaatcacacaaaaacctatcagacacaggaagcatatggacataactttggagaatgggtcactgtaaaggaagcaggctgcgaaacagaaggacagcagcagcgaagctgcacaagatgccatatcgttgagactagagcacttccagctaagggacagcacagtttcggagaatgggtcactgtaaaggaagcaggctgcgaaacagaaggacagcagcagcgaagctgcacaagatgccacatcgttgagaccagagcacttccggcaaaaggacagcacagcttcggagaatggatcattacaaaagatccgactgttctggagacaggagtaaaggagcgtatctgctcccagtgcaaaaagaaagagttagcttccatagagaaactgacaggtacgatttcactgagcgtgaaaggcactatcccgctgaaagtaaaacagtcctacaaagtgaaggttaccatgggcaagggagacaaagttgtttcctggaagtccagcaatggaaaagcagtttctgtgaaaaatggagtgatcaaaggccgaaaagcagggaaaaaggctaccatcactgtacttcttaagagtggtaaaaaagcaagctttaaagtaaaagtacaaaaaactacggttaagaccaaaaagctgacagttacaaatgcagtgacaaagaaaaaggttggaaagacggttaccctgaaaaaaggaaaaaccttaaagctggcagctgcagcagcacctgttacaagtcagcagaagataacttatacatcttctgataagaagatcgcatcggttacaaagaaaggccagatcaaagccagaaagaaaggaaaggcaacgatcacagtcaaatccggtgcaaaaacatatcgaatcaagatcaatgtaaaataacctgcaaaagaaagggaagaggcttctggcttcttcccttttcatatatgtctgattttgatgctataaaaattgactataatcatatttttgaaagactttgcatttcatgaggctgattcttaattgacaatcctcacaccgaatagtaaaattagcttaataaaaaaaggagcggaagcgaggaaaaaagaaggtttttacctgttttgaccaggagaagacaggtggaggaagatatataaaaggagcgtatgaatatgaaaaacagccattggagatcttttaaaaaatggatgtcctggtttttggtatttgcaatcgcaatgggaagccagggcaccggtttgtctgctgccacgtttgattatggacaagactatggatatcagcaggaagaagtcttatctgcagatcaatcttacagcagtgaggatgtacagatagaggacgtaccggcacagggcagtgaggctgacacatctcaggtagaggatacaggggcgccagacagcgaggctgacacatcccagatagaggatacagcggtgccagatcgtgaggctgatccatcccagatggaggatacagcggtaccagatcgtgatactgatccatcccagatggaggatgcagtggcacaggacagtgagactgatccatctcagatagaagatgttttcacggacggggaaagtgtgattactgacagtaatgaagaaacggcagataccactcttctggatgctcctgcagatgcacaggaaggcaccattcagtatctgatcgaagaagcaaggaaggcaggctctacaacacttaccttaagccttggggaaaactttccggatacagtagaagagaatcttctgatccctcacgggatggatgttgtactggatctgaatgggcatacgctgactgtggataagacgtcagcagaggatggtaaggataccaataatattactgtatacggacagcttaccctgcagaatggtaccttatccggcagtgcctcttctcttggcaacgagaatgcaagaggcgtatttgtatgctatggcggccgtctggtccttggaaagggagcagaaatctccagctatgctgcagcaggccggggcggcggtgtgtatgtaaatgaaggagccagtctgtctatagaaggcggtatgatccgtgggaacagctccggtatcagcggcggcggtatatggatctatcatgcaagtgatctttcctatcagagcggcgtcatcaccgggaacagtgctgcgcttaatgggggtggtgtgtacatacagtcttatgactataaaacaagtacctttggcagcgggatttccattacagagaatcatgcagatcagaatgggggaggcatttatatccatagtgtgtctgatgtggaaaatgaatggatctttgatggcctgattgtttcaaataatactgccgatatgagaggcggtggtgttcatgttcaggctccgattcatttcacaatggtgtccggaatggtatcccacaatcaggcagtgtcctatggcggcggtatgtatttttacagtactgacaagacccggtcatctgtcagccttatgggcggcactattcaggaaaattcactgaccgatgagaacattaattatcagtggggcgacgcccattatggaggcggcgtgtggatcggcaattatgcaaatgtggtcctttccggagtacagatcctgaataataagaccattggcaccggcggcggtgttgccatgggagcttactgtaaggtacagatccaggagggaaccctgataaatggcaataaagccagcttttatggcggcggcatatatggagatggagccaatgttgtgatgaccggcggtgagatttctgataaccaggctcagggaagcacttacggctggggcggcggactttatttaggaaacggcaaactgaccgccagcagcggtaagatctgcaggaatgcagcagatcatggaggcggcggatatatttcaacggcgatcctttccggagatgtgatcatttctgataatcaggtaaagggaaatggtggcggtatctatggaaatgttaccatgtctgagcaggccagggtcgaaggaaataaagctgacagtataggcggtggtgttaacggctctctggttatgaatggcggtatcttacatggcaacagggccggcggcaatggaggcggcggagcctatgggactgtaaccttgaatgaaggggaaatctccggcaacaatacttccggagtaggcggcgcagtacgaggcaccctttacatgaagggcggagtgatcaaagataatactaccagcagcagcggcggcgttttatttggtgccggtaccatttccggcggtgagatcactaacaatcaggcaggcagtaacggtggtgttgtatatcttagtgaaaataacaggcatctgaccattacaggagatgtaaagatctataacaatcgtgccaattatggtggtgctgtaagtttagctggcggtactgtccagatcagcggcggtgagatcagtcataatcaggcgtatatttatggcggtggtgtttatgtatggactttcaataccttaaatccggagatcatcatagagaaaggggccgtgatttctgataatcaggcaccggggtcaggtactattccaggcggacaggatctgtatgtggcggccaccctgaaggtgaataataacggcaagtttacttattttactcctgttgtcagtctggctgcagcagaccagctgaaatcacaggatggaacaccgggaattgcctggtatgatgaaactacggatgaaagaaatacccaggggctggaactggatactacagagcggacaaaggtttaccgttatacctttctttactctgagcctgaaacagagatggtggcaagactggatgatttggcagaatttcctactgttcaggcggcggtagatgcagccggggatggacagcttcacaggatcactcttttaaaagaggataaagaggcagtgacgatcccaaagggagccagggtctgctttgacctgaatgggaataccatccggggaagcgggaagacgaatactcctgtgtttacagttaaaggagaaatgaccctggaagatacaagtgaagaccagaccggatgtattaccggaggtgtatcggctcggtatggctttggaggaggcatctttgtccaggatggaagcctggtcatgaacagcgggactttgaaggcaaatggcagcggaagtgttttagtaatggacagggacagctcttttgtgatgaatggaggcctgatcacgaaaaacacacagtctgcggtagctgttaatgccggatcctttacaatgacaggaggaaagatcaccgggaacagtgctaaccagggcacaggcgtttatggctgggctggtgcaaaggttcgtatagaaggcggagagatcatcggaaatagtggtaatcagggcgcaggcctttatgtacaaggcaggctggacattaccggaggcaggatctgtgataacaaagcaagtaattacggaggcggcatctatctgtggaatggcacctgcaatatgtccggtggtgagatctccggcaatacaaccaccaatgccaatgtaaactggggaggaggcggcatttatctgtcaagttctaccctgaaagtgacaggtggatccatcacagggaataccaccggcagtgtaggtggcggtatccgtgtaggtgcaggcagtactgcttctgtgacaggcggagttgtgtatggcaatcagtgctcgcttgataaaagtgatatatatgcagcaaaaggggcaggtcttaccctgatgccggcttcgtctatggagccgggagattataattgctggtatgattgtgaaaattatcaggcatacacggaagctgttacatcctccagtctggaacagaattgtcacttttatgccctgtacatggaggagccatatttagaggcagtggctcagatcctggatgaaaacggagccggacagaattatccatctgttcaggatgcagtaaatgcagccacacagggacagaggatttatcttctcagagattgtgaagaaagtgtccagattggaaaggacaaggatgtgatcctggacttaaatggatacaccttatgttcttcacgggaaaatgtgcttaatataagaggaaagctggtagtagacagtaccacaggtcatcctgacactaatccggaacagaaccagggcggcaggatccagtcggcagagggtgttaccggcaacagaggtgtctttgtcagagaaggaggagcctttaccttaaaggaaggtgtgatcacaggcttctccggcgtaaaatatggcggtggcatttatgcagaccagaatgcttccgttaccatcagcgggggagagatcactggaaaccaggctgtttatggcggcggtataggattttacagtatcagtgccaatgccccttcttcctttaccatgacaggtggaaagatctgtaataatcaggccgaaaagaatggtggcggagtgtatatgggaaggccctttaaccttgccaaccagatcctgatatcaggcggtgagatctgtgagaatacagccggcagccatggcggcggcgtaagtgctgattttacatcaggaacagatacagcctcaaagttcagcattaccggcggtaagatccatcataacacagcggaaacagacggagccggtgtttatatccagaattgcaagacagtcgtgatcggaccggatctggaagtttcctataatgttggaaaaggatacggtggcggcatccataccacatctgtaggggaagtaaccgtagagaatattaatgcccaccataaccgggccaaaagcggtggcggtctgtccttaagcgcaggagaggtgctggtaaaggactgcaaggtccatgataacagtacaagacaatacggaaacagcagttacagcggaggcgccagtctttacggtaccagaaagctggaagtccaaaaaggtgaattctggttaaatggagcatatcacggtggcggcctgggtattggcgcaggcacagccggacagacggtcatcgggaaagaggtatatatccatgataataaggcaagccttggtgggggtcttaggatcgatacagtaggaaagcttacattaaatggtcggatcgaaaacaatagcgccactcacggcggtggaatcagagtggcaaccacatcttctgagcttcattttgcagatgtgttggtacagaacaataaagctgctactggtggctatggcggcggtgttttcttcgactcaggtacagcctccaaggtgtatatagaggatcaggcccggatcattacgaatactggaggttatggcggcggtatcgctttatttacaggatatgaaatgtatctgaccggcggacggatcgcaggcaatcaagcaagtaatggcggtggtatttggacccggctgtcacagctgatcttgtcaggcggtgtgatcgaagataatatagcatcaaataccggcggcggtatctacatagacggcagaagagactggtctacacgaaaggtacagatcacaagaaatgtgcagatcatccataacaaggcaccccaaggtggcggtgtgggagttggtgaaaatacagcccttaccatggacggaggcctgaccagtaataacaaggcaacctatggtggcggcatatgggtttcagcagtgatgggacaatttgtaataaagaagtcagcagaaaccggaagcacaggcaagctgtatggaaaccaggccggttacggcagggatgtttacggaaactatgataaatcctataagaattctaaaatccagctgtttgcagctgcagatatgtttggggctgatgaggataaaaagggtaactgctggtataatgaaacgaaaaagttggccataacagatccgattgagtatgatccggtaaccagggcctgctgccttactcttcaatatgattcactggagtttgtggcaaagattgaaaaggaagctggtacttatgaagcatacacatctcttcagcaggctgttaatgctgtaaaagaaggaaagtaccaggatgcggtgccggagatttaccttatcaaggatattaatgaaagcattcagatcccaggtggcgtaagtgcagtgctgaacctgaatgggcacaagctgcagggcacggacactgccatcacctgttccggtgatcttaggatcgtggatgagaagaccgaaggactggatccgggagaagcgacaggaaccatctcaggaagcacaagaaagctggggggcggtattctggtattgtccggcggctatgtgactatggagagcggacagatcagcatgtgctcagcacctaccaatcaaagcaattgcggcggtgcaggcgtggcggtcagcggcggtacctttatcctggataacacagcttccattaatgaatgcagtgctgcttatggagcggctgtttatgtaggagcaggaagcagtctttttgaaatgcggggaggaaccgtctacaacaatgctgtgcagaattattgggaatgtggcgttatttacaatgccggcggtactgtctggatcagcggaggaaagatcacagacaatgtgatatctggcaacggtatcatttatctgtccagcggtaaatgcgttttggaaggcggcgagatcaccggaaatagagcaagatacggcggcggtgtttatataagaagtgcagccaatgtatggatgagtaatactcagatttccaataatcaggcgacgataaatggtggtgctatttataatgaaggccagctgaatatttttgaaggtaccaagattaccgggaaccaggcagtaatgggtggtgctatttaccagatcaccggaaaaatcaagatggcaggcggcactgtcaccggtaatcaggcggagaagggcggcggccttgcacagaatccccaggcggcaaatgcaggcagctttgtcctgtcaggaggactgctgtgtgaaaataaatccacgattgacggaaccggaaatgatatttattccctttatgagggaactggaaattacgaaaatgtaagtgtaagccagaagccggctgtcacactgatccaggcagcagccatgaaagaggacaacggcaatgccgcaaagtataatgcgtggagaaatgatgcttacagggggaaccagctggaaggcacagatgtgaccaatggttattatattactggcggtatcgaccagagcaataacctgaagctgacagctgttacgtataaggaagcagaagtcaaaggcccggcaagcacggtaaaggtagattccattacggtaatgactaccaacagcaaagacggtacttcggatggcggcggtgcttttgacacggaatgtgccggagatgaaaagacagcccagcagcttctggaggaaggtgacagccagacaacagaagcgccggaagaggttacagagggcgaaacagaagaagaaacggctcagcgtcatcactatctgtataatggccagatcctgaagatgatctgccataatggcaagtggtatgagagggaccaggcagttctgtggagtccgggaaatgacagctcctataccaatgggatcgtgagaagctttgatactgtcaaatatgatctttgttttaccctgcaagataccgggaaagacggagaggatgaagaagggcaggaaggaaattctcctgtaacagatgaaaccttacagctatgggtggaaatgaaactgccggtggatagcagccgtgcttctttctacgacatgaacatgaagtattattatatttatgagaagaagcaggcagatggaagctatgctcagtatttaagaggttactgggagctggaagaaaataaagggggaacggtttaccgcagcctggccatcagtgtgaagggcatgaataacggagatctgattaagccttcctttaccgcatgggtaggcggaaatgaggagaatgaacagaatccaaaatcctgcaactcaaaaacactgaccgtatcagcggcaccaagatataatgtgcttcttaagagaaactcccagcttgcctataccagctactttgatacggaaagcggtgaggaaaccacagaggaagaagttaagaaacttcaggatgcaggcggggatacctcccacatcgtctatggtaccatgcttggatacggcattaccctgcagatgtacaataataag

SEQ ID NO: 61 - DNA, 63055 bp, Unknown
  gut microbiota DNA sequence
gcggggacttcaggtgcctaccggggatatccagtttgatgtaagctttggcggggaactggtgatgaatggctccacacttggagagaactctgccccttatgcatgggcttataaggccaatgaaaacggagagacggggatcagctttaaagacgaggaaaatacagtcaatgttgactggaatgatgaggatgattataccaagactaccacgtatggctgggatgcagctccctataatacagggaacagcgctaccggctgctacagcggcggcttctggaagggagcgttaaagcagcgaaatgaaacaggcgacaaacgccttactcttcatttttcagtcagcaattattcggtagcgtcctcctgtccttctgctacagccaatggttcctgggataaccaggtaagggggaacggatatattaactccttctctgccggatatgtacaggtgctgtatccattagataaaaccatcgttgatggacagagcggctatctggaaatcaatatggagtgtgctgcttctgacctgaatatcagcagcgttacagggcttactcccgagtcaacagaaaaaggtctggacgtaatggaaagcttctttggggaagactataagagccatgcagtccatgagatgacttatctggataattacctgaaccacagcacaggcttatatatatacggtggggatggaaacggagaccatctgtcgaagaataattacttcagcaaggagaccggcacggatctgatcagcacccaggaaggcacaggctccactccgctgggaagtcaggtatacattgatgcagatgtgtcttttacaagcagggaatattatacagatgatgagaaggatccacattacataccgcctgataagtttgacccgcaggtggacaatctgctggaatacaattatcttaccggagtgaatcttctccagaagtttgactcggatgcctatacacctgcctgcggagaaaagatcattgacagacaggtgaaccagggagtaggaaatagctggacctgggtagggaaaagtgcggggaccaacagcaccaatgcttttctggtaggcacttcggagtcggcaaccacctggtcatcctcaggaaatctgaaaacaaaaagctttaagctgaccgtactatacggtgcgaagccggacggaactaactggacgaagacagaaacagcagatgggcttaccggtggggaagcagatatggatgcccacaaagaagaggatctgatctactttacttccctggatgaattaaaggcatactttgccaccaaagggaacccggacggaagatgtgtggcacttttgtacgaggtacgggactgctgtatccgtacaggcagaagcctgtatatcagaagcaggatgcagatgacaaaagactttgctaagacaggcggcacctactgtaccaccaatgatgtaagaggatggaccacataccgtcctacctataagcgatactacaatgatggaaagcgggatgccatcctgttttccgcaacctggcgaagcagatcatacgatactaaaggcaacattgctgcctacggaaatggcggttcaggcggtacgcttccagaggggtatgtaaatagcctgacggaaagccaggacctggtaatgaaatataccaaacaaagatgcgacttttattttgatgggtataagaaaacagaatatcaaaatggtgttaagaaaaacggaacccatatgatgggatggttggcaggaaattcactgcttctatataccctggtcagtggaatcggcattaagaatacagacctgatcaaaggctctaaccgggaaaaaacctattataatgtaaccaacggtgagcgtacagcaaactttatgataatgccaaggctgcagatctccagtgctacaaaggaccatgaactggtagcaaatggaagccaggcaacggatgtggccattaccctgaccatccccaaagatcttcactaccataagggcagcctgcagtttgactacacggctcccggaaaccagtgtaaatacaaagccggcgatctggcatgggatgtaaaacagacggataacccagatgggacgaccacactgactatctgtacaactgtaagtgatatcaacaaaggacttccttacatccggtataactgtaccatcgggaaaaaaggagcagatgaggatgaggatgtaaagaacaaccaacagcttactaccaaggtacagatccataccacctatgaagagatcaaccgtattaccggacaggccaatagtgcagagcagaccatcgttgcaacaaggacaaaagatgatgtgatctacaaggaaacagaacgggatctgatagagatcggggaggatttggtttattacctgaattacagcaatcatacagacaactctgagaagatccagctgtgtgatatctttccagccaatggagacggaagagacagcagcttccaaggaggctaccgggtaaaggagatttatttggactttaccagcgaagaagacaggaatgcattccaaagtggcagtgcaggacagctgaaatacaggaaaggtgggatcagtgcaaaggatcttacccaggaggaaaggactctgatattgaataccattgacagtggtaaatggtttgatctggcttcttcttatgaaccatctgaacacatggaaaatggtgtgaaaatctacagactgacctgcaaagcaggtacagacggacagtgggcaagtggagaagagctgatccattatgcagatggttccggcacaattgatgctatttacggatttgttcctgcagtaggcggaaaaggcaatttccggatgggactgatccttacaccctttaagaaggacaatgcaacactgctgcagaacagaaatgtgacccagcagggcggtaatgtatataacaacagtttcttctacagaagcggcggtcctggcagccagtcactaactgttgtcagtcctcaggtagggatccgcacggcaaagcgtaagattgcaggccttgtatggctggatcaggaccagaacgggaattaccgcccggccatcaatggttacagcaccacagaccggctgctttccaaggtggatgtatatctttatcaggataagaaacctgtatcctccaggatcaaggagaatccggatggaagctttagtcaggtgattggcggcaaaacacggactatgagcgccaccactgtggatggcaagaccttatatccggctgtggatgtgatgggcaaccttctggataaggtggtcaccggaaatgatggggcatatgcttttgagaatctggctaagggcagctattacatagtgcttcaggatgatggtgatgattatgctgttacaggaggaaccagggttcttccctttgaaagactgagcgtcacaccagaaagagaggatacccaaaagacattgacccagccgggaagggatacagataaagcccttccggaataccagggcacagataccacggatcagggggcagcagccatgaaacgtactgcgatcgtcaacaatggcagcggcattacccttcctgggcttaccgatatggtatcctgggagtatgtgaccaatcattgggactgcggtttgtattatctggatctttccttagaaaagaactgggcgcagaccaccagcatcccggatcaggcatccgtcctgtttgaaataacaggcgctaccggaaccggagaagatgcagtaagttacccggctgctacttacactgcgaagattgcttccggcagggtaacagcacaggcagagggaatggcaaggccttacagcaagacagagggggcgcctcagaagatccagacagcggtgtcagcatcccaggataaaggaaacaagaccatgcgctggctgatccagaaacagccgctgcaggcagaaggcgcaaaaggtgtgatcctttatcgcattgaagagaaggccaaagacagggaaggcaatcctctttccggctttgtaatgaccagcagcacagatactacagcagaggatcagaccagaaagtttgctgtatggaacacccagatcaattatgagatctgtctaggcaagaaagacagtgaaggggagcctctttccaatgcagtatttaccttgtataaagatcaggactgcagggtgcctgccgggatcactatgaagacggaccagcagggaaatggcactatcacaggtctggaggcaggcacaggggctgtgtattatataaaagaaacaaaagcccccagcggatatttcctgaataaaggaatcctgaagctgaccattgcttacgaagacaagacaaaatattatgatccaaccatttctctggaaaggatcacagatgaaacaacaggatatctactggatccggctgctgatcgggataaaatgtccatttcgtgcacggtggatgctggtggaaaagacccggattcactggtacctgaggtacctttgaaatatagtatttcctttgaacttacagattcctgcatttattcgctgcctaagaccggcggacggggcatctggtgggaaatgctttttggaacaggcttgatgcttgtcgcagtgtatctgtatagcaaaaaaaggagaaatgcctgtagccgcaataaataaagaagcttacctgaacgatatgcttgcctgatggtgatgtcactaggtatggaaagtattgatgatatcgcattccccttatttcacttgttgtaaattgacaagagaaataaggggaaatgatgatttggaggaatttttctatggattacgtaaaagaagcgaaagaacttggcttctcaaatgcagcgatcatggatacgcaaaagcttatttttaaaccagagtatcggagattttgtgaagaaaatcaatgtggatgttacaatgtgaatcctgcctgtccgcctgaaagcggaactgtagaaactatgaaacaaagagcattaacctatgaaaaaactcttattttgcagaccatacaaagcagacattctgattacaaaaaggcgaaatttgctcacaataagcttactgagcagctggcatccaaaatagaggaatccggaaacagggatcttctgatcatgtccgccggtccctataagcatcactcctgcatgtccgcctactgtattgatgcacaggaaatggctgatgcggtaggaatgatctgctggggaaacgatgataaaatacgttatttttcacaaattctttttcatgttaaagcgagagaaacagtagactttttttgatttcttaatctggagcatgtcactttcattatacaacacacggaatcaaagtatctttattttatataaaatcacgaacttgctcatttataaataaacaggaggacggaaaaatgaaaaacagatggaacaaagacaacagactgctgactatatgtatggtattattgatggcattcgttatgacctttacagtagcagaaacaacagagaatgtacaggcagcatccagcggactcagtgcatataaaaagatatctttttataaaagcaacaaagtcaatggaacaacttattctatgaagtacaacagcagaactaatcgctatattgtatatgcgacaaaaaacggtaaaaagaaagtagttcttaaaaactgttcaagcggcaccattgtaacaaatggaaaatttttttattacgaaagtgcggcatttgtaagaagcggaaattttggaggaacctacagaaagcgtacattgatgcagtacaatctaaaaaccggcacaaacaaagtactgataagcttcggaggggaaggccctgtggacagtattattggttgcgatggtacttatctttatatgggatatgagacccagtatggtgatggtatgggaaattttgcagtagtaaatctggagacaagacagataaagcgcctcaaaaaagattgttcaacagtccagaaagtaaagaataaagttctggtaaccgcagtaggattcccccatggcggtccggtttatctgataaatagagacggaagcaaatgcaaaacaatttgtggaagagctattaaagtatctgtaaaaggaaattacatttattatacagaagcaacctataactggaaaacaagaaagtgtagatacgatctcaacggaaataaaaagaaagcccttactgcatggagtagaggaattgctggatgagaattatcagtcctgagattgaaaagtgtagtaaatacaagcttaaatggtttgcctgctgtatagtagagatattaaagtcacagtgtggatcaagaaagatggttttctgtattatgcagtgataagacaattactcggggtgttttcatgaaaaagagaatttctaaagtatttatagttcttcttattattgtttcgggatttatggagataagctggcgcctcttccatatgatgatttgctgtaaacggggcgctcccaagaaagaaaggaagaaatggtttgaactgtcgcacatcagggaaaaccatcctcagaatggatacgagaaggaataccatgagagtaaagaatggtgctttgcccagaagatggaggactgctatatcagaagtgtggatgggttaaagctgcatgggttttacctgccggccgaaaatccaaaacggtttgttatattaagccatggatatcgtggcagtcgatttggcactatgtcatttatggcaaaataccttcatgaacatcaatgtgatcttctgtttatggaacaacgctgttgcggtgacagtgagggaaaatatattacctttggtgcaatggagcagtgggatgttcagcgttgggcaatctatgtatctaaacgaaacaagaaaaagcttcccatttatttatatgggcagtctatgggggcgtcagctgtgctgatggcatctgcacacacactgccttcggaagtgaaaggcctgattgctgactgcggcttccattccatgaaaggacaaatgaaggacatggcggtgcactggtttcatcttcatcatgttcctttgctattaatgcagatggattggctttgcagcacactggccggatttcatatgaaggatgcagatactacagcagcaatgcagacgaataccataccggttctattttatcacggagataaggatacctatgtttatccgcacaattcatttcagaactataggttatgcaaggctccgaaagagcttgtggttgtgcctggggcacggcatttgtgctgtgcctatgcagaccccaggctatatcagaatacaatgatgcatttttttgagaaatacgattaacagcataacaattcttttgaccgggatttatcaaacattttacaaaaaactgtttgataaatcccggtcaattttttgtaaagtgttcattaagtctgggggatactggtatttccctgaaatatatgctatttttcatctggagcaaaaatgtaatgtttataacaggaaggattgattaagaatgagagattactatccgttaacggctgctcagaagatgcatcataactggatcagggactatggtacacagcaggtatccggtgtcagtgttgtggcttctgtacaggctgaattggattttggattattaaaaaagtgtatccagatggaaacagagcgttcaggatgcacccgggtgcattttacaaaaccggatcaagacggaaatgtgaaacagtatattgtaaaacaggatacgcgtgacattgaactgaaggatctgtccaaaatggaaaaccttgcaaaagctgatgaattgatgcagcaatgggcatatgaaacctttgatggcgataatattcccatgtgtgagttcactatgttgaagctgccggaaggatacaatggcttttttgtacatatggatcaccgactgattgattcctgtggacttgtagtaatgatcggggatctgtttcagctttatacctattacaggtacggaacagcgcatccacaggaattggctgattttgaaacagtactgaagaaagatctggcaaaagccggcaatgaaaagcgttttgcaaaagacaaaaaattctgggaggatcagctggatgctttgggagagccgctgtattctgatattcagggaccatctgtactggagattgccagaaagcggcatggaaatccgaaacttcgatccgcagatattgaaatggataatttatttgtagcagttaaggattatcatctggagccggggccaactcagaatttgattgatttctgtatgaatcatcagctttccatgacaaatcttcttctgcttggtattcgtacttatctgtctaaggttaataatggacaggaggatattaccatccagaattttatatccagacgttctacccatgaagagtggacctctggcggaagcaggacgattatgtttccgtgcagaacggtgatctcatctgaaacagattttctttctgctgcttatgaaatccagaatacacagaaccgtatttatatgcatagcaattacgatcctgaacttattatggaagaactgcgaaaaagatatcatacaccggagcataccagttatgaaagcttctatctgacttatcagccaatgccggtaaaggtagaaaatgaaatgttgggagttgtccgccagcatgccaaatggtttgccaatggtgcagcaaccaagaaaatatatttgaccgtatcccatacagaggatggtggaatgaatttttcctatcattatcaaacagcacacctggaagaacatgatatggaacttctctattattatatgatgcggattttatttaaaggaattgcagaaccggatatgagtcttggtgaaatcatggaacaagtctgaaaggtattttgatgactgtctgaataatataaaaagcatttgacaaggcaaaaatataaaaggcatttggcaggacaaattggaaatcaaaaaatgtaacaggattgttacgtaacaggaggatagatgagaatgaatcaggaaatggaatttaaaaatatcgtggcacagtacagcaatgtggcaccagaagaaataacaaataatatgagattccgtgaggatttgggattcagctctttggattttatgtcttttttaggtgaacttgaggacacatttgatattgagcttgaagagagcgaagtaatgaaaatcgtaaccattggagaagcacttgaattacttgataactttcagtaggaagaggtgtagatcagcacctgtttaaaacaggcactagggagaaaatggatatgctggttagagatatattagaagaaagtgtacagaaatttggaaaagtcaatgctgtaaaatggcttaacaggaaagagatttcagagagaagctattatgaaatgatgaaaaatgcagtttctgtgagaaaaggtcttcttgcagagggctttgagggaaaacatattgcattgattggtaccagttccgtagagtggatcgagagctatattggaattattacagggtgtactacagcagtgccgcttgatgcagcgctgccctgggaggatctggtggagctgatcaatcgctccgattccgcagctctttttttaagtccgaagcacagaccctatcttcaggcttttctggaaaattgtccaggtcttcagaagatatggatgcttcaggaaaaagtggaggatgcaccggaaaaagtatacagtatcagtgaacttcggaatgcaggaaataatgcgtctgcagatgctgtctgtccggataaagaggatattgcgacaattatttttacttcaggaacaactggaaaaagtaaaggagttatgttgacccagaataatctggcttccaatgttgaggctgtaaaaatttcagcagaaccgggtactgtgatgcttagtgtactccctattcatcatgccttctgccttgtgatggactggctgaagggcttttcccagggggcaactatttgtatcaatgattctctgcttcacatggtgaggaatatgagcatttttgaaccagacattatgcttatggtaccgatgatgattgaaacgatttataagagattggctgcttctgacccgtcaatacccaaaaaggttcttgcagagaaagtatttgggaaaaacctgcgtacgatatttaccggtggcgcacacctggacccatattatattgactgctttgcacaatacggtattcagatactggaagggtatggaatgtccgaatgctctcctgttatcagcaacaatacaccggaaaaccataagccgggttctattggacggcctcttgaaaacgtggaggtcaggtttgacaatggggagattctggtgcgtggaacaagtgttatgaagggctactatcaaatgccggaggaaaccaaggaggctcttaaggatggctggctgcatacaggagacaaaggatatatggatgaggatggttatttattcattaacggaagggtgaaaaacctgatcatcctgtcaaatggtgaaaatgtttctccggaagagattgaaaataaacttgccctgaatcctcttgtaggcgaagtgatcgtgacgggtgagaagaatggactgacagcccggatctatccggagcaggcagttgtagaagcgaaggcattggatgcagattctgttcaaagactgcttcagtcatttttggatgggtacaatcaaaatcagccaacctatcgccagattacagggttggttgtcaggaaaaatccatttatccgtaacacaacgaaaaaaatcaggagacaggatgttctgatcgatgaacctcttgcataataaaaaaggctttctgtgcagcttacagaaggcctttttaatgtcctaggacaaaagaggaagcatgccggataaaaaaacctgggacaaaatatctgcgatggcttctggctccagatcgaactgatccctggcccatttgtgcaggactccaaccgtgcttccgatagcacaggtgatcacataagaaatttcttcccttgtgtgttcatttgggctggaattggatgttgtatccgtcacatagtgatggagcatagtcagcattttttcaaacagatcattgccatgaggtgtgctcagaagtcctgcaagaaaaggattttctatagtgtaccgacagattgaaagaaaataggagcgacagatatccaggtcattccgaggatggaatttctccatcatggaaaaaacatcatggatcgttttctcttcgacagcagctaccagcgaggggatatcctgataatgattataaaaggtgcttctggcaatacctgcagctttgatgatgtcagatactgtgattttgtcaggggctttttcacgcgacagtttaaaaaaagcacctaagatcgcttcatcagccacattatatctttcgtcagaatcctgcttctgcatgggtaaacactccctctctctttcaattgtttaaataagaatgattactaatttagaagaattataaaacaccttaaagtacttgtcaatagcagctgttacaagtaaagaaatgccagttaagagaagagtttttatgtatggaatatcgatccgaatatgaaagttcgtgtgatacttgatttccaggttttcaatgcagatttgcccctactattcagaaactgaatgacaacagtaatagcaatgctatactatgttcatacgagaaataaattaccctattgtgtgacagggagaatacaaatataaatgtattgatctggctgcatataaagaaggatgtgagttggctgaaacactgtccgtgttggagattaatgcaaaaggagattacgaagatttttgtggtgaacctcttggcatatacggtccatattactatagcgaaacttttgatgatgaattgaatttcgcacgagatgcatataaacttcttagcatataatttctgtcaaaaacttatcattgaaattaatccattagcaaagtccatgcacctggagccaaggaagttttggtagcatattacggaatatagaatatctactgaagaaaaagacactcttgtggctgccgtggcaaacgaattaaaaaatattctggcaaaatcaagttaaaatatacctatgctcaaaagattctcttgaccgcgatatatatcacggtatatactattcatagaagaggaggtgctttactatgatgacagcaaaattatttaaaaatggcagaagtcaggctgtgaggcttcctaaagaatgccagtttgcaggagacgaagtggctgtaaataagattggagatattgttatcttaatgccacaaaataataaatggtctggttttttaagcagctttgatatgttctcaaatgattttatggaagagggaagggaacagccaaaagaacaggagcgagaatctttatgaagtatatgctggatacaaatatttgtatttatgcaataaaaaataaaccgccagaagtaattcgtaattttctacgtcatgatccggatgatatgtgtatttcttctatcacatatggagagctgatgcatggtgttgaaaaaagccaggcagtagagaagaatcgaattgcaatgtcactttttctatccccaattaccattttggattttgatagctatgctgcagaagaatatgggaaaatccgggcagatctggaaagaaaaggaactccgattggaccattggatatgcagattgcaggtcatgcaaaatcagaagggcttacggtggtgactaataatacaagagagttttatagaattgagggattagcggtagaagattggactaaagaataaaacatgaaaagctgaaagctctgcttagtgcagggctttttccgccgataatcctccttgcactgtgatgaataatagttacactacaataataaaggaaaacgtaccgattttagcagaaaacgtataccgttaaatcagaatggacgtaccactgatttcagaataggcgtactgttcgagcaggttcgctacatagcactcattttaatgcgaaaatcctcatgatttttccgaataaaaattatatacttgaacttctaagcgtttctgtttataataaaaacactgttaatggtcctgttttccggtatcaaaatagtctcacgcatttccagatgctgaggttatttttttgcttgaaaatagaaaaagtgaccaaatgcatttttagccaaaaaacaggcttaaaagtgcccctctgtttttccggtttttcgacctgacagacagatctttgagtcctaaaacgcatattacagaaatctgaatttcctagaaattcattgccttattgttgtatatgcacaattatcgaaaggaatagtatgagaaaattagcacttagtgacgaaatattgcttagtgttgacaaagcagcccgctatatcggcggagaagtcaactctgttatgaaaatggatgaggatgggaatattgatcccaacgtgaagatacgtgtggcatttgatttcccggatgtgtatgagattggaatgtccaatttaggtatgatgcttttgtacaacatgtttaatgagagggaagatgtatggtgtgagcgtgttttttctccatggatggacctggataaggtgatgcgtgagaaaaatattccgctgtttgcactggagtcccaggaccctatccgtcagttcgattttctgtgtattaccttaggatatgagatgtgctacaccaacgtattgcagaccctggacctgtctcatataccactgctggccaaagacagagatgattcatgtcccatcgttgtaggcggcggtgcatgtgcctacaatccagaaccactggctgccttttttgaccttttttatattggtgaaggtgaaacggtttatgatgcgttgtttgatgcatataaggcaaataaagctgcagggggatccagggaagactttttacttcttgcggcacagatccccgggatttatgttccggcattttatgatgtgacttatcatgaagatggcaccattgcttcctttgagccgaaccgggcggaagcacccagagtcattcagaagcagctgatcatagatatggaaaaaggctaccgctccattaaaaaaccggttgttccttttattaaagcaacacaggacagagtgacgttggaaatacaaagaggatgtatccgtggatgcagattctgtcaggctggaatgatctatcgaccaacccgtgagcgggatatccagactttgaaggattcagccagagagatgctggaaagcactggacatgaggagatttccttaagttctttaagctccagtgactattcacatcttccggagctggtgaatttcctgattgatgaatttaaagaaaagtgtgtgaatatttccctgccgtctcttaggatcgacgcatttgcactggatgttatgagtaaggtacaggacattaagaaaagcagtctgacatttgcccctgaagccggatcacaacgacttcgtaacgtgatcaataaaggacttacagaagagaatatcatgcagggggcagcagatgcctttcttggcggctggaataaagttaaattatatttcatgcttgggctgcctaccgagacagaagaagacatgaaagggatcgcacatcttgctgagaagattgcagaggaatattatgatctgattccaaaggaaaaacgccatggcaagattcagatcaacgtgagtacatctttctttgttcccaagccatttactccattccaatgggctggaatgtatacagagcaagattttattgacaaggcaaaagtagtaaaggacgagatccgtgcacagctgaatcagagaagtatccgttataactggcatgagccggatgtgactgtactggaaggctttcttgcaagaggagaccggcgtgcatcacaagtaatcctgaaagcatatgaaaagggtgcgatttatgatgcttggtctgaatcctttgattataatatatggaaggaagcttttgcagaaacaggagtcaatattgatttttatacattacgggagcgaagtactgatgaaatccttccctgggattttattgatgcaggtgttaagaagaaattcctgatccgcgaatgggagcaggcgcataaagaaattgtaacaccaaactgcaggcagaaatgttccggctgtggagccgctggttataaaggaggtgtgtgtgttgaaagtaagaattaagtttacaaaagaaggccctataaaatttgtaggtcatctggacaccatgcgctatttccagaaggcaatccgcagggcaggacttccggtggcattttccggtggatacagtcctcacatgattatgtcctttgccgcacctcttggggttggcgttgaaagcctgggggaatattttgatctggagcttacaaagaccattcctacttcccagatcagggatctgttagatgcccagatgacagagggcgtgcatgtgctcagtgcaagaaaagtggaagacggaaaagccgggaaagcaatgtctcttgtagctgccgctgattattatgtagtatttagagaaggaaaagagccgaagtgtgtatggcgtgagagaattcaggattttttggcacagcctgagatccttataacaaaggaaaccaaaaaaggcacaaaagaggtggatatccgtccatgtatttaccagatggagcagcaggaacaaggtatatttatgaaactggcatctgcaagttctaattacacaaaaccggaagccgtgatgaacagtttttgcagctggctgaaagaagaaatgtctgaatttccatggatggtcaaacgactggaagtatatgcagatcttggtagtgaagataaccatcgttttgttactttggaagcgttaggagaggaaattgagtaaacttattatcacccggatggaaataagcggaatttcctgcagtgtctgtattcttacagaagatcagaagatcatggagcttcagctggagcctgaaaacaggaaatctatcctggacaatatttatgttggacaggtggagaatgtggctgccaacattcaggctgcatttgtacggatcgcaccggatgtaagaggctatctttcgttggaagaagggaaaacagctattttcagcgcagggcgaactgcagataatcatccccttaagccaggtgatgagctgcttgtgcaggtaagcagggatgccatgaaaggaaaacttcctgcattgtccggaaatctgaattttaccgggaagtatcttgtactgactacaggcgataagaaattcggcctttccaaaaagctaagcgttgaagaccggaaaagactttctggctggtttgaggatgaaatccagaaaccggataaggaatatggactgatcgtgcgtacaaatgctgcagaagcagaaaaagaagaactggaaagagaatttaaacatcttcgggaaatgtatcaaaaggtagctgtaaatggacgcagccgtacctgctgcagtcttttgtatcagcctgaaccagagtatatacgaaggatccgggatacttatagccagaagctggaagagatcgttaccgatatcccggaatattatcagcagatctacgcttatctggagggaagcagcccgcaggagctttccaaagttcgtatgtatacagacaaactgctgcccctttataagctatacagaatcgagtctgctattgacgagatctggcatgaaaaagtgtggctgaacagcggcggttttcttgtgatccagcagacagaagcgtttgtctccattgatgtgaatacaggaaagtttacaggaaagaaaaaggttcaggaaacctatcgtaagatcaacctggaagctgcacaggagattgccagacagctgcggcttcggaatctttccgggatcatcctgatcgattttattaatatgggaaatccggatcatatcgatgagcttttccatgttctgaagaaacatcttaagaaggattctgtgcgctgcagggcagtggatattacgccactgaatattcttgaaatgaccagaaaaaaggtgcgcagacctgtgatcgaggatcttatggatctgcagaaggcagaaaaaagcttataaaaagccttataaaaatcaaaaaaacgtagaaaaatatattgacgaaccaaaaaaggtctgttattataatcacgtatgccgcacaaagaggttgaagtgcttctgctttatacagaggccaccatatttggcgagtaatgttataggaggtgccacagatgtacgcaattattgcaacaggtggtaaacagtacaaagttgctgaaggcgacgtaatcagagttgagaagctcggagttgaagctggtgagaccgttacttttgacaatgttattgctgtcagcaatgacggaatgaaagtaggcgaggctgtaaaaaatgccagtgttaccgcttctgtagttgagaacggaaaggctagaaaagtcatcgtttacaagtacaaaagaaaaactggatatcacaagaaaaacggtcacagacagcagtacaccaaagttaagatcgaaaagattaatggttaatctggtgtcattatgatcacaattacagttaaaaagagaaatgattcatatatagagtttcgttccagcggacacgcaggttatgcccaaagcgggcaggatattgtatgtgctgccgtttcagcactgatcatcaatactgttaattccctggagacttttacaaaggagaagtttcaggcgaaagacaaagatggatatgtattcattatatttgaacagagcccaaacactccagagggaaaacttcttatggattcattgattctcggtttaacggaaattgagcataattataacaatcgatatttgacattaaaagtcaaggaggtgtaacaacgatgatgaaaatgaaccttcagttattcgcacataaaaaaggagttggttccacaaagaacggccgtgattccgagtctaagagattaggtgcgaagagagcagacggacagtttgttaaagctggcaacattctttacagacagcgtggaacaaagattcacccaggtgaaaacgttggctgcggtaaagactatacattatttgcactgaccgatggtgttgtaagattcaccagaaagggtcgtgacaagaagcaggtttctatcgttccggtagaggcagagtaattataggtagcagaaggcttcaaatctgtcatgggtttggagccttttctttcataataataaaaataggagtattctatgtttgcagacagagcaacgatcatcatccgttccggtaagggcggtgatggacatgtaagcttccgcagagagaaatatgttccggacggtggcccagatgggggcgatggcggaaacggcggagatgtaatatttgaaatagatgagggacagaataccctgggcgattacagacacaaaaggaaatataaagccggtgacggtgaagagggcggaaagaaacgctgccacggatccaatggtaatgacgttgttctgaaggttccggaaggaactgtgatcatggatgcccagtccggcaaggtcattgctgatatgtccggtgaaaacagacgccaggttgtattaaaaggcggccatggaggtaaagggaaccagcattatgccacacctaccatgcaggtgccaaagtatgcacagccaggacagccagcccaggaactggaggtccttctggagcttaaggtgattgcagatgtgggacttgtaggatttccaaatgtagggaaatccaccttcctttcccgggttacaaatgcccggcctaagatcgctaattaccattttactacgcttagccctaatcttggtgttgtagacacagagaatggtggatttattattgcggatattccaggattgatcgaaggcgcatcggaaggagtgggactgggacatgagtttctccgtcacattgaacgtacccgtgtgatcatccatattgtggatgcagcatctacggagggcagggacccggtagaggatatctataagatcaataaggaactggaggcttacaaccaggaaatcgcttccagaccccaggtgatcgcagccaataagatcgactgtatttacaataacgaagaagaggatcctatccagcgtctgaaacaggaatttgagccaaaggggatcaaggtatatccgatttctgctgtgaccggccagggagtacgggaacttcttttccacgtaaaagagcttctggatgcctgcccgcggaaatctattgtgtttgagcaggaattcttccctgaggatgcacttgtggcagaaaatcttccatttactgtggaagcagatccagaggattcttctgtatttattgtggaaggcccacgtattgagaaaatgctgggatataccaatctggactcagagaaaggttttgctttcttccagaaattcctgaaagaaggcggtattctggaagagctggaaaaagccggaatacaggacggagatactgtacgtatgtatggttttgaatttgattattataaataatattcagggaggagcaaagatgacaacaaagcaaagagcatatctgaaaagtcttgctatgacaatgacacctattcttcagctgggtaagggcggccttactccccagaatacagctgctgtagaagaggctcttgcggccagggaactgatcaagatcagcgtcctgcagaactgcatggaagacccaaaagaaatggcacaggttctttctgaacgtacccattcccaagtggtacaggtgatcggcaagaaaatcgttttatatagagaaggcaaagacgataagaagaagatcgtccttcctgtcaaataaatttttaagttttttctggaggtctgacagatggagtgcaaaagaaagcggatcggtattatgggcggcacctttgatcctatccatatggggcatctgatccttggtgaaaaagcatacgaacagttttcactggatcaggtacttttcatgccggcaggtaatcctccccataagcggaaccgtgcaggaagagccagtgatgaacaacgggtggaaatggtccgtcgtgccattaacggaaatcctcactttgctttatctcttattgaaatgaatgaagaagggtatacttatacttatcggactctggaaaatctgaaaaaagaacatccggatacagattattactttatcattggggccgattcacttttttcttttgaaacctggatggagccggggcggatctgccaagcctgtacgctggtggttgctgtaagaaatcatatgccgaccacgaagctgtgtatggaagtggaacggcttaccaataaataccagggctgttttcttctgctggacatgatgaacattgatgtttccagccagctcctgcgccagtggtgcagggaagataagagtctgcggtattatgtgccggattcggtaatctcttatatagaagagaaccatatttatcacagaggtgatgagattgaagaaagaagtaaaaaccatggaatatgattttggcaaaatagaaaaaaaactggcaaagtatcttgatcagccaaggtttttgcatacgatgggtgtgatgtacaccagtgcaagccttgccatggttcacgactgtgatctgcaaaaagcacaggttgcgggattgctccatgattgtgccaaatgcattcccaacaaaaagaaattaaagctttgcagtaaaaataaaattcctgtaacagattttgaaaaggtacatccttttttgctgcatgccaaacttggtgcatacattgccagagaaaagtatcatattacagatcctgaaatattgtcagccattacatggcataccactggaaagccggaaatgactcttctggaaaaaattgtctacattgcggactatatagaacctttgcgtgataaggcacctaatcttcccaaaatccgtaagatggcattccaggatctggatgcatgtatgtatgaaattttgaaagacaccctcgcctatctggacacagacccggatgctattgatgaaatgtccagaaaagcctttatctattataatgatttacagaaaggaaaggtgcagactaaatgactaccgaaaagcagatggcacagcttgtatgccgtgcactagatgaaaaaaagggacgtgacatcaaggtgattgatatacatgatgtttccgtgatcgcagattattttgtaattgccagtggctccaaccagaaccaggtacaggcaatggtagataatgtagaagagcagcttggccgtgccggctttgagcctaagcagatagaaggagtgcgcaattccagctggatccttatggattatggcgatgtgatcgttcatgtatttgatgaggagaatcgtcttttctatgatctggaaagaatctggcgtgatggcaaaactttggatatggaagagtttttgaaataaagagccccaattattacgaacgtattttccgaatatctgtttgcttttaatgaagatttgtggtatgataaagaaaaatacagtaactgggaagatactgaacagttacacagcacgtaattgatggaggtatccttatggcatatggcaaaatcagtaagaaacagcaggaaatacttgattatataaagaatgagatcctgaaccgtggttttccccccgcagttcgtgagatctgtgaggcggttaatctgaagtctacttcttccgtacatgctcatctggaagcactggagaagaacggttacatccgcagagatgccaccaagcccagagcgattgagatcatagacgacaattttaatctagtacgcagagaagttgtgaatgttcccctgatcggtacagttgctgcagggcagccgatccttgcagtagagaatattgagggatattttcctatcccggcagagattatgccaaatgcccagagttttatgttgaaagttaagggagaaagtatggtcaatgcaggtatccttgatggtgatcaggtacttgtaaagcagcaaccgaccgcatctaacggagatattgtagtagctcttgtggatgattctgccactgtaaagactttctacaaagagaacggctattatcgtcttcagcctgagaatgactctatggatcctattatcattcatggtgatatccagattcttggcaaggtttttggcgtattccgtgttttccagtaatcaaagggttccgcagtcagttttgtgtcctgactccacaacaccagggctgctgtccatgcatcatcaggaaagcggtcctggtattatttataccatagtaattgacataatataattatgaacaaccacaactgattactgtacttcaaataaaatatggagttcctgtgaactttcttcaacgccttgtttttgtccgggaaaaatgatacaatatttcggaatgaaatcagagaagagaaaaaggaggcatttttttgcctaatcagaatcaaaatttttcccacaaaatcacagagcatcttataaaactgagaaaaatattcagtctgaatataggaacagctatttttggcgtgctttttctatatatgatcgtcagtgcatttatgtatcttacatcgtcccatatcgaatcctatcaggtgtcttccggaccgctttcaaggaatgagacttatacaggactttccttgcgagaagaaagtgtatgtaaggcagattccggaggatatgtgaattattatgccagagagggcagtaagatcaatgccggtggtgctgtatatggattgagttctaccaaggttccggactctacggtatccctcagagcagaagagctgtctaatatccgtagtgatatgttaagtttttccaaaagcttttccccaagtaaatttaattctacatatagtttcaaatatcagctggagggtgagattcttcagtatgcaggagtcacacaggagacatccgttgctgcagtaacagatgaatatggcaatgtggtcagcgattcctccgctcaggtagtgacccttggaaatcagaatatcagcaaggcaccggcagatggaatcattctttatgccaaagatggttatgaaggcaaaacagttgatgaactgactgcagaagattttaaccagaattcctaccaagaaacggatctgaagacacaaagccaggtgaaaaccggcgatccggtatatactattattacagatgaaagatggagcctgctgatacctcttagcgagaaacaggcagtgaagcttgcggaccggacagctatccgtgtgaaatttctgaaggatgataatactcagacaggcgatttttccattatcaccattgatgggagcaattacgggaagattgatttcagtaagggattgatccgttatgcatcagaccgttttctggatatagagcttgtgactaatactaacagtgggctgaagattcctcttacatccattgtttctaaggaattttatacagttcctgctgtttatgctacaaggaatgaagacagctctgacattgggtttatgcttgcagataaaaataaagagggtaaagatgtaaccacctttgtaactccacgtatttatgcaagactggcagatcctgtgacggataattcacaggaagtcacttatacgtattatattgacaaaagcttcttcaaagaaggggatgccatattgaaaccggattctaaggagaagtatattatcggcagcacggaaatgctggaaggcgtatattgcattaaccaggggtatgctgtgttccgcagggtagagatcatagatcagaatgaagaatatgccattgtagccaaggatacggattacggtctggtacgatacgatcatattgtgaaggacgcttcaaaagtaaaggaagaagatatactttattaaagcaggaggaggcttatagatgttagcagataattacagacaggttcttaataatattcaggatgcctgccaggctgtaggaagagatcctaaggaagtaacactggtggcagtcagcaaaacaaagcctgtagaaatgcttcagcaggtttacgatgcaggagccagagtgtttggtgaaaataaagttcaagagattatggacaaatatgatcatttaccaggagatatccgctggcagatgattggccatcttcagcgtaataaagtaaaatatattgtagataaggttgacatgattcattccgtagattcctatcgtcttgcacagactattgaaacagaagctgctaagaaaaatgttactgtttccgtgctcctggaagtaaatgttgcagaagaagaaagcaaattcggcctgaaaatggatgaggtattgcctcttgtacaacagatttcagaattgcctcatgttcaggtaaaagggcttatgaccattgcaccttttgtttcaaatccagaggataacagggaaatttttcgcaaattaaaaaaattaagtgttgacattgaagccaaaaacattaataatactactatgagtgtcctgagtatgggtatgaccggtgattatatggttgctgtacaggagggcgccaccatggtgcgtgtaggaacaggcatttttggtgaaagggattattcagcagataagtaagattggagattaaaatgggcgttttagataaatttttagatgcgatcaagttaaatgatgattacgatgatgatgaatttctggatgaagatctggatggggcagatgatgatgatgatttccttgatgatgaagaggaagcacgtcccaagaagaagttctttgagaagtttacaaagaagaaatcatcagatgatgaatttgacgaattcgaggattttgatgatgcacctgccaaaagccctgtaaaggcagccgcagccactaaagctgctcctgcaaaacagacagagaaggcagacaaaccggttcgttctgccgcaccatcctccaagattacacctatgagaagcagccgcagatccgggcagtcccagaatgttgaagtatgtgtgatcaagccatcctctatggaagataccagggagattgcagatacacttctggacaattctaccgtgatcctgaatctggagggtattgatgtagagcttgcacagaggattatcgatttcgcttccggtgcctgctattctttaaatggcagccttcagaagatttcaagttatatttttgtacttggaccgtataatgtagatattacaggtgatctccagaatattttaggtggatctgttccttccgtaagagcaggttattaataagaacaggtattcattcaaatggaaaaagatgaatttttacttaagagaatccgtgaactggcaaagctgtcctatcagcgtgatatcgtcactttttcggattttcttaatttaaacgaacagaatatggtgcatagccaaaaactccaggagctgggcgttatagtggaattttacggtggctatgagaatgctgagcgtcagatggttgcttttcaccctgatgctcttatgtttcagtgggaatatccggtagattgtatccgcatcactcctaaggctttaaagttttcagaggaattaacccatcgggattaccttggggcgatcctgaatcttggagtagacagaagtgttgttggagatattcttgtagatggcaatactgcctggtttttctgtctgtcaaaaatgaccggctttttccttgaaaatctgtgcagagtacggcatactactgttctggcagagaaggtagaggatccgggattgatgccaaaggcacatttccaggaaatccagggaacttgttcctcagtacgtctggatacgctgatcgctcttgcttttggagcatcccgcagcagcatggtttcttatatagagggaggccttgtttttgtaaatggcaagctgatcacatccaacggacatgagccgaaagagggagatattatctctgtaagaggcaaaggccgttttatatacgatgggatagccagacagaccaagaaaggtcggaatagtattacgattcgcaagtatatatcagctgggagatgactcccacctctataggtggtgagcaacaagctggtatcagtggtgggagtcaatcccccagctgatatagatggaggtattatggcagaagaaaaattacttgtaaaaaggaatggcgattttcattatcccatttattttgagaaagacttttccaatcttgcccaggtattaaaggatgagcagatggaaggaagaaggatctgtgttgtagctgattccaatactgctgcattgtatggagaagcagtccaaaaggaactgtccatggcagctgcagaagttttaatgtttgtattttcagcaggggaacccaataaaaacctggatactgtaaaggacttgtaccgttttctgattcagcatgaaattgacagaacagggatcctggctgctcttggcggcggtgttaccggggatctgaccggctttggtgcagccacatatcttcggggcattgattttatccagattcctactacgcttcttgcacaggtagacagcagtgtaggaggtaagacaggtgtagattttgaacaatacaaaaatatggtaggggctttccaccagccaagactggtctatatgaatctttctactttgaaaactcttccccccagagagtttagctgtgggatgggagaagtgatcaaaacagggctgatctgtgataaggaattttttcagtatgtacagaattgccagccaaaggtatctcagatggatctggcagtgcttgcttccatggttcgcagatgctgtaccatcaaggcaggtgtggtagagcgtgatcctagggaaaagggagagcgtgctttacttaatcttgggcataccattggtcatgcagttgagaagctgaaggattttcaacttcttcacggccaatgtgtaggactgggattgatcgcagccggatatatttccatgcagagaggacttcttactgtcagtgaatatgaacaggtttgcagctgctgtgcatcctatggattgccgcttacagtttcaggacttgatcctgaggaagtattatctgccaccaaaaaagacaagaaaatggaacggggacatattaaatttatttttatggatggattgggtaaaacctttatttccacagatcttacagatgaggaaatgcttgccgggatccgggagatctgtgtatgaaagaacagacacctttattttcagggaaaaaggctttgcttttctggatttttcctgttcttttgcttacgctgatcgaccagtttaccaagtatctgtccattgttttccttaaaaataccaatgggaagattttgattcccggtgttttagagttatcttacgttgaaaaccgcggcatggcatttggcatgcttcaggggaagatcccttttcttctgatcatgtgttttttctttcttatacttgccctgtatatttatatccgtatgcctaaaactgcctattatattccattgatggcgcttgatatggtggtatttgccggtgcgctaggtaattttatggatcgctttttcagaggttatgtagtagattttatttatttttctctgattgattttcctacctttaatgtggcggatatttatgtggtctgcggagggatacttactgtattgtttgtgctttttaaatataaggatgacaatgattttgcttttctgaaatcaaagtcaaaaacaaagcattcccaaaacagatgatcagcaacattttaagatagctcaggaatattgggaaaaggagcaatgcatgaacagtgttacttattgcgtatccgaagaggaatgtgggcttcggatcgaccgttatcttgcagaaaaaaatacagatctttccagatcttatatacagaaactgttgaagaaccaggaaatttccgtaaatgggattccggtaaaggccaattataaggtacagcaggaggatcagatccttcttaccgttccggagctgacagagccggatattcttcctgaggatattccactggacatcctttatgaggatgaagatctgatggtggtaaataagcctaagggaatggttgtgcatccaagtgccggtcatttatccggtactcttgtaaatgctattttatatcattgtcagggacatctgtccgggatcaatgggattatgcggccgggtatcgtccacaggatcgatatggacaccacaggggctatcctggtatgtaagagtgatttcgcccataaggatcttgcagagcaattaaaagagcattctatcaaaagacggtacagggcaatcgtcagtggaaaccttaaagaagatactggcaggattgaaggacccatcgggcgtcatcccattgaccgtaagaaaatggccattaattacaaaaacggcaaagatgcagtgacccattatcaggttctggaacgtttcggaaatgccacttatgtggagtgccggctggaaacaggacgtacacatcagatcagggtacacatggcaagtaagggacatcctcttcttggagatcaggtttacggatctgctcgaaatccatatcaccttcaggggcaggcgcttcatgccatgatccttggatttgtacatccacgtactggtgaatatatggagtttgaagcaccactgcctgaatattttataaaacttttggaaaaattaagaaaatagttggcatatttggcgaaattgatgtataattgagataacaatttatgcagaagggagtggcttaatatgaacaacagcacaagttcaattataaccatcggccgtgaatatggaagtgcaggcagacagatcggacaggaagttgcaaaatacttcggtatcaaatgttacgacaaggagcttcttgagcatgcagccaatgacagcggcatttgtaaagaattatttgagaatcacgatgagaaaccaacgaacagttttctctattctctggtaatggatacctattcatttggttattcttctgctggatttactgatatgcctatgaaccacaaggttttccttgcacagtttgaagccattaagaagctggctggtgagggcccctgtgttatggtgggaagatgtgcagattatgcacttgcagataataataactgtttcagtgtatttatacatgcagaccttgactggcgtatcagccgtatatcaggcaagtacaataagaccttaaaagaagcaaaggatatgatcaacaaaacagataagagccgtgccagctattataattattatacaaacaagaaatggggctctgcagcaggctataccctttgtttagacagtggcaagctggggatcgaaggagcagctcaggctattattcaaaccgttcaggtctttgaccagtgtaagcagtaagattatagacatgcaggagagggctgtcgctgatgcggcagcctttttaaaagagttagcggaggcataaaggaataaatgaaatttcgttgggacagcagatatttacgtttgggagtgacagcatttgcagtagttgcagcaagtatgcttttttattacgggattttccatatggggactttgatcttagggattcagtattttatggggatcatggcacctattatttatggtattgcaattgcctttttaatgagccctatcgttaattttctggaacagaaagtgatttatcctgtttttcataaaaaggagattacactgcaaaaaaaaggacagaaggtggttcgctggatctgtgtgattctttgtgtctgttttttgttttttgtaatttacgctcttgttatgatgattcttccggaattgattcggagtatcatgaattttatatacagctttcctgattatgtgaatgcagtaagaaaattccttgattccattgtagaaaagggctgggatctggatgggaatacctttgatattctgaatcagtcttcccagaaagcacaaaattatcttactaccaccatacttccccagatgcaggggatgcttaaaaatgtatccgcaggattctttgacattcttacatttttaaagaattttataatcggtgctattgtctctctgtatctgatggcagacaaagaaaagtttgtagcaaaagggaagatgatcacttatggtttatttcctttaaaacaggcagattttattatccgctccatgcgttttaccagtaagacctttatcggttttatcacaggaaaaattctggattctgccattataggggtgttatgctatattggaactacgcttctggatatgccttatgcaactttggtaagtgtagtggttggtgttaccaatgttatcccgttttttggtccttacctgggagccattccctgtattttactgatcctgctggtggatcccatcaaggctttgtactttgccatatttattctggtattacagcagtttgacggcaatattcttggaccaaagatccttggagattccacaggtctgtctagtttcatggtgatcgtagccattctcattggcggcggtctgtttggtattcctggaatgatcataggagtacctgtatttgcagtgctttatgcagcatgggagaaattcctgtttcatttgctggcaagaaaggatttcccacgggatgaaaatatctatatgaatattgaccggctgaatcctgagacaaaagaacctgtccagttccccgaaaagcctgcaaagcctaaaaaaactcaagccaagaggagaggaccatcttcccgtttctgggatattgtatgggaagatcttgtaaagatatggaagctattatgtgcagtgataaaaatagtctatgctaaaatatactgtacatgtgtatccgtaaaacggcgtattaccaaatggtatcagggtatgaaaaagaacagaagataataacataccgtggagataccggactgcagatatagaacatcaaaggggaggagcagtatgagactgttaatacagcgtgtaaaccacgcagaggtaaaagtagacgaaaagctggtgggaagcattggaaaaggcctgcttgtgtttgtaggcgtaggcagggaagatacaaaggagattgcagataaatatctgaaaaaactgcttggtctgcgtattttccaggacagtgaaggcaaaacaaatctgtcattagcagatgtgaagggaagccttctgatcgtttcccagtttaccttgtatgcgaactgcaagaaaggcaatcgtcccagctttatagaatccggtgatccggatcaggcaaaagaactttatgagcatatgatccttgaagcaaggaagattgttcctatagtagaaaatggcatatttggtgcagatatgaaagtaagcctggaaaacgacggaccgtttaccattattttagatgaaaaaatcatgtaaatatggactggggaagtgttgcatattattgcgtgaaatgcagattttacgcaataatatgtgtgaaaagcaggtactgcttccaaagcttcaagttttaagcgtgcgtaactgaggtgttttttatgaatgaatatacagaatccgtaaaaattaataatattctcactttacgggggcttctgaaaaagatgcctccgttttgcagtgattatttacgcgggattgccacatccacatcaccaaggactcaaaccggttattgcagggacatttatacgtttttacagtttattgtttcctgtaatcccttatatcagtcctgccagctcaaggacattcctctgcaggttcttgaagaactgaattcctctgatattgatgagtatatggaatttctgaattattatgaatttgatggaattgtatacaaaaatggtgaatctgcaaaagccagaaagctgtctgcattaagtaatatgtacagcttttttaataaacgtcagatcgtaaaaaacaatcctttaaatgcagtcagacgtcccaagctgcacgaaaaagcgatcattacccttgaccaggaacaggttttcgatttgatggatgctgtggaaacccctaaaaacatgactgacaggcaaaagaaattccataatctgactgtggatcgtgaccgtgccatccttaccgcatttttaggcactggcatgcgtgtctccgagcttgctggtcttgacgttacagatgtggactttaacaatcagacgttccgtgtaatacggaaaggtggaaatgaggcttatatttactttggagatgatatccgagacgcactctcctattatcttggctattcggatggatcatctgatgttgattccaatacagataccgcaggatctgataatgaaaacgctgcaaatctggctcaggcacccagatcactgcttctgaaagaagataatccggatgaaccggctcttttcctttcccttcgtggaaaccggatggctgtacgcagtattgaggttatggtgaagaaatactgcactatgatcaataccaataaaaggattacccctcacaagctgcgcagcacctacggtacggcactttacagggaaacaggtgatatttacctagtggcagaggttcttggccataaggacgtaaataccaccaagaaacactatgcccagatgaacaacgagaataaacggcgtgctgccaatattgtgcagctgaaaaaagacagagatgctaatgtgtaaactactgtattattttacaactaacatatgaagctgtacctatatggtatggcaatataaaaaccgctgcagaatctggatcactcttgaatgtgagtcccaaacctgcagcggtttaatttagcattttgtattttatccttaattaattatatgtatagctttgcaaatccttataaagcaactgcaatcttgtcctggaatgcttcagggatttcttctttgtcaagggatatgctgatgataatagatactttaaaggcattaccgatatcatccagctgctgaagtgtgcttgtaacatctgcaccttcaagatttgcaattctgaggaagctgtcaagatagatctgctcaaggtcatgatcctgagaaataatcccacagataaatcctacaaattcatctgcatttttgataggataagttgtcacattaataagacgaaccttattgttcagttcatacatatgcttagtgcttttgtctaagtagacgatgctgccattagcgtctttaacggcgccatttactctgtctaaaagtacttttgttttgcccttgcctttctttcctacaatcagttcaaccatgctgttttcctccttagacacatataataatttttgccaaaaatcttatttaagatgtttcaattatagtgtatattatcaaaaatagcaagccctttttaataaaaattgtatattttttacatgttttgtaattcttttcacaggtaatatcactcaaggtttcttatcatgtatatggccaaatccggagatatacttttatgaaagtggagcagactggatataacttacatggctgtcatcatacagctgttgaagagtatttttcgtagcgcagattgcaaaaccataagttttcagcccattctcgtctatccaggtatttatctgtgaaaaatcatcagcccagtttgaatgaccaagcattttcagaatatcatcatgttcacacatataggacagcatactctggaaatgggttttcattgtagcttcgtctgatatatctgtatattcttccttctcatcatctaacagggaaagataaggatacttttctctgtcccaattcattgaggaaccggatggctccggggaaaatccaaccggtggataagaaatagaatgtccatcctgattctgggcgtaaacagcacaccacagatctcctgcattcaggcttccctgctgatccaaagtgttgatccaactgataaatgtgccataatctgtgatctctgacagagaaacataggccagataccagtccgtatcgttgtaacctgcaatctgctctttggaagcggcaatatcgtctttcatactatcctcttctgttacattgccctgttcatcctttgtataaatcacccagttacttgtatttcctggaatatagaactgaagcaaaggctgtgcaagtacattactgtcatacagtgtcagcttttcatggaccagtttaccgcctgcagaggtaaatctgccatttctggaaaatgtctggggaatctggatatcataggatccataaccaagcggcgttgcgcttacataatccctgtgtcctcctggcaggaaaagttctgaataaacagacagatccagactcatctgtgtagtggatatgccggtttcactgcttgtgccaacagacctgttgggattgtaataaagcagggataccacctgtggaagaataaaaacagcacatagaatgatcaccagaaccagccccccggtgatcacccccagtttaatgaatgctttccggatagttctctggatctgggaggtaagctttttctgaaagtcactttcagattcatctgttgttctttcagaacagggttcagttccagactcagctgccggaaaaacagtgtcttccagaccaggaatatccccttcttcataaagatattcattgatggcatcctgccgctgaatatcctgctctatttgctgtctttgctgctcatttaatttgccctctttatatagccttaaaagctccttatacgtcatgttctgtcctcctggtattctttatccattaatgctttaagttcctttctggccctgtatgccaggatacgcacgtgctccggagtcaggtgcagtactgcagcaatttccttctgggaaaggtgtgcaaaatactgaagctgcagcacttcctgtttccggttttccagcttgcggatcccattatagagattttttaatttttcctcctgaaggatctgatccaatatatcttttgttggcccggcatcaggcatatcttcagacagcacctcctgttttgcctttttctgatgattgtaaaacagatttcttgccactgcgtacagccacgcccgtatatttccatgactgtccgaaagggacaataaggctttcagaaaggtttcctgaaggagatcttctgtcagctgtctgttctggcataaggaaaacaggtacagatataattctttttgaaatttttgatatgtttcttccaatatctttttatccatgctttacctgcctgcagtgctttctttattgtttgtattctacttatataacaatccagtctgtaaaatgttacagattataagaaattattttgtggtctgaaaaagccacctcatgcaatgcatcatgcctggcataaggtgactttctgtacctttataagatttgaaggtttcatatgtggtgataccgcctgtgggcaacgtacctgtttagttaatatgctgtaaaagagaagacatttcctggtaaagcagttccttggaagaagcgcccatcacaatggatacaaatggctgtccatatgcattctggcaaagaagggccagacaattgcctgccaggctggtagttcccgtttttccaccaaggatctttacatccttaggtgttgcagcttcccctgtaagataatggtctgtagcttcaagcacagtactcatagtggagccatccgcttttgtatattctactgtataggaaggaagctgtgtgatctctgtaaaggagggataattcattgcctccttcagcatcaggtaaatatcatagggagttgtataatggttctcgtcctgaagaccatgagggttggaaaaatgggttcctgtacagcccagctgtgcagcatagctgttcatcatatcaacaaaattatcggttgtgcctccaatatgttctgctatggctgacgcagcgtcattaccggaataaaccagaagacaccgtaccagctgtcccatagtaaccttatctcctgcgccaaacccgcatacctgggaaccatcctccaatgtaacattttcctgggtaatggtaaccgtttcgtccatattgccgtatttcaaggcaagcatggcagtcatgatcttagtaatactggcaggataaactctttcatatgcaccctttgcaaatagtactttattgtttgcaagatcgaataaaagccccttctggtcagtttccaatgccactccgtcaagaggtgtatcctgagctgaaactaccagatccttggcaaaaccgttccctttcagggaatctctggctgtgacagaagaactaaattcattggacgcttgaaaagggattaccggtgtacttaaagaaccgccacgtaaagtataaatagcaaaaactccgcctccaacaactgcgatcaataataaaaccagaagaatggtatgacggatccgcctgcggcgcattttttttaatctggctgctttgttatttaccgttcttcttggtttagctgatgtcataagtattcctctttctcatatatttcttttctttggatttctttattgtatgcactgctctgaagacctacattcagaacaattcccattccgatataaagactgatcagtgaagtcaggccatagcttacaaagggaagtggcgtacctgtattgggagcaagtcctgtggctacacagatattcagaaagctttgcaaggccacaatactgccaataccgcagcaaaggatcctgcctgccatatcctttgcacgaagactcatcctgatacattccaatgcaatggccattaacagacatacgaccactgtacagccgataaaaccatactcctctcctgctactgcaaaaataaagtcagtctggttctctgcaacaaagttaccctcatttacagaggatgtgctgtcatcacctgtaagctttttccctacaagctctcctgaagcaatggctgtttttgaattattctgctgttcaatattttcggagtattcttcattttcaggatacaggaaggacataattcgctttctctgataatcctggatcagcttctgatccggctgcacaacgatggaaagaaagataataatcaaaggtattgcgatcagaattgcccctcctatgatccggtaccgtagcccggccatatataaaagaatacaaaaaaccaaagtaaccataatggtattcttcatatccggctgtgcatagatcagcactaacgggatagcaagaaggacagctgcttctgcaagaacttttaatgtattcagatcttcctcatgatccataaaaaacttcgcaaagaacaaaataataataatcttggaaagctcagtgggctggaaccggaatccgccgatctgaagccatctggtagcaccacctgcattggatccgaacagccggactcctaaaagcataacaatattaaccccatacatgatccactggaaattaaggatccaggaataatccatgagggacagaaccaccataacgatcagcccaagaatcagaccaaccagctgcttgtttctcaaatctgccctggcactggtcacaagtacaactcctatggaactgatagcaatcaggagcagtacaagtctgaaattataaaagcgaagtttatattgtttaatcatatgttattatcagtcctttttcgtaagtacaggaatatatgccatgatcacagccggatctttggaaatcttgaccctgacctgatcttcttctaccactacgtatttttttactgtatgtatcagatcactgcgaagcatttttatcatttgcggagagcattcaatacgttcagagattagaagaagcttcatacgatctctggcatacccggctgaacgccgtttttcacgcaaaatggatttcatgtaagagatcctcctcatatatgcctgttattattttttgaatatactgccaagtctgctgaacatgccctttttctggcgaatggtaacaaaaggaatatcttccccaagaatacgtttgcagatattctggtattcttcctctgcctgggaatttttacctgacaaaggctctccctgattggtagccactacgatctgctcgtcatccaggatcgtacccagaagatctacagccaggatctcaaggacatcatccacagacatcatatcgcccctggcgatcatatccggacgcaggcggttaatgatcagccgaatatcacggatatcgccagcttccagaagaccgatgatccggtctgcatcacggatagcagaaacctcaggagtagtaaccacaatagccttgtctgcaccggcaatggcgtttttgaatccctgctcaatacctgccggacaatcaagaagaacataatcaaattcttcccgtaattcctgggtcagcttgatcatctgctccggtgaaacggctgtcttatcctttgtctgagcagaaggaagaagatacagctccgggtgacgcttgtcccggatcaaggcctgtcgcagacggcagctgccattcaccacatctacaagattatatacgatccggttctcaagacccaggaccacatccagattccgaaggcctatatctgtgtctaccactgctacctttttgcctagcatggcaagaccggtaccgatatttgcaactgtggtcgtcttgcctacacctcctttaccggaagtgatcacaataacttcactcatttcaatgaatcctcctaaacaaattgttccaactttctggtggtctctttagtcatttgaaacatcacttgtatcgctggaagccatacctgtgataatggattctttatcagcaagttcaaaaatgtatttaaaaatatcattagcaatcaaacatgcattaccagaggtatatccgtttgcaatacgcacggatatagcatacttaggatctgtggacggtgcatagccaataaaaaggccatgattgggatggtaataatccacctcagctgttcctgtctttccggatacagccatgcccagtccattaaactgattgtgggtctgtactaccctgtacataccgtcatggatatcgtcccacacattctgtgggatctctgtaaggttgttaaggacaaccggatcataagtctgcagagtctggccggacgcatcctttacattgtcaagaagagacagctggaatacagttcctgaattggcaagagctgcagcatatctggcaaggcctactgtagtataaaggttcgtaccctgtccgatataagacggaactgcatattggttggatacctgcggtgttgcttctgaaagctcaatcccactcttctgatccagtcctaacaaggaagcgtattccttcagctttgacagactctgattctcagaaaactggttatcaccaaccttaccaagctggaatccgatcatactgaaataatagttacaggactgctcaatggcactgcggatatccagtgcaccatgtccataagtattccagcagttgatgggcggtgtaacataatcaaaagatccagtacagtcaaaataagtgctgtcatcgatcacaccttccatcatgcctgcaatggtggaaaccagcttaaaggtagaaccaggcgcagtagtctgttgggttgccttgttaaagaatgggctggactcatccagtgcaagcttggtgtaataatccgtatccatgttatttgtaagacggttattgtcatatcctggataagtaacgcaggcaagaaccttccctgtgtgtacatctaccagtactgcagatgcagaacatggttcaagtgccagctgtgcaggctcgatctccaaagtggaaatcttgctgaccataaaatcatatgcacccatagatccggaagcaagactttcgtacataccgtcatccttggacaggatcccctgctcataaagcaccaggcaaagctcctgaccggaaatggtatcttcctgaagcatgtacttatacagcagctttgaaaatccggtgtctgttttcagataatcaataatataatcggtaagactgcggtatacttctgctgaatccaggtactctccttccggggaaatcttggaaatatcgatccagttctgactggtggcataagtaagataatccttcagactgatactttcatccgttacccaggctttgtaagtgtcatcagatgtgtttacagcatcacttttgatgatctttaaggtatcacgcagcatgtcattacagatataggaaaggtatgcctgtatctgaacatcttcatccttgtaagctggtggattgtctcctgtaagcctgctgtctattatatcaaaaacctgctgctgcttttgttgaaatttggcatataagtttttttctatatcagaggcgttttcgttctgaaatttattaatatcgatcacactgttttccaccagtgcattgtaaacatcataaatagggatccgtatctggctggcgtttttgatcccttcaaagtcaaaggtcttggatgcttcgatcttggaaagaagaatacctgccaccctttgctttaagatctcataaataccggactgccagtctgtgtctatggtgatctgtacatcatttcctgcaatcggagccacccttgtattctcatcaatcttcaatacttttccaagattatcaaccgaaacggtctcatggccatctgtaccctgcaaagtcagctccatatactgttccagaccggcctttcctataatagtatcactggaataatccggattctgtttgcggagtgattccagctcttcagcagatgcctttcctgtataaccaaggataggtcccatgctttcttcgtcaacatatttacgtatggagtcatccactacttcgattccctgaaaggatgttttgttttccatgatagcagctactgattcttcacttacatttgttgcaatggtaaccggcatatatttcttatagctgtttgtattcagttcataacggataatggcaatctcaaggatctcctcttttgtcagctgggaaggcagcccatgggaagataactcttcttctgtataggcattgtctccttcaagaacaatggagaatcccccacttttagacccaccaagaaatgccaccatatctgctgctgtggcatttttttcttcttctgtaaggtcatcgatcagcggatgaccataaatatctgctttaaaacggtttaaagtaaagccttcatctacatcaaaggcatattgtccattctcatctatatagatatggaaactgctggacagactgtctccgtttttcttaaggattttcagtacctgataggcgatgccgttcagggtaaggttcttttccctggtggtattatatgtgccattatcctcaaaagtaagggaataagacaggacattggaagcgatgatctccccgtttctgtccaatatattgccacgagtactttttaaaacacggtttttggtggttcttgtctgaaacttattgatataatcttctccctgaatgatctgcaggtcaaaaagcctgcggaccaggatgcagcccataaaaataaataccagggccaatacggttgttctttttatgcttatttttttgaaaaatcgttttattttattacccacattgactcactttctttccttgcaatatccataaatcgataattgataaaacggaataccctatatacgatcagggtcaaaaatacggtataggctgcttccggcaaaatgatccggaacagataggtatgaagtcccagcctgcccctaagaaggaattgcaggccataaacagcaaaattataaagaatatctcccacagcagccagcaccataggtaccttaatatcatcatcataatagattctgtgggcatacccgctgaaaaaaccaatatacatatagatcagtgcataaaacccgaataaggatccataaaaaagatccaccagcagcccggagaaaaatccggtccacaagcccattttccgtccacgcataagtcccatggaaacggtaaggatcagcatcagattaggggtaatggatccaatggatatcagattcagaatggtacactgcaataaaaagcatataatgatggtaataaaccatacaatcttactcttcactggaagcctcctgctgtatggaatcctgtttgtttactgtgatcacaaaaacatccttaagatgctggaaatctacaggtgtaacaatcgtgcctgtctttgtcagattgttgctgtcctgctccacatcatttacatagccaataaaaagaccttcaacgtatttctcgctgatgttagaggtaacgatccgctctccggcagtaactttattttcctgatcgtaaagctgttcaaaacgaagcttgccttcatcgatcagctccaggtcaccggtaataacacaattatcagatgtgctgacagtcatggcacttacactgctgctgtcatcaatgatagaacgtaccgtagcccatccggggcccacttctgttacgatcccaaccagcccctttcctgcaatcacattattatctacacggatcccgtcattggagcctttattgatcataaacgtatcgtaccagttcccaggatctttggaaatgatcctggcagcaaccttgggataatctgcatattctgcatcaagcttatacaattcccgcaaacggagaagttctccctgatcctggatcagcttgttgttctgctgagtcaggttatcgatctggctttgaagctcttcatttgcactgatcagctcctgcttatccttcaggctttgtcttgtgacagacaaaagctgcccgatcctgttaatgcttttctcaaagggaaccaccacaagtcctgctgcttcctgtaaaggagctgtggcagcaccggatgcaaatgtggctacaatgcagcttacgcaaaacaaggtcataactgcaagcagatgtttacttttcagattgatccgaaaatggattttccttttcaggtttttcatttaatatatatcccctaaattacaattttctctgtttaatgggctgtgcccatttacgaagttctctgttcttcatgattttttcaagacctgtcactgctgaattctcatacagaggtgacagattgaaagcaaatccggtatagctggcaagatactggtctatgtatggaaccctggtgctgccgcctgtaaggtaaataccctcctttgccacatgataagtgatctggggcggagtacgctcaagaaatgttttcatttcagcagctatctcgttcacacagttcatgatcccgtcatttaccacataggcagagatgatctcttcccttggaagcccggaaacactgtcgatcccaactactttcctggcttctttacgctggtccgaaagacgtcccataacaattttcagacgcttgcctgtacgtgtaccgatctgaaggttataccgcttgcgcacttcactgcagatagcttcattcatctgcctgcctccaattgggatcttacggctgataatgatcttgcccccggtaataatggaaaaacgggtcgtctgggcaccaatgtttacgatcatactgccctcattcttctcaatatcaacccccatggcaatagcgtctgcaatggggctttctaccatataaacccggtttttacgaagccaatgcccgtttgctacctggtaataggctcttttttcaatggccgtcatatccagtggaacggcaaaatacattactgaaccaatcccaaggatcttatcgatcctgcgcatcatactatataatacgatctcctgcaattccaggttggcaatcatgccaaaagacataggggaagttacggaaatacccacaggtgctttctcaaacatctcatatgcttcattaccaacagcaatgatcctgcgtcctttggatgcgatcatatttttctctaaataacttttatttctgatcagagaatatacctttacagaactgctgccaaggtctattccgtatgttttttcaaaaagcatgcatctgcccctttatcacaaaactattccatcattccattttctctaaggctggtgtatgtatgatccccgataataatatgatccagcagagtaataccaagcatttccccggcacggagaatacgctgtgttgtctgtatatctcctgcacttggctctgttaccccacttgggtggttatgtacaagcacaatacaggtggcatgatatttaagggcagcaagatatacctccctgggggtgatcaaagtgctgttcactgtacccttggataaaatctcctctcccagaagatggctgcgcgtatcaaacatcatgcacagaagcagctcctgttcttcgtgtctgagctgctccatataatactttgcaattgtatccgggctattcagtgagagctgtggtcttgctgcctcccgtgccatccgcttggataattccccgatacatttcagctggatggcttttaccttgccaatgccgtttattttcatcagttccggaagggacatatgcaggatcccaagtagtccgggaaatgaagtcttctctgtatgattcagtatttcgtgtgcaagcgtaagagaacttgcgtctttagtgccgctgcgcaggatcactgccagcagctcactatcgcttagaatcccagggccatccttcaggcacttctcatatgggcgctgagagggcggcagatccatcatcctgtaaggcctgccctgtgccggtaatgtatggatttgatctgattttttcatatgattccttagcttctggaatacgaaacccattttagcataaaaacagggggatgtacactctctgaaaaaatttaatttcttttttataaagagtatggaagcttataatgaatacacaagcctgcagatatgccatacctgcaggcttgctcttaacagatcctgtataaaatcttttcagtttttcctttcttttctccactctggatcaactgtcctgtttgtgtatcataccagtacagcccggtccatgcccatgaaaacatggtaagaacaaggcttaccttatagcaggaataggcacttccattcactgtgatctgctctgttcccaactttttggcggcaaattcaccaaggttcatggctccccgattgttgcctgtaccgatagaatacagcaggatttcattttcactggatttaagaaatgcaggaagagccatttccatcatctgataccacaggccgtcttcgatacggaatcgtttgtcctgctctttgcctttaaaagtgcctgtcatatgaataaaactgctctctttgactgcttttaagaaggtatgatcagaagaacgtgtatattcccaggaaataagagaaaggttcctgtctgcctggcagatctcttcagaccaaagaataccctcccgggtaatcctctgtacgatctttccagaggtattatacccggaaacatccagaaccttctcttcctttccatctgtgcttgtcagtctgatctggttcaaggatgccggataatgaaattcagggatatcatagctttggatcacattctgggaatatacgatctttcctttgcagaaaacctgatggataaattggatattggaaatatcctgggatggatcctggtcaagaaggatcagatcggcttccatgccttcttttacaaaacctttccggtcttcaatccccaaatgccgggctgcattgccagttgcaagtgtgatggcttccataggggttaaacctgcttccacataataggcaagttccttatgctccacctcgccgcccatcatttccagcatattgtcagtacccatggcgatagggattcctgcgtcataaagtactttcagattatgaaggctgtttgtcagacgtgctggatctttttatcaaaataccagtaatcgcctccctgatacgtgaatttcagaaaatccacgccggctttttttagttccaagattccttcatgcacctgctttggtgtggtaacttcaatggccatttccttacggatccaaggattatctcctcccagtgtattggcaggatgtccatctggagcagtgaagttaggacctacgatcagcagctccggaccttccagctttccggaacgaagctgttcacgaagctgatagatgaaatgtctgggagcacacaaatctttaatggtagtgattccgtatggaaataccttttcttggaagatcctgggcacttcgtccttaagaaatgccatactgtctgcttcacaacggttattcagcccctgaatatgcacatgacagtcaataaggcctggcatcaaggtcttacccttgccctggatcacctgtgcacccggaatggccagcggatcagaagaaatggtctggatcagaccttttttaatatatacattcttatgttctgattctgttccatcaccggtaagaatatgcacatcctgtatcacatattcaccgttgtgtttccttttaggctgttttttgtatttgatcagaataaaaagaacaataacagcccctaaaaccatctggatcacgccaatcagcggaattccaaatatcttcggcatacctgtttctccttcctttacacagatatccgaatttactgttattttccgaatatctgttcaaaatatgatgcaaacatttcttttggtggaattgccattccttgtttgtcatcccccaggatcagaagtgtatctccgggcttgattacttgtgtcaagagtttttatcagcatcactggaaggaatagaatacttccgtgcaattgcctctgctactttcagtccatccatagcagcagaagtgatcccccctgcataacctgcaccttcaccgcagggataaatcccttttttgcttccttccaactccttatcccggacgattcttaccggggatgaggtacggctttctattccgcacaaaagagcatccggtctgtcaaatccgggcagccttttaccaaatgccagaatcccttcttctatagaatctccgatttcttcaggaagaatctttcgtacatctgtaagagtataagcgccgcaaatgcaaggcttgacctgaccaaaggaggtgctttcctgatgcttttgataatcctcaaacagctgtaccggcacttttcccttccctgcttcccaggctttacgctccagatcacgctgaaaccggatccctgccataggatcatttccgggaaaatcatcgggtgaaacagttacgataatagcactgttggcattttcactgtccctggcctgataactcataccatttaccgccagcatctgctcttctgaagaggcattcaccacatatccgcctgggcacatacaaaaagaataaacgcccctttgattgtcacaggtatgggtcactttatagctggcaggtccaagtataggattctcggcttccccgtaaagagcctgattgatcatagactggggatgctggatccgaagtcctacagcaaaggatttggattccatataaagttctttttcataaagcatcccaaaagtatctctggcgctgtggccgattgcaaggacacagatttgtgcaggaatcacttcctgatcattgacctttactgcctgcagcttatcctgttcaaaaatcagatccgttacctttgcattgaaccgcacggttccacccatttcctggatctgattccggagattttctacaattccaaccagcatgtctgtgcctaaatgaggcttttgctggtaaaggatctcctctcctgccccagcttccacaaaacgcttcaatacctcctggttacggccaaagatatcttttacaagggtatttaatttgccatcagaaaaagtgcctgcaccgccttctccaaactgaacattggagtcaggatcaagtacgccgtttttccagaatgcttcaaccttttgctgacgcagatgtgcttcctcaccccgttccagcagcaaaggtgcaaaacctgctttcgcaagataccaggcgcacatcagccctgcaggaccgcttccaactatgacaggtctggagtgtaatggggctggcccaggttgtggaaaacaataggccttttcattggttaacgtaatgtttttatcgtgaactttttttaatatacggttttcattatctgtttttacatctatggtataaacaaattttttgtcttctttatgtcttgcatccaaagactgtcttctgatctgataggtaaaatgctgattttgaagatgcaaggctttttgtattttcttttccagggctgctgtggtatgcccgatgggaagctttagctgactgattctgatcatatgttttctccctgcttataagaactacctgttactcctgcactgtgaagtcctgcacaggcaccgctggaccaggcccattgaagattatagccgccgcaggtgccatccacatccatcagctcccctgcaaaatacagtccgggatatagcctggactccatagtatgtggatcgatttcactggtatcaacaccgccggagcatacctgggcctgttcatagggcaggtatccacacacttccaagggaaagcgttttaataaacggggcagttctatatgacgtttttttgaataattacagattactttgttaagcttttcaggaaaaaggccgatcagaagttctctttcatttttttgtggacaccttttttttcgattttcccagaaacgatccagatcggaagtgtggatttcaggcataaaatcaatgctaagtgacactttttccttgttataaaggctgcggatcccatatcggctgatctgaaaaaccgggatcccggaaatgccatattcagtaagctggacttctccttctgccctatgcctggggcttccatcaattagaagagtcacatttgcctgtgtccgcactcctgcccatccggaaaaatagctgccgctgcatttgaatgctgtaagtgcaggcaggggcttgatgatcttatgtccaagtgctgctgcaagctgataacagctgccgtcagaaccggcaatcgctgatgcactggaacctccggaaaggatcaccgcatctgcttcataatgccaggtttttgtcaaaacggtccattcgccctttttctgatgcagttctgtagccttttcatttgtctttattttcactcccagccggacagcttccatgcatagaagttctgtcacacttgatgcctgaccgctgcgaggataaatataattgtttttatttaccgggcaaagacccagctctgtgaagaaatctaaagtatcagaaacagtaaatgctttcctggcaaaagatgaaaactccggatctgagccacggtaatcctctggcttctggctcaagtttgtaagattacattttccatttcctgtagcggaaagtttctttcctggcttatcattttgttccagcactgtaacacgggcaccggccctggcagccatcacagaggctattaaaccggaagcaccgccgcctacaattatcacatctgacataatattcctcagctattattgacagataccaggagcaaatgactttgaccctggtatcgcattattaataatttaatttaaagaaacaagctttgcatccacaagcttctgaagagacatcatcactcctagctttgcatgctcccaggtaagacctccctggaaatatacggcatatggcggttttaatggaccgtctgcagacagctcaatagaagaaccttggacaaaagcacctgctgccatgatcacctggctgtcatagcctggcatatcccatggttcaggggaaacatagctgtctactggtgcagcagcctggattccctggcaaaaagcgatcagaccttccggtgttcctaaagtaacagcctggataatgtcctgtctgggttctttggaatccggaacaaccggaaaaccaagccgttcataaatattggcagcaaacacagcaccttttaatgcaccttttgttaccataggtgccaggaaaaatccctggtaaaatgaccggtttactcctaaggtagcacctacctccatgccaaggccaggacatgtcatacggtaagaagcattttccacacattcctttgtacctgcaatataaccgccgataggcgcaagtccgccgcctgggttcttgatcagggaacccaccatcatatctgcccctacatcacttggctcaatggtatctacaaattcaccataacagttgtctaccatacagattgcatccggttttatggattttacaaaagcgattagttctccgatctgctttacagaaaaagaaggtcttgtctgatatcctttggagcgctggatcgcaacaagctttgttttttcgttaatagacttacggatattttcataatcaaatgtaccatccggcaaaagatctacctgacggtaagataccccgtattccttcaacgagcctttggaaggacggatcccgatcacttcctccaatgtatcatatggttttccggccggggctaaaagctcatctccgggtcgaagatgtccaaacagggcaattgccagagcatgagtgccacaggcgatctgtggccgtacaagggctgcttctgtatgaaaagtatcagcatataccttttccagtgtatcccggccatgatcgttataaccataacctgaggaagaaccaaagcattcttcacttactttatttttctgcatggccagaagcactttcatctggttatattctgctgttttatcaaactgtataaaacgttcttttaaactttcttctatttcgtggcaaaaatcataaactctggaagaaatccccagctgttcataaagctctttcataatattcctctttctttacagcatgaaagcatgtaatttaatatttcctggtcattataagcaaattgatccttgttgacccagatcacatcctgttctctgcggaaccaggtcaactgtcttttggcaaaatgccttgtatctcttttcagaatacataatgcttcatctaatggatattcaccttcaaggtatgcaaggatttctttatatccaagcccctgcatggaaaccattcccttatggcagcccattttctgaaggttttccacttcttttacaagtccgtttgcaagcatttcgtctacgcgggcatcaatccgctgatacaaaagctctcttggcgcattcaatacaaaatacgccagattgtacgggctgctcctctctttttgctcctgattatggctggagataggagttttattctgatgataaaattccagtgcccggatgacccgttttacgttattttcatggatctcttctgcgcttacagggtctacttctttcagcatctggtgcagataatgactgcctttttcctgtaccatctgctccagttctttgcgataatcgtcttcacactgtgcctgggtaaaatcaatatctcttgtaactgcctggatgtaaaatccggttccacctaccaaaataggaatatgtccatttgcataaatctgagacatggcttcttttgccatctgttgaaattttacaatatgaaattcttcatccggttccagtacatctaccaggtaatggggcacaccatccatttcactgggagtgattttggcagagccgatatccatatgccgatacacctgcatagaatctgcggaaatgatctcaccgccgattgccttggcaagggcgatggacaattttgtttttcctacagcagtagggccggttaaaaccagtaaaggctgcttcattatatgatcctcttgaatttcttttctatctctgtttttgtcatggaaatgatggttggccggccatgaggacaatgataaggattgttaagagtcagcagctggtcgatcagctggtcagcctcctggaaggacagtttgttatttcctttcactgctgatttgcaggccatagtagctagccttgctgtaaaaatattcaatgcatccttttccccttctgctgccaggttatctagcatttccaggaaaagatcttcctcggaaaatccgtacaggtctgccggtactgcgctgatactatattcacggccgccaaagggctcgatctcaaatcctgctttttcaaaaaactcccggtttgccgaaagacttgcttcctcttccagactaaggcttacgatcagcggagggctaagatattgggaatgtgtttcctgttctttaaattgttttacaaaacgttcgtaatttactttttcatgggcagcgtgctggtcaatgatgaaaaaacgatcatcaaattctaccagccaataggtttcaaacagctgaccgatcagccggtgacgacttctggattcaggtgccaacagcttttcctcaaacaactccagttgtttaggagcctcctgctcttgctttaggatttccgattccaatgttttgtgggctgaaatatttatggctgaatcagatatttcctgcgttttcattttttgcgttttggattcctgtattttcggctcctgcttgtcaataggatcggttgtatttgcagatgattcttctttatgaagatttccactgaaaagagcttcttctgcctttgtaaatgtgttgcttttataaaccggaagttcttcataaagtcgatccttctgaacaaccggatgtatattttgctgcatctgagtcagcctttttgtttcaaagggctcaggaatgtcttttcgttctacgattgtttttgctttggcagcagtttcctcaggacctggtgagacctttgggatcatttccctgtgagtcagtacatttctcactgcttcataaatgcaatcatatacttcaggtcctcttgcaaaacggacttccattttccttggatgaacattaacatccagatcatttcctgtcatctggatatgaagagagacaaatggaaatttgtgctgcataagaaagcctttataagcatcttctattgcttttgcaataatattattttttacatatctgccattaatataatagttttcaaaagaacgggtgcctctggatatttcaggctttcccacatatccctggatcttcagaaaatcattttcgtaagatacctctaaaagcgcccgggcaatatcccgtccataaacattatagatcacatctttaacattataatttccggaagtatgcagcttaacctgcttattctgaatatatttaaatgagatctccgggtgggaaagagccagctgctccattaatgaagaaatgtaatttccttctgctgcatcggatttcaggaatttgcttctggcaggcgtattataaaacagatttcttacaagaaatgtagtaccttccggagcccccatttcttccatagattgctctgctcctccttcgatcacataacggactccacttaatgcagacggagtttttgtgatcagttccacctgagaaactgctgcaatactggaaagagcctctccacggaatccgagagaggcaatgttttccagatcttctactttttcaattttgctggtggcatgacttaaaaacgcaaccggaacctgatctgcttccatgccgcttccattgtctgtgatgcggatcagccgtttcccaccgtctgcaatctcaaccgtcacagcagtagcacctgcatcaatggcattttctacaagctcctttactacggaagaagggcgctccaccacttctccggctgcgatcttatctatggtatgtttatctaaaactgctatttttctcaatatttatcaccatctgttcttgatcttgttctgaagattgtaaagtgtattcaacgcttccataggagtcagatttccgatgtctatggattttaattcctcaatgatatcattatcctgtactgtatcaaataaagacatttgtgccatatctacctgatcataaacaactttctgttttttctttggggctgtaagatcctttactgcggctgtaatatctgcatcgcttaattcttctaccagttctttggcacgctggatcacaggctccggtacgccggcaagcttggctacctggataccataacttttatcagctcccccttttacgatctttcggaggaatacaatatcatcccccttttctttgactgcaatacagtaattattcacacctgagatcttgccttccagttcggtaagctcatggtaatgagtggcaaacagcgtttttgcaccgcacagttttgtattgctgatatgctcgatcacagcccaggcaattgccagaccatcaaaggtgctggttcctcttccaatctcatccaggatcagcagacttttggaggttgcattccgcaggatattggcaacctctgtcatctctaccataaaggtactttgaccgctggccaggtcatcagaagcccccactctggtaaatatccggtcaacaatcccgatggaggctttctgagctggaacaaagcagccaatctgtgccatcagcacgatcagtgcagtctgtctcatataagtggatttacccgccatattggggccggtaataatggagatcctctttttatgattgtccaggaaagtatcattggcaataaacatgtcattttcaatcacacgttccaccactggatggcgtccgtttttaatgtcaatgatcccattttcgcttaccttggggcgcacataattattccgttctgctacaagtgcaagagatgcaaaaacatccagggcggctacagccttggcagtacgctggatacgtaccacttcatttccaactttatcccttacatcagaaaacagctggtattccaaagcataaagcttgtcctctgcaccaaggatcacatcttccaggtcttttaattcctgtgtaatgtagcgctcggcatttaccagggtctgtttgcggatgtaattctcaggcacaagttctttaaaggtattggttacttccagagaatatccgaatactcggttatatttgatctttaaggatttgatcccggtacgctcccgctctcttgcttccagttctcccagccatttcttgccatccgtacgggctgtgcggaatttatctacatccggattatatccttcccggatgatgccgccttccttctgggcaagtggtggatcttcgataatggcacttttgatcaggcctgttacatcttccagatcatccatatcttcgtaaatcctctttatgataggagcatcaaaatccttcaggatctgcctgatataggggatcatctccaaagaggatgcaaaggctaccaaatctctgggatttgctgatttataactgatccggctgatcagtcgttccagatcataaattggattcagatattcacggatctcatcacgcagcataggcttttctttcagctcttccactgccataagccggttgttgatctcatctacatcgatcagcggctgctccacataagagcgaagcgtccttgcccccatagctgtccgggttttgtccagtacccataaaagggacccccgcttctgcttttcacgcagggtttccacaagctccagattgcggcggctggaactgtcgatcagcatatatttctcagcagtgtagggatgaatactggtcatttgggataaagctgtcttctgtgtctctttcagataaagaaaaagcgaaccagcggcaatgacgccgctttcataatctgcgatcccaaggccatccagcgtattcacgtgaaaatggtcctttaatacgcgtttacaggattcatcgtcaaaataccatgaatccagagaaaaaatacagattcccagtcgattcttcaggtcatctgtatctattccgctcatataaaatgcatcgttacagatgatctcagcaggtacaaatttattgatttcatccaacagcttctgaggcttatctacttctgtgaggaaacagtcgccggtagtaacatctgcaatggcacagccaaaatggtcttcaatagaaacaatagacataagataattattctttgtttcatccaaggcctgtgcatccagtgtagtgccaggtgtaacgatccgtattactgcacgctttaccagtcctttggcaagctttggatcttccacctgttcgcagatggccactttatgtccacgctcgatcagacggtttatgtaggtttctgctgcatgaaagggaatcccgcacataggtgcccgttcttccagtccgcagtcctttccggtgagggttagttccagttcctttgaaaccattatggcatcatcaaagaacatttcgtaaaaatctcccaatctgtaaaaaaggacacagtccttgtactcttccttagttttacagtattccctcatcatcggtgataatacactaatattctccggaaacccagtgtttatgcggcttttagaagttccagatgttgatttgaccacattattacgatagttttttccctcgttagtgtttttgtctatactcaagtatttaaacctctctttaaaattttatctccatttgcaaaatcaggtttctgttccgtatttttgaatatacagttcgtattcgtcatctatatgttcttcttcaatgtgtgtataataattagtcattttttcatcagagtgtccagctattttctttactgtagcggcatccattcccgattgaatgcatcttgttacaaaagtatgacgggaaatatgaggatgaacatccattaaattcggatctctgttctctttttctgccagagcaatttcatgcttattaacaatcccaacaatccgcctgcattctgtttgagctgatgatggaagataacttcttcctgaagatgttgtaaaaatcagaccgggatatttttttaaaagtatatttgtttttccccagtttttccccagtttttctttatcacgatcctgtttttccttccagctcataaaagcagcaatcactgcatccgttaatggaacctttctattgctggcacttttctttggtgttgtaatctgaatagtagaatacctttcaggaagttcatttcctttcgaatcataatattttgtaactctgtttaaggttttatatacacgaagcttttcatgcttaaagtcaagatcacaccattctagggcaagtgcttcccctatacgtaatcctgtatgaagaagaataaaaaagagttcataataccgggtattcttgcagctctcaaggaaacgatgagtgtcatatacactaagacatttttcatcttcttgttcctgcattatcttctcatcaggtatttcacccggttcttctttaggcagtttaatatcggctacgggatctatgggtatcatttttccaccatatgcctttttgaaaagctgacggactacacttaatgattgtattaccgttgtacgtgcatatccttcttcttcgagtccctttatcatgtcaagaatatgtgttggacggacctctattaacctcatgtaaccaatatattctcttactcgctcaaaaccatttacatagttacttaaagtggttgctttaacagaatgcaccacataaataagcatccatttttcataccactttgaaacagaaattctaggatcatatcctgcaattccgggggaaacattagcaaggtaggcatttctttctttttttagatgttgtaaatttgtaccataaattgaaaacgtttttcctgtaccgcgaacgaaaattctggcctcatatcgtccatcttttctttgatataatccttttcctaattctttaccctttaagtttttgcccataacaccaccatcctttctgatgataatgcatggcactggatatatattttagcacaacaaaaaaaagctttcaagactgccgatctatccatttttgaaattttttcttatcaatcagtgttctgcgcccaatccgtaccatgaaacagttttcattcatcaatgatctcattgttttctcagaaagtcctgtaagctcacaggcttctttaacggatataagaattttatcgttgtttgcttccggctgtgttttttttcgcaacatatataaccggtcaatatctgcaggcagatgatattgaccgttcctcctctctattatataaattctaaaaaaggctgcctgctggccttatagattaatccaatgttctacgttcctgttggctgacataatactccactgcttcctgtaaactgcatccggtcctatggcttcgacttattacactgcttttatttattcctaatttctcacagcatactttaagcgatggataaacagttccatgatattcaaattccgggttacttaacatttttttcctttttctcgtcataaaatgtgtaaacgattcttcaagagaacaattcttatctcgtgctctttgtctcacacatatatcatcaataccatatttttgacaacatgcccggagacttcgatattctattcctttaaatgtaaatttttgtattctttcggcaatcatatctttattttcaataaaatgctccaatgattcttccatagtacaattcaatctatattttcttgaagatacactgtcagcgttgactccatattccagacagcattcttccaaagacctataggttttgtctctaaaaataaataccgacggctgtgtttccattctggctttctttatgaaatgatccaaagattcttcaatgctgcattctgttgttttggcacggttacgcacactggaagcattaacgccgtattcagcacaacatgctgaaacacttttataccttttccctttataaaagaattgcattttcggtgtttctgtttcctttttttgaatataatatttcacagcttcttcccatgtacacttttttcgccaagctctactgcgtacactagattcattaattccatagaattcacaacattgtccaagtgagatatatttatttccctcataaaaaaaagcctctttcgcacgatgcctttctttagacatcacctgattttcaggaatttcttcttttttcgttacttcttttggcatacaaccttccatatgagagataatttcttccataacatccgcgtgaggacgtttcgctttaaatactgctgaacttactgactttggctttaatccatacgcaagacaacattccgtaaaatttttgtattcttttccacggaattcaaaggctcttttctctttagatttgatataatgtgtaatcgcacgtgtagaagaaaccccatttttttccatatacaaacgtactgatataggatttatctccaggtcttcacaacattgaggcagtgatgggtatttcacaccatgatatgtgatttcatgtgcctttttccattctattgcccgttcaatcgcttcctgtggtgtgcattttcgattccacatatcggtcttgacagaatcttcgtttaaatcataaaattcgcagcaggtcttaatgctggcccattttcgatttcggaatatgatctctttactttttttcaattcaataaaatgtgtaatcgcttcttcagttctacatttatattgattctgatatgccattacactacggtaacatattccataaaaattacagcatttatgcttactttcaaaagttctgccattgtacacaaatttgaatttctccatgtaatttgatctgattttacgtggcataaaaacttctttcctccttttatcgtgattggatctgatacatgtcaaaacattttgccaaacaaaaaaagacactccaagagttcattttactctttttgtgtctttatcggttgatccgcagacgcggtataaagtataaaattctgacctcgtatcagaataaaatttgtgcgatctgccttgcaaaatgttcaattttatcgtatcattccagatacttaatgtcaatttcactacaggctttaaacagtagcagctgggtagtattttactcgtattcctgcgaatacatgcataaactgttgcatacatgcaaatgcccctccggtcttttcaccggacaagggcacttacagaaggctttttgtattcatgtcatacaaaaaatcacataaatcaagattggaaatgaaacaaacataagcccaaaatcaacaaagatcaatatcagccaaagcaactttaatttttcctccaaatctcatcctccgtttcgagtatatttaaggaattccataaaatcccttatacttaaataaaagagaatttcagagctgtttctgtaaatatccccaaattttcacaggaatttcattttactgttaagttacttttgtgatatatcaatctgctattatgcggcctgttcttccagttctcgattcccagcctccattaaatcttcctccagaatttcagcaagcaatttgttgcaatacccaacaccgtttacacgaacgcctttgctgcggagctcgtcaatctcttttttcctgagactctgactttttacagccagtttataatcttcttttgccagtttcttttttaattgtttctgccattttacaagaaaatcccttgcaagctcaatatcttcattctgctggttataaaaagtacgtgtctgccttatggtcccatccggttccacttcaagcgtatagtacgcctccgttggttgttctgcctttctcaaaaacaggatataggattcctgctggctcattcgttcataataggtttctgtattatttacgcagtgatgcatcagttttgcttcatacaaaatgtcatccactttttccggcacaacgatctgatactctttgtccgcatattcatattttttcaaatccctgcatatacgattcagacccggatacttcttttccagctctccggctcttaaaatcaaatcttttgcttctatctcttttatcatttcattatgtctctgcatgagctttcgtgcacggtagataacagaatcctgcacattcactccgacccgaattgccatattaagataatccttccatgttttgatcaggtctttcacggattccccactttctgctgcctgcttttccagataatttttgatctgtaaaggggccatacgatccataatgaacataagatccgctggtttaagcttttcccggcacatccacaaaatcacatcgtcatggatcagtttgttttgagttttttcaagcaacagccattgaagaaaaatctctcccccattgtttgtacgcagccttttcaagcggaacccgtcaattcccagtgcttttccaaggtttccggaatctttacaataaatctgtgctttattatccgtaatgtcttctgcgagatgataaagtcctgctttaatgagccgttccagataaggtctttctctaaccatttcaaaaaagtttaccggatctaagtactttttggcttttgcatattcgtagaatcctgtcctacggaatgtcctgttcttaataccatgcagtgattttccataaatatttcccatattatatctttcatatgtcatatagccaccgtaacctggatacagtggaacttgtaatttaccctggatccatcggctttcttttgtccaatgatgacggccgaaataatattctttcgtatttaattcttcatcatacaggattctccggcgctcaaagaaagaatatactggttttttatatgagctgcttactatgagcatctgaagctggaattctctcaaaacaaacacattatttccacaggtctgaagcaggtatgcagtctctttttgggtttctatatttttggcccggcctaatgctttatattgaatctgatgtctgcattttgggcaattccccactgtattatggtgaggatggctgattggaacttcgctttcacaccaactacaatatcctgtctgatctttcctgcggctgtaatgataaaaaataaaattctgggtaattccaacttttttctgccatctcagccagtctttcggaattttgggaagtctatccatacactgatcccagcttgtcagaattttttcatatttcattcccagcctccggtgtctctgctcacgttgatatacatacagtgcataaaaagcatcgtcatattcactttcaagatacttttggatcaacgctgtatccgcctctttcatataagaattttcctgatataaccattttgagaaaatggtcttatccagcatactatctgaccatttctttgtccggtaatcataccctttaaaaacatcgttctttttatcaatatataatgtatatacaggtttccgacagacaatcatgagaaaatctcaccacaataaatgaaaactggatactagctatacgttatgtagt

SEQ ID NO: 62 - DNA, 50057 bp, Unknown
  gut microbiota DNA sequence
gcttacagaagctggcggcattggaatcgtgggttaccatcaggatcgtagcttgttcgtcacgattcaggccggacagcttctccataagacttcttgcgttcttagaatccagagcacccgtcggttcatcggcaaggatcatttggggatgcaagatcagagcccttgctgccgcaacacgctgccgctggccgccggacatcttggacggaaacttatccagaacatcagtgatttccagatagtcagccaactgcttcagccgttggctgctttctgcttcggataccccatgcaaggaagtcggaagcaggatgttttccctgccagtcaggttgtccagcaattcaaagttctggaatagataaccaacttttttgccacggtactctgcaagagcctttcccttgagcgattgcagagtatcgccctccacctgaatgcttccgcctgtgggctgaatcacagttgcaatacagttgagaagcgtggatttaccggaaccactgcttcccataataccgagaaattctcccgacatgacctgaaaagtgattccgttcagggctctcgtctggtttggcaaagtcccatagactttggtaagattttcaatattcaaaattggtttcatgtgaatacctcccatccatttctgggtaaatgatagcacagaaacacaataaataacacttacagtcgctgtaaggattctgtttctgttttcagaacaagaatgacgcatcaagcggaataagtatatgttttgtatgagcgtcgggtggcaatgaaaaaaatatgccggactgcatggatagcaccctcggcaagatcatagtccatcagcttttggaggattttctcccggcaggactgttttatatctataaatcggtcgtgtcgtacagattgccgccatccacgctgagaaagtctttgatgcgcttattaagctgcggctcgtagtggtgcattgaatcctcggccattggtggaaaaacggaaaaggggatgtgaatggatttctgcaagccgtcggcgtgatctggttacatgaagatggatgcttttgcagaaaaatgccggaaatatagattcttgatcagaaggagtgcgtgggatcctgatgaactgtgatcatcggattgtactttattaagagcatgcatagaatggattgacagaaacggaatattcatatatcctgagtgtgttaaatgaataacaatcattaaagtatatacgcggaaaacagagggatagaataagaaagaaagaggtacaaaaatgaaagattttgcacaatgggatgggttcagcggaagccgctggaaagaaaagatcaatgttcgtgattttatccgtcacaattataccccgtatgatggagatgattcctttctggaagaccctacagaagccacagacaaattatggggaaaactgcaggaattgcagaaagcagagcgtgccaataatggtgtgcttgacatggaaacaaaggttgttacaggacttactgcatatggacctggatacattgatgaaagcctgaaagatcttgaaaaggtagtaggacttcagacagacaagcctctgaagcgtgcatttatgccttatggcggaatcaagatggctgaaaaggcctgtgagatgtatggatataaggttgatccgcagatccatgatatgtttacaaaatatgagtttaagacacataatcagggcgtgtttgatatttacactcctgaaatgaaaatggcccgccataataaaattcttaccggacttccggatacttatggacgcggacgtattgtaggcgattacagacgtgtagctctgtacggaattgatgccctgattgcagggaaagagaaagattttgcagacagcaaccgtcagggaatgcgccgttatgatttccagctgcgtgaggagatcgcagaccagattcgcgccctgaagggaatgaaggagatggcgaagatctatggctatgatatttcacagccggcagcgaatgcacatgaggcattccagtggctgtacttcggatatctggcagccatcaagacacagaatggtgctgcaatgagtgttggacgtatttccacattccttgatatttatattgaaagagatcttaagaaaggaatcctgactgagaaagaagcacaggaactggttgaccatatggttatgaaattccgtatggtgaaatttgcaagaatcgagtcttacaatcagctgttttcaggagatcctgtttgggcaactctggaagtagcaggtatgggagtagacggacgccatatggtaactaagaacgattaccgtttcctgcatacacttgaggatatgggaccggctccggagcctaacctgacagtgctttattcttccaagctgcctgagaactttaagaaatatgctgcaaatatttctgttacaacaagttctatccagtacgagaatgatgacgtaatgcgcccggtatggggtgatgattattcaatctgctgctgtgtatctgcaacagaaactggtaaggaaatgcagttcttcggagctcgtgcaaacctggcaaaatgtttgctgtatgccatcaacggtggtgtggatgagaagacaaagatgcaggtaggaccggaatataagccaatcacatccgagtacctggattatgatgaggtcattgcaaagtatgaccagatgatggactggctggcacatctgtatgtaggaactctgaatatgatccactacatgcatgataaatattactatgaagccgctgagatggcgctgatcgatacaaaggtggaccgttcttttgcaaccggtattgcaggattctcccatgtggttgattctttgtcagccattaaatatgcaaaggtaaaagcgattcgtgatgaagacggtatcactacagatttcctggttgagggagagttcccacgttatggaaatgatgacgatcgtgctgatgagattgcaagaaacctgctttccacatttatggacaagctgaaacatatccatacctatcgtgattccaagccaaccacttccattcttaccatcacttccaatgtggtttatggtaaggctaccggttcccttccggatggaagaaaagcaggcgagccactggcacctggtgcaaacccgtcttatggcgcagagcagaacggacttcttgcttctttgaactccgttgcaaaactggagtatgaggatgcattggatggaatttctaatacacagacgattaatccggatgcacttggacatactgacagtgagcgtacagataacctggttcatgtattggacggttactttgatcagggtgcacatcatctgaacgtaaatgtatttggaaaagaaaaactgatcgatgctatggagcatccggaaaaagaagagtatgcaaactttacgatccgtgtttccggttatgctgtgaagttcattgatctgacaagagagcagcagctggatgtgattgccagaacctgccatgaggttatgtaattacaaagtgctgtaattgaaaaaacacgtaatataagtcccgggcaatgtttggttgcccgggatactgttaagtaaaggaaaaataatatgttaaaaggctatgttcattctttggaaagctttggatccgtagatggcccgggagtaaggtatgtgatctttctttcaggatgtgccatgcgctgtcagttctgtcacaatccggatacctggaatatgaaggatggaaaagaatatacagcggatcagcttttgaaaattgcactgcgttataaatcttactggggcgaaaaaggaggcatcacggtaagtggaggggaacctcttttacagatggagttccttacagaacttttcaaaaaagcgaaggaagcaggcattcatacgactctggataccagcggcaatccatatatcgcaaaagaaccctggcatgcacagtggctggaactgatgaagtatacagatcttgtacttctggatattaagcagattgatgaacaggagcacaggaagcttaccggacagacaggagagaatattctggcaatggccagggagctttccgatatggaaaagcctgtatggatccgccatgtgctggtacctggcggaagtgataaggataagtatctttaccggcttgcagattttatccacacactgaaaaatgtgcagcgtgtggaggtccttccatatcatacattaggcacttttaaatgggaaaaactggggattccctatcctttagagggagtaaagcctcctacacaggaaaggatcgacaatgccagaaagatcctgggtgctatataaaaggtcaaataaagaaaacccggaaacaacaggcatgagcctttaagggctgacagtttgaccctgctgctgttcatgggaaatagatgcttctcaaaaaacaatagacatttatgctaaaataaagtataatgttgcaagattgttttagcattaatgaacaaaaagtgaggtgtatccatgaacgatcaagttaaaatgacgcatgaccgccagagaggaagtttttccggaaggataggttatgtgcttgcagtagctgggtctgcggtaggattgggcaatatctggcgttttccatatcttgcggcaaaatatggcggagggatctttctgctgatctatattcttcttactgctacctttggctatgtactgatcatgtcagagacttctattggaaggatgaccaggaaaagcccggttggtgcttttgaagcctttgggaaagggaaagcaaataaagtaggcggctggctgaatgcagtgattcctatgctgatcgtgccttattacagcaccattggcggatgggtagtgaagtatcttgtggagtacatccgtggagatgtacaggtacttgcacaagatgggtatttcagcggttttatttctgattcatggcaggcagagttctggtttattatttttgcaattctgatttttgccattattctcggcggtgttgagaatggcgtggaacgtatgtccaagatcatgatgccggttctggttgtactggcagtggttgttactgtttattctgtgaccagacccggggcactggaaggcgtgaagtatttccttattccgaatttcagtcatttttcatggatgacggttgtggctgctatgggacagatgttttattccctgtctattgcaatgggtattctgtacacatatggttcctatacacgtaaagaaatggatcttgaaaaatccaccacccaggtggaaatttttgatactgccattgctatcctggcaggacttatgatcattccggcagtatttgcattttccggcggagatgcaagtaatctacaggcaggaccgtccctgatgtttatcacattgccaaaggtttttgccagcatgggtattggcacagctgcaggtatcctgttttttgtattggtgcttctggctgcgcttaccagtgccgtttccctgatggagacaagcgtttccacatttatggatgaacttcactggagccgcaggaaaagctgttttctgatggctgtgatcatgctggtacttggtactgcttcctctatgggatacggacttttggatttcataaagatttttggaatgagcttccttgatttctttgactttatgaccaattctgtaatgatgcctctggcagcactggctacatgtattcttgtaataaaggtgatcggttttgataagatcattaaggagattgaaagctcttccgcatttaaaagaaagaagctttatgttttctgcattaaataccttgcaccggtatgcctgatcatcattttgttaagctccattgcaaatgtattaggaattatttccatgtaatgatacaggtaaggattgtgagcatgtaaagcatgaatccattgattatttcaggaagaaatgaatcagtttattattcagttttttatatggctggtatctcattggcagatccagccatgtttttttatctacaatacttttgaaatgggagaaggtacaaaagccttctttgccgtgataaccacccataccgctttccccaaagcctccgaaagacatttcgctggttgccaaatggatgatggtatcgttaatacatccgccgccaaagccgcagctggcagtgatctttttggcggctgctttgttctttgtgaaaaagtaaagtgcaagaggatgaggcatggaatttactttctggatcacatcatccagattttggtaggtaagtaccggcataacaggtccgaagatttcttcttgcattatcttatcctggaatgttacaccatccattactgtaggcgaaatctgtaaggtcttaggatcagatgtaccaccaaacaccactttactttcttctatcagactcaggatacgattaaaatgcttttcgtttataatctttccataatccgggtttgacagaggcctttctccaaactgtgcagtgatctgtttttttacttcctgaataaatctgtcttttacagattcttggcagtaaatataatcaggagctacgcaggtctgaccacagttcaggtattttccgaacacgatacgttttgctgcaagcttcagatctgcagtctcatctacaatgcaggggcttttgccgcctagctccagagtcactggggtaaggtgtgcagaggcctggcgcatcacttcacgtcccaccgcctggcttccagtaaaaaagatatagtcaaagtgttgctgaagaagtgctgtattttctgcccggcctccattaacaactgctacgtactcctcagggaaacattgggaaagcagttctttaatcagggcactggtggcaggagagtaggcacttggctttaagataaccgtatttcccgctgcaattgcatctgctaaaggatcgatagaaagcaggaatggataattccaggggctcatcactaataccacaccgtaaggggagggcttggtatagcttctggaatggaactgggcaagaggtgtatgtacccgcttttcccgggaaagggagcggatgtgttttagcatataggaaatttcacttaataccagcccggtctcacacatatagctttcaaagctgctttttccaaggtcagaaaggattgcctgagaaatagctttttcattttgtgaaatacaggcttttaatttttgaagagcctggatccggtaagaaatatctaaagtttttcctgtataaaaaaaatcacgttgtttatttaccagtgtttggatctgagtctgattcacagggtgtcctccttttcttcatcaggtttttctataaggtcataatagaacgtctcaagctcatttgcgttcataagtacaggaaccgggtacagagggtttgcttccttgtcagcataatgtgccagctttggaatatcctcctcacggatctctggaatagtgtccccgatgtcaaatcgctttttcatgtccttgatggcctgtatgaaggcagtagcagcttctgcttccggggtgcttttgtcagcgataccggcagcaattgccagtcttgccagttttttgttgatcacactgccgtatgcttccaggacaaatggaagcaggatggcgttggcaagaccgtgaggtacattgtattcaccgcccagggaatgtgcaactgcgtgcacatagccaacataggattttgtgaaagcacagcctgcataataggaggcacggagcatatttttgcgggcttccttgtcagaaccgttttcataggcctgatccagattctcaaagatcagctttactgcatccagcgcatttttccttgtgccaggagtagtggaattgccgatgtacgcttccacagcatgggtaagagcatccattccagttgttgcggtgataaacggaggaaggcttaatgtaaccttgggatccagcactgcgtatctggggatcagcggaaagtcattgatggcatatttatgccttgtctgtgcatctgtgatcacggctgccaatgtggtttcgcttccggttcctgctgtggtaggaattgcaaccagaagcggcagctttttgtgtattttcaggattcccttcatttgggcaagggattggtgaggcttggcgattcgtgcgcctactgctttggcacagtccatactggagccgccgccaaatccgataatggcctggcatccggctgcgtaccacaggttttctgcttcttccacattgtcagtggtaggattggctacggttttgtcataaatggaataagcaatcccattttgtttcagtgctgtttcaagacgtacagtaaggccgagtttcctgatccccaggtctgtaatgatcaacacgttgtcaattccttttttctgaaaaagctcaggcagagcttttacacttccgataatctccggattacggtaaggaaggaatggaagggcaaatttaaatgcattttgaaaaatgcggcagtagatttttcttgctttattcatggataggttaacctttcaatgttagttttgtgtttaaaacatctatattatagcattggattttatgttgtaaagaaaaatatttgaaaatcaaacaatttgacgccgggagtaagatctgattctgcatgagtttgttcataagacatggaaaaaagtatctattatgtggtatgataaaaaaagctgccagggtatgggacaatatctggcaaggtatggaataaagtctgtcagagtatggaataaaaactggcagggtatgaaacaaaaactgacagcttaaggaatataaaagagagaaaggggcacattcctatgggagagacctcagaaaataataaaaagaaacatatttgtattgccatgctggctcatgtggatgcagggaaaaccacgctgtctgaaagccttttatatctgtgtgggaaaatacggaaaatgggtcgggtagatcatggagatgcatacctggatacttttgatctggaaagggagaggggcattaccattttttccaaacaggctgtttttcctatgggcgatttggaagtaacgcttcttgatacaccgggacatgtggatttttcggcagagatggaaagaactttacaggtattggattatgcagttcttgtgatcagtggtgcagatggagtgcagggtcatacccagacattgtggcggcttctggagcgttatcaaatccctgtgtttatatttatcaataaaatggatcaggaaggaacagacaaagaagctctcctggctgatgtacgcaaaagattaagcgaaaattgcattgattttacaaatgggcaggaaaacacggattttatggaaaatctggcagtatgtgaggaaagcctgttggaaaaatatctggaagaaggcagcctttccagagaagagatcttaggcctgatcagaaaaagaaaggtatttccctgctattttggatctgcgctgaagatgaccggactggaggattttgtatatggattgcagacctatatgcagccggaggaatatggtgatacctttggggcgaaggtttacaagatcaccagggatgatcagggaaaccggcttacttacatgaagatcacaggagggagcctgaaagtaaaagaaaatcttaccaatcaaagagcaggctttagacagccggaagatcagatttgggaagaaaagactgatcagatccggatctattccggagcaaagtatgaacttgtaaaagaagcagaggcaggtacagtgtgcgctgtgacagggctgacaagaacctatccgggagaaggattaggatgtgaggcagagtcacaaatgccggtccttgagcctgtattgaattatcagatccagcttccggaggggacagatgttcatctgatgctgaaaaagctgaaagaactggaagaggaagaaccacagcttcatattgtgtggaatgagcagttaggtgagatccatgccatgctgatgggagaggtacagacagagatcctgaagaagctgatctgggatcgttttcatgttgctgtggaattcggaacagggaatattgtatataaagaaaccatcgcacagcctgtggaaggggtggggcattttgagcctttacgtcattatgcagaggtgcatcttctgctggaacctggagagcgaggcagcggcttgcagtttttcattgcctgcagcgaggatgtactggataagaactggcagaggctgatccttacccatctggaggaacgggagcatcctggggtacttaccggcgcacctattacagatatgcagatcactttactgaccggccgtgcacatcagaagcatacagaaggaggagatttccgccaggcaacttaccgggctgtgcgtcagggacttaaaaaggcaaaaagtattttactggagccatattatgaggtacgcctggaggtaccggcagagaatatcggccgggccatggctgatttccagaaaatgcaggggactttcggagcaccggaaacagaaggagacatggcagtactgaaaggctatgcccctgtaaaggccatgcgggattatcagagagaggtgttttcttatacaagggggcggggacgtctgttctgtgctttaaagggctatgaaccttgccaggatcaggaaaagatcgtggcagagacaggatatgattctgaaagggatctggataatcctacaggctctgttttctgtgcacatggtgccggttttctggttccctggtatcaggtggaagaatacatgcatgtggaaagccagctgtcaaaaggagcagaagaaaatgaggaaaacatttccatttcatcttatccgtccgggcattcttcaaaaagttatgtgggaagctatgaggatgaaaaggaactgcaggccatttttgaaagaacctttggtccggtaaaaaaggacagaggggcaggctttcgctcggtagtccgggcagatacggatggcaccggttatgtgccaaagaagaaaaaaacacatcaggaagagtatctgctggtggacggttataacattatttttgcctgggaagacctgaaggagctggcagcagtgaatatccatgcagcccagaccaggttaatggatgtgcttagtaattatcagggaatcaagaactgtaatctgatccttgtatttgatgcttacaaggtggaaggccatcgggaagaaaccctgaaatatcacaatatttatgtggtttatacaaaggaagcagaaacagcagatcagtatattgagaagacggtgcataagatcgggcgacagcataaagtaacagtggctacttctgatggtctggagcagatcattatcctggggcagggagcccaaaggatgtcagcaaagggcctgcaaaaggaaattcaggattcagaagaacttctccggcaggagtggcatcagcacaggcagagcagccgcagttatctttttgacaatgtatctcaggaactggcagattatgtggagcaggtacgcctgggaaatgataaagaaaaatgaaatcgggaggcagtaacatgagggaaaaacttacaaagcaggatgtggagaagatacagcaggagattgagcacaggaagctggtgatccgtaaggaagctattgaggcagtaaaggaagcacgggcccagggcgatttaagtgagaattttgagtactatgcggcaaagaagcataagaatcagaatgaaagccgtatccgttatctggagaatatgctgaaaacagctaccattgtatctgaaagctccaaagctgatgaagttgggatggatgacattgtggaagtatattttgaagaagaggatgaaacagagaaatataaactggtcacttctattcgcggcaattctatggagaaccgtatcagtattgagtcgcccatcggtaaggcattaaaagggcataaggtaggtgaccgggtagaagtgaaggtgaatgacagctacagctattttctggagattcgttccatagataagactcatacagaggatgaagaaatacggggattctgatgtttggaatcctttgatgcgctttaaaatccattttgaccccaactatgatacctacggattgtttcgtgctatgtattcccacaatcctactttggtatcatcttataaataattttacaaagattttacatatccctgaggagaagtttacacgcttttcttacaatcaatgatagtgccaaggtacaaaaggcacaaggttacatatattttacgactatggggataggagaaaaaaatggactttttcagcgtattaactcttttaggcggtcttgccatgttcctttatggaatgaacgtaatgggcgatggacttgaaaaggtatccggaggtaagcttgagaagattctggagaaccttacatcaagtcctgttaaagcagtgctgcttggcgcagctgttacaggtgtgatacagtcatcatcggcaacaacggttatggttgtaggatttgtcaattccggtattatgcagctttctcaggctgtaggcgtgatcatgggagccaatattggtaccactgttacgtcctggatcttaagccttgcaggcattcaaagcagtaatttctttattcagcttttgaaacctacgtcttttgcaccggtgcttgcccttataggtgtggttttcctgatgtttttaaaggatgccaagaagaaggatatcggtactatactgattggattttccgtgctgatgtttggaatggaaactatgagcggggctgttaagcctctggcggaagtccctgaatttacagggatccttctgaagttttccatacctgttttaggtgtgctggcaggtacagtgcttactgctgttatccagtcatcttctgcatcagtaggtattttacaggctttatgtattacaggagccgtaccttacagtgcagcgatcccgatcattatgggacagaatatcggtacctgtatcacagctcttttatctgcgattggtgcaaataagaatgcaaaacgtgcagctatggtgcatctgtattttaatataatcggtaccattgtttttatggttgtattctataccgtaaatacggctgttcattttccgtttttaacagaagcagcaacccctgcaggaattgctgtgatccacagtgcatttaatatttcagttaccattcttttgcttccattctccaagattctggtgaagcttgcctgtcttacagtacgggacaagggaacagaagaagtggtttctccggaggataaggagtttaagattctggatacccgtttcctggaaacacctgctcttgctattgagcagagccgtaatgcagccagaaacatggcccaggaggcaaaacaggctctgaggatcgcattaacattgattgatgattacagtgaagaaaaggctttacaggttcagaagatcgagtccaaggtagaccggtatgaggatgaacttggtacatacctggtaaatctgaaccataaaaatcttaccttggaagacagccagagtctttctatcatgcttcactgcatcggcgattttgaaagaatttcagaccatgcagtggagatcaaggatgcggcagaggaaatgcatcagaaaaaattgcatttttcacagaaagccctggcagagctgcatgtactggaaaaagctgtaaatgatattgtggaaatggcttatcaggcttttgcacagagaaatatggggcttgcagctgctgtggaacctttggaagaggtggttgatgagctgtgccgcgaactgaagaaccggcatgtggacaggctgcgtgcaggggaatgtaccatcgagatgggatttatcctgtctgatataaatacaggactggagcgtgtagcagatcattgttccaatattggcgtgtgtgtgacccaggtaagggagaatctttttgatacccacagccatcttgatatgatcaaaaacagtccggatgagaaattttacagggaagttgaaactgacaggtcaaagtatgtacttccgtaaagaagtggagcaaaatatatggataagtggatctattgcgttgaagatgaaagtaatatccgggagcttcttgtatatacgctggaagcaaccggctttaaggcaaaaggctttgctgacgggaaaggtctgtgggcagcattaaaagaacagataccggacatgatccttttggatctgatgcttcctggagaggacgggtattctattcttgaaaagttgaaaaaggatgaaaacaccagggacattcccatcatcatggtaaccgctaaggatgctgaatatgataaggtaaaggggctggaagccggcgctgatgattatattaccaagccttttgggatgatggagtttgtagccaggatcaaggctgtgcttcgtcgtaccaacagaaacagcaatacagacaaagaactgaaatgtggagatctgcgtattcttgtgggacgacatgaagtattctgtaaggatgaaaagatcgagcttaccagaaaagaatttgaactgctggtatatcttgtggaaaaccggggacttgtaatgtccagaaatcagattctgtgtcaagtttggggatatgaatttgagggagagaccaggactgtggatgtacatgtgcgaagcttgcggcagaaactgggagaagcaggaaatatggtggaaaccgtcagaggggtaggctataggatcgacaaataaagagcaagcgaggggaaatgggatgaaacagaggattttaagtcataccagttttattatagtgctcacagttcttcttacgtttggagcagcatgtggtgtgatgtataataaagtcaatgcaaacatgaaggatggggtccgcaatgaggctgaatatatcaagtccgggatcgaagcttttggcaatgaggattttaccgacaagattgaaaatatgaccacaagcaggatcactttgacagataaggatggcaatgtacttctggataatgaagcagatcctgcggaaatgaaaaatcacagcaaccgtccggaatttatccaggcgatgaaagaaggttctggtgagagcgttcgctattcagaaacactttccaaacagacctactattatgcagtgcggctttctgatggaaaggttctgcgtatagcaagaaccacagacagtgttttccataccttaatgtccagttttactttacttggacttctgatggtatgtattatccttgttgagtttatattagttcagaaacagacagataagatgatcaagcctatcaataatcttgatctggagcatccgctgaagaatgtgtgttatgaagaactgcgtcctcttctggtacgcgtggatgaacagaacaggcagctgtccaaacagatggaagaactgaaaagtgcacaggctatgcggcaggaattttctgctaatgtatctcatgagctgaaaacaccgctgatgtctatttccggatatgcggagctgatgatgaacggaatggttccggcagagaaaataactgatttttccggaaggatttatcatgaagccaccaggctaagcagtcttgtggcagatattatccagttgtccaggctggatgaaggagaaagcagcatggcatttgaaagggtagatctgtatgaactggccaaggatgtgcagtgcaatctgcgtcagcaggcggagaaaaaacatatccagcttaccttttcaggagaatcctgctatgtgcagggagttcgtcaggtcctgtatgagatgttgtataatattgcagataatgcagtaagatatacgccagacggcggacaggttcacataagcgcaggcaagaaaaaaggcaggactttttacagagtagaggataacgggatcgggatccctaaggcagagcaggggcggatctttgaaagattttatcgggtggacaaaagccactccagggaaaccggaggtacagggcttggtctttccattgtgaaacacggagcattgatccatcatgcaaaggttactgtggacagtgatctgggaaaaggaacagctatggaaatcttgttttcccaggataagtgatcaaatatgagtgaaagagcagcggcgaaacacagaataatgtttcaccgctgttttgtatttcaccggggatgtcaggcaatggtgattagtgtctttagaagttgatatctggcagttttttttgcgatatggtataatctaagtgttgcatatcagagcagctatttcaaaatgatttcaaatgcaggaggttgcataaaatgaaaaaaccggtattagtggtaatggcagcaggaatgggaagcagatacggcggattgaagcagatcgatccggtagataaggaaggacatattattatggacttttctatttttgatgctgtaaaagctggctttgaaaaagtggtttttattataaaaaaagaaaatgaacaggatttcagagctgccattggagacagactcagtgaaaaaatcaaggtttcttatgtttttcaggaactgacgaatctgccggaggggtatgtggttccagaggggagagtaaagccctggggaactggacatgcgatcatgagctgtatgggtgagattgatggcccctttgtagtgatcaatgctgatgatttttatggaagccatgcgttccaggtggcatatgactatcttacaacccatcaggatgaagagggtatatacaggtatatgatggttggctacagactggaaaatacactgacggataatggacatgtggcaagaggtgtatgcgagatggatgcacagggttatctggcagatattcatgagcgtacccatattgaaaaaagagggaatggggccgcatatacagaggatgaagggaagacctggatccctatttctggtgatgccactgtatccatgaatatgtggggattttcggagagcattcttggggaattacaaagccgattttcagcttttcttgaagaaaatcttaagaaaaatcctttgaagtgcgaatacttcctgccatttgtggtagatgagcttttaaaagaaggacgtgctactgttgcagtagaaaagtctcaggacaaatggtttggtgtgacttacaaagaggataagcctatggtaatggctgcgatacagaacttgaaagatcagggtgtatatccggcacatttgtggaaatgatcttttggtacggttattatgtaatattcatgtaaaaaacattgtagatacatataaatagtggtatgatgtgtcaggaatatacaaaaggacagttaattggggcatttggtatattctgtgtggcatgtccacaccagatacataatgcaaaagaggtagtataataaaggaggtaaattatggctattttagttacaggtggtgcaggttacattggaagtcatacagttgttgaactgcagaatgcaggatatgatgtagttgtacttgataatttaagcaatgccagtgagaaatctctgaaacgtgtagagaagattaccggtaagccggtgaaattttatgaggcagatattcgtgacaggaatgctctggaggagatttttaacaaagaggatattgattcctgtatccattttgctggactgaaagctgttggagagtcagttgctaagccgtgggagtattatgagaataatatttcagggactctcacacttctggatgtgatgagaaagcatgatgcaaagaatatcatcttttcctcctctgcaactgtttatggagatccagctcagatccccatcactgaggaatgcccaaaaggacagtgcaccaatccatatggctggacaaagtcaatgctggagcagatcctgacagatatccagaaagcagatccacagtggaatgtagttcttctccggtactttaatcctatcggagcccataagagcggcaccatcggtgagaatccgaatggtatccccaacaatctgatgccttacattacacaggttgctgttggaaaattgaaagaactgagagtattcggaaacgattatgatactccagatggaactggagtgagagattatattcatgtagtagatcttgcaaagggtcatgtgaaagcactgaagaagctggaagataattccggtctgagtatttataatcttggtacaggaaaaggctacagcgttcttgacattgtaaagaactttgaggctgctacaggcgtaaagatcccatatgtgatcactccaagacgtcctggagatattgcaacatgttattcagatgcaaccaaggcaaaggaagaacttggctgggaagctgaaaatggaatcagggagatgtgtgaagactcctggagatggcagtccaataatcctaacggatacgaagattaagatattgacataaaaagcaccggtcagaaattgaccggtgtttttttgcaaaaaccagaaaaccgcttactggtatttcttttctttctcaaatttgggttcacaggtaagtgcaatgcccagcttgcggaaagcttcaatatctacagaagacagcattacagaagtatgcgcctggcatccggaaagcttgggaagctgttcaagggcaagcctggcatccggattggtagcagcactgatggataatgcaatcatagtctcgtccatatgcagacggggattcttgctgccaagataatttgtctttaatgcctgaatggggcggatggcatccggggagatcacatgcttttcgtgatcaatgccagccagctcttttagtacatttaaaagcagagcagaagaagcaccaagcaggtcggaagtcttgcctgtaatgatcctgccgtcttccagctccatggcagcagccggaccaccagtctcctgttcgcgtttcaggctggcaggtactaccttgcggtcttcaagggaagcgtgcgcctgtttcaggagaagttcgatcttataaacttcatcctccttaccagtgccggaaaccagggcctgcatgctcttatagtaacgacggatgatttcttgtctggaggcctcttggcagacttcgtcgtcaataatacagttgcctgccatatttactcccatatccgtaggggatttgtaagggcatttgccaatgattttctcgaacatagcctgaagaaccggaaagatctccacatcacgattatagttgactgtagtctgtccataagcttccaggtggaatgggtcgatcatatttacatcatttaagtcagcagtagctgcttcataggctaagttaaccggatgcttcaaaggaatattccagattgggaaagtctcgaactttgcgtaaccggcagcaacaccccgtttgtattcatggtaaagctgagaaaggcaggtagccattttaccgcttccgggtccgggagcagtgatcaccaccagtggtctgcttgtcttgatataatcgttcttgccataaccgtcatcgctgacgatcaatgctgtattacttgggtagcctgggattgaataatgaagataaacagggatccccattttctccagacgtttcttgaatgcgtttgcactctcctgtcctgcgtagcgggtaatgcatacacttcctacatacaggcctctgcttgtgaatgcgtcgatcagacggagaacatccacatcataagtgatgccaagatcaccgcggactttattcttgtcaatatcggcagcactgatgacgatcacgatctctgcctgatcagaaagctgcatcagcatcctgagcttgctgtcaggctcgaatcctggaagaactctggaagcatgataatcatcaaaaagcttaccaccgaattcaaggtatagtttgtttccgaatttgccaatacgttcccggatatgttcggactgcattgtaagatatttttcattatcaaagccgattttcatttgtcatttcctctccatcatctataagaatcattctatcagtatactacagaatttcctgcttgtgtgaaagtatttttagttttttgtgaaaaaagatgagagaaaaaatcagagtattttcataatctggcagttgatttatcctggatttctctttataataaaaaggatacaagaggaggaacaaaatgaataataatttggacaataaccccaatggcaagcgtcctgataacagggatcccaggaagcagggacccaataaaaatcatcagtcaattctggcttttctgatctgtcttttagttacattggtatgcttaagtctttttaccaatatgcttcaggatcattccagcgagatcacatatgacaaatttattgatatggtggaaaaggatcaggttaaggaagttacccttcagtctgatacattgacgattgtgccgaagaagcagacaagtccctattcagagatcacctattatacgaatcaggtagaggatgagacagctcttactaagcgcctggagggtacaggtattattttcaagtctgaaccgccggatgcatttggcgaatttatgtctatgatgctttctgtgcttcttcctacactgcttttatttgtgcttttgatgttctttatgcgccgtatgaataaaggcggcggtatgatgggagtgggcaaaagcagagccaaggcttatgtacagaaagaaacagggattacttttaaagatgttgccggacaggatgaggcaaaggaatcccttcaggaagtagttgattttcttcataatcccgggaaatatacagagattggcgctaagcttcccaaaggagcactccttgtaggacctcccggaacaggaaagacacttctggcaaaagctgtggcaggagaggcgcatgtaccgtttttctcattgtcaggatcagagtttgtggaaatgtttgttggtgtaggtgcttcccgtgtaagggatcttttcgaagaagcgaagaagaatgcaccatgtattgtatttattgatgagattgatgccatcggaaaaagcagggattcccattatggcggaggcaatgatgagcgtgagcagacactgaatcagctgttggctgagatggatggctttgatacatctaaagggctgctgatcctggcggctactaaccgtccggaagttctggatcctgcactgcttcgtccaggcaggtttgaccgccgagtgattgtagaccggccggatctgaagggccgtgtagatattctgaaggtacatgcaaagaatgtactgctggatgatacggttgattttgatgccattgcactggctacttcaggagctgttggatctgaccttgccaatatggtaaatgaagctgcgatccttgcagttaagaatggccgaaaggctgtatcccagaaggatcttctggagtcggtagaagtggttcttgtaggaaaagaaaagaaagaccgcattttgagcccgcaggagcgcaagatcgtatcttatcatgaagtagggcatgctcttgtaagtgctctgcaaaaagacgcagagcctgtgcagaagatcaccattgtgccacgtacaatgggagcacttggatatgttatgcaggtgcctgaagaagagaaatacctgaatactaagaaagaactggaagctatgctggtaggctatcttggcggccgtgccgctgaggagattgtctttgatactgtgactacaggagcatctaatgatattgaacaggcgactaaggttgcaagagcaatgatcacccagtatggtatgtccgagaagtttggtctgatgggacttgccacacaggaggacaggtatcttaccggtcgtgctgtgctgaattgcggagatgacactgctacagaagtggaccatgaggtgatggcattgatgcatcgctcttatgaagaggcaaaggcattgctgagcggacacagaaaagcattggacaagatcgctgattatctgatccgcaaagaaacgattaccggtaaggaatttatgaagatcttccgggctgtagaaaagggaatggatgtgccggagaatctggatgagctggatcttaaccaactggaggacaaagagcctactcaggcagaaaccgataaggaagagagccagatcttagaggtatctgctcagacagagccaacagaagaataacagatgtgaaatggagccgggaatacagcttgaagcaggtatcccggctcttatatcagctgggagtcaatcccccagctgatatagcctccggcaggattgcagaggtgcgcaggagaagtatgtcatgcaattgcatgacgcgcacctcgcagcaagaatgccgaggcattcttgatatgacggcgaaaggatccataatatgtttttgatcgaagaggaactgaaaaaattgcctggaaagcctggcgtctatattatgcatggggaaaaggatgagatcatttatgttggaaaggcggtcagcctgaaaaacagagtgcgccagtattttcagagcagcaggaataaaggggcaaagatcgagcagatggtgacacacattaccaggtttgagtatattatcacagactcagagctggaagcccttgtactggaatgtaatctgatcaaggaacacagacctaaatataatacaatgctgaaggatgataaaacatatccttttattaaagtaactgttcaggaaccctatccgagagttctgttttccagaaccatgaaaaaggataaggcaagatattttggcccctatacaagtgcaggggctgtaaaagatgtgatcgagcttgtaagaaagctgtataaggtgcgttcctgtaacagaaacattcctaaagaaaactataatgatcgtccctgcctgtattatcatatggagcaatgtatggcaccctgtcagggcaatgtaagtcagcaggagtataaaaagaatattgatcaggtactgaagtttctgaatggggattttcaggaaacaatccagcagcttacccataaaatggagacggcatcagaagaaatgcggtttgaggatgcggcaggatacagagatctgatacagagcatacgtaagattggtgaacgccagaagattacaacttacggagaagaggacaaagatattattgcagtttctatggatgaaagtcttgatctgagagaacaggatgcagtagtgcaggtgtttttcatgcgaagcggcaagctgatcggaagggatcacttctttctgcgggtggcaagaggagataaggcagagcaggtattgtccagctttctgaagcagttttatgcaggaacgccttttattccaagggagatcatgctgcagaaagacattgaggacaggcaggtgatcgaagagtggctgtccgggcgcagaggtcagaaggtgcatatctgtgtacctgtaaaaggaacgaaagaaaagctggtggaattggcactggaaaatgcaagaatggttctggcaaaggacagagaacgaataaaaagggaagagggcagaaccattggagctgtaaaggaagtagagaactggctgaacctgaaagatctggtgcgtatggaggcttatgatatttccaatatcagtggctttgagtcggttggttccatggtggtctatgagaagggacgaccaaaacggtcagattaccgtaaatttaagattaaatgggtgcagggtcctaatgactatgccagcatggaagaagtgcttacaaggcgttttactcatgaaagcaagggagaatttgacagcttttccagacttccggatctgattctgatggacggtggaagaggacaggtaaatatcgctttgaaggtgttggaaaatctgggaatggatattccggtatgcggtatggtaaaagatgataaccacaggaccaggggactgtattacaataatgtggaaatccccatcgacaccagcagcgaaggctttcatctgatcaccaggatccaggatgaagcacacagatttgccatcgaatttcatcgttccctgcgaagcaaggagcaggtacattctgtgttggatgatattccggggatcggcgatgccagaagaaaagccctgatgcgtaaatttaagtccctagagaagatccaggaagcttcagtggaagaattggcatctacggaaaccatgaatatgaaaagtgccagccaggtttatgatttttttcacaaaaaaggaaaaaatatataaattattttcaacgcgtgttataataaggacgaatatttctaaaagcgaggagatagaccatgaaaggtgtgcagttgacaaaaatggctcaggagctgaatctgacaaatctgacgccagatattgattttacagatatttatattaaaacagctgagattaaccgtcctgctcttcagcttacaggatacctggagcattttgcaaatgagcgggtgcagattatcggatatgtagagtatacctatttgatgcagctgaatgatgaagagagacagttcaaatatgagcgctttatttccagcaagattccctgtgttgtatttagtaccatgacaaggccgtctcaggatatgatcgacctggcatataagtataatgtgcctacttttgtaacagagagaagtacctccagctttatggctgagatcatccgctggcttggtgtacagcttgctccctgcatttctattcacggagtgttggtggatgtatatggtgagggtgttctgatcacaggcgaaagcgggatcggcaagagtgaggctgcactggaactgatcaagcgaggtcatcgtcttgtaagtgatgatgtagtagaactgcgtaaggttagcgatgtaaccttggtaggctctgcaccagatattaccaggcattttattgagcttcgagggatcggtatcattgatgtaaagaccctttttggtgtggaaagtgttaagaatacacagtctgtagacctggtgatccgtctggaagagtgggataaggacaaagaatatgaccgactgggacttcatgaggaatatacagaatacttggggaataagattgtatgccattctctgcccatacgtccgggccgtaatctggcagtgatcgttgaagcagctgcagtcaaccacagacagaagaagatgggctacaatgctgcggaagagctgtataagcgtgtgcaggccaatatagcgaagaaaagggatgtctgataaaaagtgttaaataataaaaaggcaatggaaaggaaaaggttatgggagtttattgttttggtattgatgtaggaggaacatctgttaaatgtggattgtttcttacagatggaacactggtagaaaaatgggagattcctacccgtacggaaaatgaaggagctgcgatccttccggatatagcaaagactattgaggataagatcaaagaacgtggaattgaaaaaggcgatattgatggtgttggtatcgggatcccgggacctgtgaatgagaacggcgaggttccccttgcggtaaaccttcactggggatttaaggctgttgcagcagagatcagtgcattgaccggacttcctgcaaaggctgccaatgatgctaatgtagctgctttgggagaggcttggaaaggtgctgcagagggcgctaagagtgtagtactccttacacttggtacaggcgttggcggtggtattatagttgatggtaagatcgtacctggtttccacggcgccggcggtgaagtgggacatgccaatatgaacagcgaggaagcagaaagctgtaactgtggtaatcatggatgtctggagcagtatgcttcagcaaccggtattgtccgtgttgcaaagagggtacttgattccactcaggctccgagcgttctcagaaagaatatggacaagctgagcgcaaagcaggttctggatgcatacaaggacggagatgtactggctgtacagatcatggaaaaagtaggagatatactgggcagggcgcttggcattttctgctgtgtgatcgatccacagaccatcgtgatcggcggaggagtttccagggcaggacagccgctgatagactgtatccagaaatattacaggaagtatgcgttcccaacatgtaaggatacaccgatcgtacttgctacgctgggaaatgatgccgggatttacggaactgcacgaatggtgatcaaggactaaaaaagactttcaggaaattgatatgctcccttctaggtggacaagtgaaataataacaacttgtcacttaggagggagcatattttatctgtgtcccagctcccagaaggctaccgcacttgcggcagctacattcagggaatctactccgtgggacattggtatcttcacggtataatcactgtttgcaatcgtctgtgatgtaaggccgtcgccctcagttccgagaatgactgccaattttttttctgatcggagtgctttgtcatcaattcctacagaatcgtcacgcagagccattgcggctgttttgaatcccaacttttgtaggatctgcattccatcctgcggccatatattttttttatcaaagtatgtccaggggatctggaatacggtgcccatgctcactctggctgcacgccggtaaagcggatcactgcatccaccagtcaagagtactgcatccatatggagtgctgctgctgagcggaaaatagctccgatatttgtaggatttacaacattttcaagaactgctatgcggttggcgtttctgcagacttcctctacggatggcagtggatttctgtgcattgcacagagcattccgcgcgtaagagcaaatccggtcagcctaaccaatagttcatatttcgcagtatagacaggcacatttgtatactgttccagaatttccctcgcctctcctatcagatctttgtgctctaccagaaaagaaatcggctgatatcctgcatttaaggcacgttcaatcactttcggactttctgcaataaaaattccagattctggttcatagtatcgtaaaagctgtacttccgatgttctggcataaacatccagttccggcgcagtgaaatcttttatttcattccacataaaaatcagacctccaaactgagtaatcttattttacatcagtttggagatttgcacaagaaatccttttccaatcaaagtctcaatcaaaacaaatgggttccagagtcataaatattatattttattttcacattaatgatgttaaaattatcactgtaaatatcagagtgtatttgaaaaaaattcttaatctttttttactatgctccggaaaggaaattttatactaatgaaaaccaagatccaggatatgacctccggttcgccaggacggttgctcattttttttgcaattcccctgatgctggggaatatctgtcagcagctttatacaatggtggataccatgatcgttggccaggttgcaggcgtggaggctcttgccgcgttgggtgctgttgactttttgatgtgggttgtcacaggtgtatctaccggactcacccagggattttccattcaactctcgcagtattacggggcaaaggattatgaaaatctgcgcaaatctttggcacacagttatcgactgactgcattcagcgcagtgggagtattcattttaagccagtcctttgcttcactggtattaacagggctgcatacaccttccaatattatgggaatgtcattattatatttgcgcattattttctgtggaattccggctgcttcagcctataatatgtttgcctctgctttaagggctatgggaaacagtaaaacaccactgactgcaatgatcattgcatctgtactgaatgtcgtactggacatcctgtttgtggcaggctttggatggggtgttgcaggagcagcaatcgcaactgtgatctcacaaagtttttctgctgtttattgttttctgattttacgcaaaattgatattgtccatctgtccagaacagattttatgcctgcctccggtatgaacgcatgtctgatgaagcttggtattcctgttgtattccagaatgtcatcatcggtttaggcggtctggcagtccagtatgtgatcaatagttacggtttcctttttgtggctggatttacagctacaaacaagctttatggtctgctggaaatggcagctatttcctatggatatgccatcgttacttatgtgggtcagaatctgggagccggaaggatcgacaggatccggaaaggtgtccgttgcagtatgctgcttgccctgcttacatcactgatcatttccgttgccatgtttttctttggaaaaagtattctttcacttttcatctcaggtgaaccacagcagacacaggaagtattggcaattgcttttaaatacctttctattatggctgccatgctttgggttttgtacttcctgtatgtatacagatctgtgcttcagggactaggagatacgttaatgcctatggtaagtggtatgactgaatttgcaatgcgtatcagtgctgcactgattcttcctcattttattggaagggacggtgttttctttgcggaagttacagcatggagcggagccactgtgatcctatgcatcagctattatgtacggatgcataaatatcattaaggcaatacaatttcttataaaaaaagatcccatgcaaggaaaaaggctaaaaagttttgtccttgcagggatctttttatttatcactgaggatgtggaaagctggtattcacccacagtccctcttatggtgaaagttagtagtaaacaatatcatccgtaccttcgccaccggtattatcgccaccggtgtaatcgcctccggtaccatcaccaccagtgccatcgccgccggtattatcaccaccggtattatcgccgccggtaccatcaccaccggtaccatcgccaccggtattatccggattgtccggaattataggctcttccggagtgccaggattgttgggatcatccggagtctgtgtaagatccggatccagaaccagttctccctctgtttcttcatcaggaatttcatagaagtgctggtcgcaatattctgtaggcacagtgccaacgtcaaaatactcttcaataaccgggcatcctgtacgcggcagaagacctgtctcagaacaaatgctgattttctcaacgcttgatggctgctggaagtcacggtactccaatccttcatggatcctggacataacctttctccataagttcttgtggaagttacgggcatcatccgggatcttctgattatcatcgtagccggaccatacaacacatgtataatatggcgtaaatcctgcaaaccaaaggtcattgtactggtcggtagtaccagtcttacctgcaactgccatattatccaactgacatgcagtacctgtaccttgctgcactacatcctccatagcacttgtaagaaggaaagcggtgctttctttgatcacagacttctcagcagatgtattctcaatcagtacattgccattgtgatcaaggattttggtgtaataaacaggtttgatataattgccgctgttggcaatggtagcgtatgctgcacacaggtcgatgttggtaataccataggtaagtcctccaagtgccattgggagattggcatctgtgtaaacattgccattggcatctgtgtctgcttctgttccatgagccagagtggagaatccaaagttgtccaggtattgcaggccaagttctggagttacctgctccaggcatttgacagccacaacattgatggagttacggatcgcagtacggatagtagttgtaccgctgtaggaaccacttgcattcttgaccggttgtccgcttgggtaattgtaaggctcatcctcaaaggtagttgccagggacatgccaagctcattcaaggctggggcataagtggaaacaatcttaaaggtagaaccaggctgacgggtagaatccgtggcacggttcagggtcaggctggctgtcttctcaccacggcctccgatcatagcctttacatagccggtatgctggtcgataacggtcatggaggactggggctgtggtgcgaaattcacacgctctgctactacctggctgccatcggaaaggatgtctgccttatagcgatccacataggtctgtccttcttcctgtgaatcaaacagcaggtcaaaggaaggatcctcgttctggaaataaagcttcatcatctctttgctgtagtttacctgctcaccggcaggagtcttcacagtaagtgcatagtcaagtgcatattggacataatctggataattactagggtcagcatattcttcatcaaggatcttctggatggaaggactctgtgtggtcataaccttcagaccaccgctgtacagcatattctgtgcctgagtcttggtatatcctttgatattcatcaagtcattgatgatctgctggttcagggcatcctcaaagtaagaataaatattactgtctgtctgggtctgctcagcttgtgcagcctggatcctggaatacacatcatcattcagtgcttcgtcatactgtgcctggtcgatatattcctgatccagcatatgctgaaggacttccttacgtcttttggcattttccttggggttgctgataggattgtatttggtaggagcctgggtaatacctgccaaagtagcacattctgaaagattcagatcccatacatctttgttaaaatactgacgggatgctgcctgtactccataagcacctgcaccaaggttgatggtgttcagatagttctcaaggatcacattcttatcaccgatcttttcctcaatctgaactgccaggtactgctcctgaagcttacgggtaatacgctcgatttgggtggactcatttgtccagttggtaaatacgttattcttaagaagctgctgggtaatggtactggcaccctctgaaaaatgaccgccggatgtaagaccctttacggctgcacgcagaatgcctcgcacatcaataccattatgctcgtaaaaacgctcatcctctatggctacaactgcatgctgcagatccaggggaatctggtcgatggaaacaggaagtctgttggcatccggagcagccagcttacggatctgattcccttcatcatcatacaggaatgtggcatagccaaggggcatgatatctacattctctacatcgggggcatttgcgatcactccacggacagagccgatccccacacaggtaactactacacagagtgtgatcaaacccataaacagaagccggatcagtgaaacatgtgctctttgtcccatcatggaagaacgggagatgagagcattacgtttccgtgcagtggatttttttccgtagttcatgatattcctcctttataatccgttctattatatcaaataagtataagtaattaaagcatgaaatgaaaaattcacatttttcataaatttataagaaatagaaatcatactctaaccataaccgtatttgacagaaggtattcagaaggaaaagaaaatgtgcttttacaggaatggcatttgtttccaggcttccaggccagcagaaactgtgcgaagaccgctgagagtaagggaatcttgtcctggaatatctgtatcaaaataaaaaccataacttccgtaaacgagaacttttccggtctgcatgacagtctgtatattatccattacagtaaacacggaaggtcctccgtcagcggcacaggcagcatttggagcatagggccgtgccagaatatcgccatcaatatgaagatacagggcatctactttatcggccagggcaaagactgcatgtttccatttttcaggatcattaaattcatctgtcttcagccagcaaagctttgaagactgtacaagaggaagggccccgtcgtcatttactgtggattcacgaaaatcgcttaaaagaaccaattcatcatcataaggcttggacagaccggcagcattgcaccattggggaagtgttttaccaaggatagctgcaacgtccatgccgcccaaaatgccggtagtagttacttctggtgtggacatgtcactgtgtgcatccaaatatatgatccccacctttttgtctggtcccagatatctctgaatgccgccgcagacggcaactgcgtctttacaatatccgcctgtaagaagcagagcagaattgtcggatagagactggtatactgcgtctgacagctgacgggtcaatgtaaggtatatttcttctttctcaactggctgataagtgattctttgtgtttggactggaacatttgctttgttataaacgctacaaagatggtaatcatccaactctctgtatttatcccataactgaatatctgaatagattccttggcggatatgtcttgggtcaggtccccagttcagatctccataaggcatttcaataacggaaagctgagtaagatttttgatatgcatggtatgcgtgcctcctttttaatctttaatattgatcaggtcacagtcgataaaagcctggatgggtacatattgtttgcctttttggatgttttccagcaaggcatttactgctaaccgtccgatttcttgtggacgttgtgagactatatttgagattctttgataggtttttctgtggattccttttgcctgatccaggaaggaaatattaaaatcatcgaacacaccaatctcaaaatctgtttgtttgtaatactctgtggtgaggatcaaatcgcagaagtgctgcatatctgatcctgtatggataataaacgcattgaatttctgggatgtgtttaaaagagaatatataggctgctgcgtataatcccggttgggataaatgatctggttaaaaccaggaagtccgtatttatccatagctgcgtaatagccgttgatacggcacatggaaacattggtcaacgtggatttgtcctgtataatgctaaggatcttcttatgtcctcgtttgatcaggctttcggtaagcttgaacatgccttcttcattcttggtggaaacaatggaataattaggcgtatctgtgtagctgggataacagtccacgaaaacaaaaggaatgtcccattctgtaagcttgtcaatatatttgcggttgtttgcactggaaaaggaatcaatgataataccggaaacttttacagaattgcatatttccaggtatttcatttcaagagtattgttttcctgagtatcaaaagcaatgactgtgtatccgttttcataagcgacatgggtaatggtttctgtcaggtctgccataaatttgtactgcatatgaggcagcaaaagagcaatagtcttattaagttttggaatgccggaggaataattcatgatttttcctgtgggaatataatcagcttcattggcaatacggaggatctgctctcttttctgatcagaaacacgaaccggacggttgttgatgactcgtgagacaagggctttggaaacatgagcctgatcagcaatgtcctgtaaggtaattttttttgatttcatatgattgtctccatataggcttggtaaaagtttatcatatgatgaaaatatcataataaaaataataagtcaattataaaaacaaaaaaacagaaaagaaaatctgaataaataaggaaaatacatgaaataatctggaattgtgaatctattacaaataaacatcttctttttttgtgaaaaaagcaaacgaaaaagtccttgtgataaacaatgtatcaatgataaactttgagtaaatcaaacaggagggacaacaatgagtgagtatatactggaaatgaaaaatatcagtaagcgctttggcgggattcatgcattgaatgatgttagccttcatctcaggcgaggagaggtcctttgcctgtgtggtgaaaatggagcagggaaatctaccttgatgaagatccttgcagggattcagcagccgtctgaaggtcagatttatattgatggtcagccggtgcgtatcagaaagcctatagattccatttattacggagtgagtatggtgcagcaggaattgatccagattgaagagatgacggttgcagaaaatatctttgttggacgatacaaaaccaaaggaggttttgtagaagaaggacggatcaaccgggaggccaaagcactgatggatgaattggggatctattttgatcccaagtctttgctgaaacattacagcattgcacaaaggcagctgatcgaaatcttgaaagcactttcctatcatgcatccattattgtttttgatgagcctacagcagcacttactatagaagaaacagagaagctgtataagattatccgcaaattaaaggaagataagatggctattattatgatctctcacagaatggaagacatttatgcagtaggagatcgaatccaggttttgaaggatggctgtgattccggcggcggactggtgtcagaaatgacggtagacgatattgtccagctgatggtcggacgaaaaatgactcagcagttcccggaaaaaacaaatcactcaggagaagtgatacttaaagcagagaatttaagtaatgagcgggtacataaagtttcctttgaacttcataaaggagagattttaggtattggaggtctggtaggcgcaggcaggacggaattgttaagacttttgctcggcattgatcctggagaaggaagccttcagctgaatggaaagtctgtggagatcaattcgccaagagatggtgtgcataaagggattgcttttctccctgaggacaggaaggatcagggactgatcctggaacagtctattttgcagaataccattttaagtattctggaaagattgtccaagtggggatttatgaataccaggaaagaaaaaaacgtctgtaaggaatacatagaaaaattgagaatccgatgtgctggcagtcagatggcggtcaaaatgctaagtggtggcaatcagcagaaagtggttcttggaagatgccttgcatcacatccggatatcctgcttctggatgagcctacaagaggtgtggatgtaggtgcgaaagctgaaatatataaaatcatcaacgatctggcaacagcagggctgtccattatcgtagtatcctctgaaatgacggaacttctgggaatttccgacaggatacttgttatgcatgaaggatatctgtctggtgaacttatgagaggcgaagcaacagaagaaaacatcatgcatatggcaatttcacacgatcagactgcaaaagcgtaatacacattgttatacggatggagagaaaaaatggataaaaagaacagtataaaacacaaaattattacttcaaaatattttgaactgtcaggactgatccttttgatcattctgtattcctgcatcgtgcaggcaaaaagtgggaattttcttacaacaggaaatatccataatgtactgaaagagatcgttgtttacggtattctgtcatgtgctctggcatttccgctgatcaatggaacttttgatctttcaattgagtccattgcagctctgggtggtacatgctgtggacttttggtaaaggatgggttatatggactgaaaacaaaccttccagtggcaatccttatttctgtgatcatttgctgcgtagtaggcgcggtaaacggacttttggtagcgtttacatctattgatccgtttattgtcacgctgggttcgcaggtggcggtacgaggcttggtatatattgtgggtaacaatacagcggttacaggtcttccagattcctttaaagcgttaagtaataaaccgattctgggtgtgtccatgtctatttggattatgatccttgtatttgtatttatggcaattgttcttgggaaaactgcatacggaaggaaggtatatgctattggtggtaattatcaggctgctttcatttctggtattaatgtaaaaggcgttcgcttctccacatatattatttctggtggtttgtctgctattgcaggtattctgtccacagcaagagtggcatctgcaacaccaaatgcagcaagcggatatgcaaccattgccatttcagcctgtgcaatgggtggcgttgctttaagtggaggaaaaggtctgaccatcggcgttttccttggatcacttctgatgggaatgattaccaatggaatgaatcttatgtatattggttctaactggcagtatgtggttcgtggagcactgatggtagttgcagtattctattcacagtggtttaacagcttttcttataagttggcaaataaaaaataagcgaaatctgtaatttattatgtaaatatcctgctgtcatatttttacggccgaaaattatgacaacagggaaaataaaatatttaaaagaaaggtagaaaatattatgaagaaaaaaatggtatgtacaatgctgacagctacaatggcaatggcaacaatcggtgcacctttatctgcatcagcagcagatgaggaaaagatcattggtgtagttgtatgggatatggcacagtcatttgaggcatctctggcagaaatcgctgagaaagagattgaagcaagaggctggaaatgtgtactcatggacccgagcggggattgggcaaaaatgtacacagatatcaatgaccttgtaactcagggagttgacggaattatttatactgccattgatacagaaggcgcaaatgatgcagtagacctggctcatgaagcaggaattcctattatcgactttgactgtctggcatccaaaggaggtgctgatgcatctgtaagatatgatgattatgcaggtggccagatggcagcagagcagtgtatggaagcgcttgatggaaaggaagatgcacaggttgttgtgtttgaagaggagccgtccattgcatccagtgggcttcgtgtgaatggttttgtggactggatgaatgagaattatccgaatgtggagatcatcaagaatcgatccacagatagaacaactgatggatgttatgcatgggcaaccgatatgattactgcttatccggatgcagatgcgttcttcctgtactggaatgagtgtgcaatgggaacctatcatgctcttcaggatgcaggtaaaacagatgtttatgttattggatacgatgctacagatgagcagaaacaggttatgattgatggcggtgaggacagcaagctgtatgcaagccctggaatgtctcctgtaaaaatgggtgtaaaatgcgtagagtttatggagcagatttttgatggaagctatacaagaagcggcccggatgatatctatgaaatgacaccagagcttctcaccgttcataatgcagaaacctttgatatcaatgctatggatgaggaaacagaagatacagaagatacagaggctgcagaagatacagaaacggaagaagcagcagaggatggacaggaataattaataaaaatccggcggatagttatttataaaaactaccgccggtgtaaacaagaaacaggaggatgataatatgttcatagattctcatatgcacttaatcaatacaaaatgttttgacagaccaacttatgatcggcttggtcagtcaattccaaaagatacggatattaatcagttggtagaatggatgaaggcggctggaatcgaacactgcgtatgcatgggacaggacatgcataaagtatggaattccgaatttggagaaattgcggtggaggatgctttcgcaaaatatccagatttctttgttccgttttgcagtgtggaacccattgatgaggctggaagatttaaccagaagaacttcgattacatggtagataagctgaataataaaggatacaggggcgtgctttttactccaccttatggacagttcagttccaatgatccggttatgttcccattctatgaagctattgacaaggctggggcagtatgccagtatcaccattctgcagctggtggacctactgttcttgcgcatacaaaatatgccaaaatggaaaatctgaacgatgtaaccttccattttccgcatatgaaaaaagtggtagaacatatcggatatccatttagcgaatatctttttacaatgatggtaaatgatgaaaacctgtggactgatctggctatgctttataagagacctttatggatgacctggaatatggtacttgcaaaagaaataggtgtgcttgatagagtgatgtttgcaacagactttgtagcagcaaataatgatctgttcggaccggatcctacaaaggatatccttggatggattgacctggtgcagaacggaatgaacaagatctgcaagcagtctggctggcctacatttacagaaaaagagatcatgggtattctccatgacaatgcagccagactttataacctgtaaaggaagttaaaaacgtgaaaatattatttggagttgatgttggcggaacagatattaagctgggtgcatttgactggaaaagttaggagcttttaaaaaaatggaatataaaaacgaatctttccgatgaaggaaagagaatcattccagatgtggcgaaagaaatacaggggtatctcagtgtgcatgggctggatgaatcagatgtatatggcataggaatgggaatcccgggacctgtagacaaagacggaaatgtggaagtgtgtgtgaatctgttctggagaaactttaatcctgcagaagaaatgaaaaagttttttccaaaagcttacatccaagctggaaatgatgccaatgtggcagcacttggagaatttgtgcagggagcaggcagaaaatataagacgatgatgctgatcactttgggaacaggagtgggcggtggaatcatactgaatggcaacattgtgctagggtcttctggacttgccggggaaattggacatattgctgtgggaccgaaggattcggggaactgcaattgcggaaattgcgggtgtgtggatcaatttgcaccggctaccgggatcgtacggagaatgaagaaaatactggctgaaaatgaaggcgtatcccaactgcgggaaatgcaggattttactgcaaaagatgtgtgtgaccaggcaaaaaaaggagatccgcttgctattgagtgtgtggagttttgtatgggtgtgctgggtcgggctatggctatgtttgcccatgcttttgatccggaagtgtttgtgatcggtggaggtgtgtctaatgcgggaagcttgatcacggatgcaatttacaaagaatataaaaagaactttttcctgacagacaaaaagaacaatattattctggcagagttgggaaacgatgccgggataatcggagcgtcagcattggtgtcagaggagggaaaatttggatatattatatgataaagtagaaaagcctaggattcatcaggattacaggcctgtgaatcttactagggagactatggaggagcattaccggaatgttcttgctggtatgaaagagcagaatttagatgtgcttatgatttatgctgatcgtgagcatggggctaattttgcatatctgacaggttttgaaccaaggtttgaagaagctgtactggttttacatgcagatggaagagtgtattttctgctgggaaatgaaaatttgaaaatgagccaatatagttttatacagggaacggttcttcatacaccttatttttctctgccttatcagcctatgaatcctcagaaccggatccgtgacatcctgaatgaagcaggtttggaagatggaatgaaggtcggttgtgttggatggaagctgtttacaagtgcagttgaggacaaccagtgtctgattgatattccggaatttatagctgctgccattaaagatatcaataagaatggacagacaatcaatgcatccggtatttttttagattcagaaaaaggcttgagacacataaaaaatgccaatgagattgcacattatgaagcggcatcagggcttgcatctgcctgcgtgtataaggcactggaagcattaaagcctggtaaaactgaaatggaacttgcaggggagatgaatcctatgggacagcctacatcagttacaaccattgttgctacaggtgatcgttttacagatgcagttgtatttccgagaaataaggaagtacaagtgggggatcgtttttctgctactttgggacttcgtggaggtttaacatccagggctgcttatgtggtagaggaggaatctcagcttccggaagcggagagagattatctgaaaaaaattgctgttccttactataaagcagctgtgacatggtatgaaaccgtgggcgagggtgtcagatgcgaagatatctatcaggctgttgatgaagttcttccaaaggagatatttcactggacactgaacccgggtcattttacagataacgaggaatggtcggcatcaccgatttatccaggaagtccggtaatcctgaaaagtgggatgatgcttcagatggatattattcctgctgttccgggatatgcaggcattggtgcagaagatggggttgtactgattgatgaaaaaatggcaggacagcttcaaagtgaatatcctcgtacatgggaacggatgcaggaaagacgggattatatgatctgtgtattaggaatacacctgaaagatggagtgtatcctatgagtgatctttgcgggtatttgaggcctttccttttggaaaaagacaaagcgtttactgtattaaaagaagaagcatgaatatagcgaaaagaaggggactttgcaggttctcttcttttttacaaaatgattgacggagaaacatattttcattatcattaaggaagattcatatgaaagacgatttgtgaagaaatatatcataaaagggtaccaaagaccatggaggctgagtgaaatgcaaaaagagtataagaccgtatatgctggcggtgaaggagagattatcgaaaagaaatccaggtttattgcgactgtgcggccggtggaaagcgaagaagaggcacttgccttcatagaggaaatgcgtaagaaatactgggatgcaagacataactgctatgtgtattctgttgggatgaaccgggaagctaccagatgcagtgatgatggggaaccatccggtacagccggaagacctatgttggatgtgatccttggacaagatatttataatgcggcagtggttgttaccagatactttggaggtgtgcttcttggaacaggcggactggtgagagcttactcttcagcagtgcagacagggcttgcggctagtacggtgatcacgaaaaaactggggatttccctgaaagtagaaacggattattctgggatcggcaagatccagtatattgcaggggaaaacggtctgcccatcctggattcagaatatacggataaagtaattctccacctgctggtaccggaagaacaggtacagcaagtgaagaagcatattacggaaggcacaagcggacgtgcttccatggaaaagataaaagatgtttattttgctgatgtaaatggagaaacaaaaatctgggaatgctgatcatctgatcagcatttttctggctccggatattccacaccaaaggtctctacagtcatggaatggatctgctgttcatccagcggtctgtcgctgtaatcagtttcttcttcagcgatacggtttactacttccatgccttctattactttgccgaaagctgcatagctgccatcaagatgtggggcgttcttatgcatgatgaagaactggctgcctgcagaatcaggatgcatggcgcgagccatggaaagaacaccggcagtatgcttaagatcattggcaaagccattctgtgcaaattctcctttgatgctgtagccggggccgcccatgccggttccatccgggcatcctccctggatcatgaagccatagatcacacgatggaagatcaggccgtcataaaagccttttttgacaaggctgataaagttattcactgtattgggggcaatttccggataaagctctgcttttatcacatcttggttttccatagtaatggttatgattgggtttgtcatattgaaatctcctttataagtattgtaaatccttaattgttttattataatattcagagaatgaatgtgcaagaaaaagaaaaggtggttactaaaagaaatgattatagagaccaattcagccgaagaaacctttgcattgggaaaagctcttggtgaaaaggcatccccaggtcagatttataccctggatggtgatctgggcacaggaaagaccgtgtttacccagggggttgcagcaggacttgggatcacagaagcgatcagcagtcccacatttaccattatacaggaatatgatacaggcaggcttccgttataccattttgatgtatatcgtatcggagatattgaagaaatggaagaaatcggatatgacgattactttttcggagaagggatctgcctcatcgagtgggcagatttgatccgtgagatccttccggaacatgtgatacgaatcaccatagaaaaagacctggagaaaggttttgattaccggaagattacgataggagaataaaaatgagaattttagcattagacagttcaggaatagtagcaactgtagcaattgtggaggatgataatcttctggcagaatatacagtgaattataaaaaaacccattcccagactttacttcccatgttggatgagatcgtaaagatgacagagtttgatctgaatacgttagatgcagtggcagtggcagcaggccctggctcttttacaggacttcgtatcgggtcagctacagcaaaggggcttgggcttgctcttgacaagccgctgatcccggttcctacagtggaagcactggcatataatctttatgatgtgtccgggcttgtctgccctattatggatgccaggaggggacaggtgtatacagggatttacagatttaaggaccacaggctggttcaggtagaagggcagatggctgtgcccatccaggagctgattggcattttgaaccggctggaagaaccagtgactttcctgggagatggagtgccagtgtttagggaaacgatccaagctgagctgaagatgccattttctttcgcacctgcacacgtgaataaacaaagagcggctgcggtagctgctctgggagaggtttattacaaagatggcaggatccagactgcaatggagcatattccggaataccttaggctttcccaggctgagagggaacgggcccagagggagggaaaagcatgatcctcagggaaatgctggtagaagacctggatcaggtcatggagatagagaaagaccttttttctgttccctggacaaaggaaggtttccttacttttgtgcttaaggacaatgctatgtttctggtagtagaggataagggagagattattgggtactgtgggcttctgatggttcttgacgaaggtgacattacgaatgttgcaatcaaaagaacccgccagaaagagggagttggcgggttccttatgcaaagtttaatcagacttgccggtgagagagggattaccaccattcatcttgaagtccgcgcgggaaattctggggctattcgtctttatgaacgctctggatttaccagagatgggatccgtaaaggttactactctgatcctgtggaggatgcgcttcttatgacgtatcgccagaattgaatatgcaaggctttcaaagagcaggccgcaggatgcgatcaggctgatcagtaagccagctcttttaccgggtgcatggaattttaattggatttcatgtgcccctttttttaacggaaatcctgcaaatgctttgtttacagtctgtactggaatttctttaccatctataaatgcctgatatcctttggcataggcaaaggatgtgacaaaatatccatcctgatccatggaaatggtgcctttcaataattcactgcctttggtgccttgattgtggaaagtgacgatccctggatgatgaaatgtggataatggcaaagtataggcagtgatattggttattttataatttccttttgaaaataccagatccagattggaaagtcctttttcggaagaaagcatataggtaaaggtattgttttggttggggtagggtgcattgcttccggaaagacagttcttaattccgtttatggaaacagaaatatctgaagctccatcgtaaactacatcaaaggaaaccaacaacagttgtgatgcggagatattttttggaagctttcgggtgctggatatctgtttctttgtgctttttctggcaaaaaagttttctggcagagcgtaaggcttcatctgggactgataggcagaactatttgatgccactgaatcaggtacaatcgtacggttgacaagagtatccaggttctggggataggtcagtcggtcaaaggaagcttcacttataagcgaagtacttccataagccaaaggaagtacctgatcattttcagccagaacatggccatttttttcagcttttatccggtatccggcaggcagctgttctttggttgtctggatataacgtacgcccatcaaatattcctggaaaggattgctgtgcatggtgactgcaacccgattgcggttactgatggagttacggagagtatcataataaaattgattgtaggtactgttagatacggaagagtagatgctgcttctgttctgggtaccccataccatataattgctgttggtgtacggacgctccagagtatccatccttgcttgtgagtccttgcaaagcttcaagatctggctgtcggaaaaagtacttctggagtcatctgtggcagaaacatattcttcccttccggatttattcagatagatcttggcaggcagcaccaggatcaggagaaaagccagtccctgtgccagaagctttcttttgttacaaattgatccggaagcagaaaataagaccagacataacccatctaatgccatcagaatcttgaactggttatcatgggatacaaaaagaatctgtacgataaccggaatcagacagcatagtgcaaggggaaggctgtgccggatccgcctggcttttaattcttccagtgtaagtgctgtcaggtaaaggatcagcggcatgaatgggatcaggcttttggggcgtacatataaggttccgttcagaatccagtaaaaaatattaaaaaataaaaaacacagtaaaatacaggcaaaggatcgggttgattttcgacggatgcttaataaaattgcgtaaaggcaaatcagggtaagcccacatccatacacactgtaaagaagactgtccattgttgggttgacagtaaggatcttgtacaaaggagtaggagctacatcttttttattttccaggatggcaagtccggtgggcagcagaactgccatggacaaacagactgcagctgcagtactgagaatgtaaccggaccacagttttataaaacgtctgggaactttgctgtaaactttgcacaggctttgggtagagaaccagtaatacagagtacaggatgcaaagcaggcagggaaaaagtaaaagctatggaataaaatcatcaggtaagaaaaaacgatgcccacatttgtccgtgttttttgaggaaaactattaatcatggattccgcctgctggtcaatggcaatcagcgtcaggatcacaaaaggcaggtagtttacaaacatgatctgtctgtgagcctgaaacagacagtttgcacaaaggtaaaggaagcctgcacaaaaacaagatgtgtctgtaagcccctttttgtaaagccagtaatataggagaaaaatcccaaggaaaatctcaaaaactgcatatccctggatgatggcagcaacggatatatcaggtagaaaatacgataaaagtacatccggccggagcatcccgtagtaggacaaggcaaaaaagttggtacctcctccaagaccagagaaatcgggaagaagctgcccggtggcataaaagtgcttacgcatataatctgcaagagtaacatgttggcaataccagtctgtctgggagccgtacatgctaccggatggaagtgtaagtagaatcagcagtgaagctgcaccaaaaagaaagagaatgcacagcagactgcgtctggtaagtttgggtttttgattcaaattcataatgttcctttcttgtctgacggatcttatatcgaccgtgcagattttacatcaaaaacagaagtaaggcaatcacttttgaaatttcttttttgacttgcgttctataataaacataagagatgaaaatatacattaaaaaaatataaaaaattcttaagaatatgaaaagaaaagcggaaggtattccaaacaggtttttacttgttttagaatctggattgtgatacactttttcacagaaaaaagtaaagaggaataagaaatatatgttagatatttgtcttgttggaactggcggcatgatgcctttgcccagaagatggcttacagcacttatgacccggtataatggcagcagccttttgattgactgcggcgaaggtacacaggtggctatcaaggaaaaaggatggagctttaagcctatagatgtgatttgttttacccattaccatggagatcatatcagtggtcttccgggactgcttcttaccatgggaaatgcagaccgtacagagccattgaccctgattgggccaagagggctggaacgagtggtaaatgccctgcgtgtgattgcaccggaattgccttttgaaattcgatttatggagatcacaggcgcagagcagacttttgaaataaatggatatcgtatcactgcatttaaggtaaatcacaatgtactttgttatggatataccctggaaattttaagacagggcagattttcgccggaaagagccagaagccaggggattcccctgaaattctggaatccattacaaaaaggtatgacaatggaagaagacggcgtagtatatactccagatatggttttaggaccggacagaaaaggattaaaagttacttatacaacagacacccggcctacagagtcaattttgaaaaatgcaaaaggttctgatctttttatctgtgaaggaatgtatggtgaagaagataaggtggaaaaggcaaaagggtataagcatatgacctttaaggaagcggctttcctggccagggatgcaaaagtagagcagatgtggctcactcattacagcccttccttgatccgtccggatgattacatggataaagtcagagaaatattcccaaatgcctggccgggcaaagatgggaagagtttggaattaaaatttgaagaggaagacgaaaaaaatgaaagataatttgatcctagcgatagaaagctcctgcgatgagaccgcggcatcggttgtaaaaaacggcagaaccattttgtcaaatgttatctcatcacagatcgagcttcacaaattatatggtggtgttgtaccggagattgcatccagaaagcatattgagaagattaatcaggttgtggaacaggcactttcggatgcaggagtaacattagacgatctggatgctataggtgttacctatggtcctggcttagtgggggcacttctggtgggcgttgcagaggcaaaggccattgcttatgccaaaaagcttccattggtaggcgtgcatcatattgaagggcacgtgtctgcgaattatattgaacatccggatcttgagccgccgtttttatgtctgatcgtttccggagggcatacccatctggtgatcgtagaagattacgggaaattccgcattctgggaaggacaagggatgatgcggctggagaagcttttgataaggttgcaagggcgattggacttggatatccgggaggaccaaagatcgataagctttcggatgaaggtaatccggatgctattgtatttcccaaagccaaaatcgaagattgtccatatgatttcagtttcagtggtgtgaagtcagcggtgctaaattatctaaatggtgcaaaaatgaaaggggaagaagtaaaccgtgcagacattgctgcttctttccagaaagcagtggtggatgtactggtagaacatactatgcaggcggcaaaggatttccatatggataaagtggctattgcaggaggagttgcttccaataaacatcttcgtgaggctatggaaaaggcatgcaaagagaatggcttccgcttttaccgcccgtctcctattttttgtacagacaatggagcaatgatcggggtggctgcttattatgaatttatgaagggaacgagacatgggtgggatctgaatgcagttcctaacctgaaattgggagagcgttgaaatgagtgagaaatgtactgcaattgttctggcggcaggaaaaggaaagagaatgcacagcaaaatacagaaacagtttctggaaatacagggatatccggtgctatattattccctgcattgttttcaggaaagcagtatgattcaggatattattctggtaacaagtgaggatgttatttcctattgtaaagagcagattgtggataagtacgcattttcaaaagttaccagggttattcctggtgggaaagaacggtatgattctgtatatgcagggttactggcttgtgacaatccagattatgtatttatacatgatggtgccaggccgtttattaatgaagagattctaagaagagggctttcggctgtacaacagacaggagcttgtgtaattggtatgccttccaaagataccataaagattgcggatacccagggaaatgtactggagacaccagatagaaattgtgtatggacgatccaaacaccgcagattttttcttatgctttgatctgcagggcacatgaaagcatccgaaagaaggatatgagcaaggtgacagatgatgctatggttgtggagcaggaaacaggagtgaaagtgcgattggcacagggctcatataggaatataaagatcacaacgccagaggatctgaaagtagcacaggccttttttcaggagaactaaaaaagatttgaaaaactaaaaattgtgttgacacaaggcatgattggtgataagataatcaggcattgacagagaaaaggttggtgtatgtatttacaaacatctggagagatatcgaagtggtcataacgaggcggtcttgaaaaccgtttgtccgcaagggcgcgtgggttcgaatcccactctctccgcttcttgcaggaaaataaaaaagtgcttgacaaagcatggcctgtgagttataatgaataacgcttcatttgggaaatgaagagttgtagggcgatttggagaagtacccaagctggccgaaggggctcccctggaaagggagtaggtcgttaatagcggcgcgagggttcaaatccctccttctccgcttgaatctgaaaagattcaaaaagttgttgacaatggcagaagattatgatatagtaatcaagttgctaacagacaacaatgaacattgataactaaacagtgaaacacatacgattctcgaaaattctttaacactacgatcacttgacgaagcgaagctgagtttagtgagagtgcggttcggtttttaaaaaccgaact

SEQ ID NO: 63 - DNA, 41051 bp, Unknown
  gut microbiota DNA sequence
aattgtctacttgacggggagcggttcacacttgcgacagcccccttgtttatagcgttgaaaacacatttactaattcacataccttcttgtaactccataaaaggaattcaattgattcctgccaatcttcatataccctttcttattgttatatctaataatatcttctgtttccgccaaagtgaatatctaatttgtattctactcctttagaatccttcacacggatctgaagccagcttccttttttcgtgttgggtacatattttccatttttaaaagaccgggctgagtcataccagatccagttctcctgatcactgtatttggcaaataccagcttccagcccttggctaatttccaggaaaccttatgtttgcttttcttatctttgactgtgaaaaagccatgatgatctgtatcaaaaatattttttccgtcaaccttcaaatactgaacaggctttgcgtcttttacgataagggtagttttcaaagtgtaaacttttttattcttttttacctttatggttatattggatactccattttcataaggaatatactcaaaatcatcccgtcctgaactttcaatctctaccacatccgggttggaagactttacggaaatgatcttaccctttcccacatttttaactgttacttttttatcatctgtccaggtagacctgtaatatacgatctttttcgctacttttggtgctgcacttgttgctgccttagcctgtgcaggtgcaaaacacagcgataccataaagcaggcaatccataaaaacagccccttctttataaatccttttctcattatcttttctttcattactggtctcctcttgagatttctattttttccttcatcgtatgcatgttatccattactcaaacggcagcaatatggaaaagaaatccataaaattaagccctttttcgtagtaatttttcatcatataattatccagttcttttattaacttacagttagaaacgcgtcttcgtttcagggtttcatcattacgatactggatttttgttattgcatctttcttaataaaagttaaggttccttttgcacgggtgggggtaatcaccacactgctaagatcatactcaagattttccagaaagttactctccgtggttctgttcatcgtccgtcttccgtcctcggtatcataatcaatctgtatattgtactctactgcaaaattttttgttgaaaacaggtaccatccattcagatcctttgctctccagaaaattctgtaaccattggggtctccccatgtactatcataagacctaacgatttcaggggtaaaatactgtaaaaagttagacatattcaagtctactgatttaaaatatgatttaacacctttcaccggctttttaactgttactttgcatgtaagttttttctttccgtatttggcggtgataacagctgttcccttctttctcgcctttacaactccggtcttggaaaccgttgcaacactctttttactgcttgtccaggtgattttccttttgattccctttgcctttaacttataacttttacctacattcaatgtaatgcttttcctgttcagtgctgctgccttggctgaaaccggcatggccagcatgctcaccagcatgcaaagaaacaggatccctgacatttttttgaatctcttcatttcctattccctcttgttttataaagtctcttttgtttttataaaatctcttttatggattctcttttgctatgccttttgtaaaaggagcttacttatgtggctcaaatggctgtagggtgtaagacggaatagaaaaactactgtatttcttatgtacgtattccgctactttatcattgtattcaaaataagtaaattttttcatcttcaggtatgtgtcatatgggccatattggatactctttacagcttttttattcacaaacacaagcgttccctgtgccctggagcatactttatctgtaatgcttacattcgtatgttcttttgtccagtaagcatctgtggcacttccggcaccagatatctgaagctttgcctccctggtcgctctggttccgtcctcatcattgtaaacaatgttaaaaacaaattccgccgcatagttttttgcggtaagcagataccagttaggatccttacactttaacataatgtagcatccgtctctttctccccacatatcatatcttggaatagttacataggtgaaatactgtgaaatattagacgcattcaccttgacagttttaaaatatgattgagggaattttgtatcttttaccggctttttaactgttactttgcatgtaagttttttctttccgtatttggcggtgatgacagctgttcccttctttctcgcctttacaactccggtcttggaaaccgttgccacactctttttactgcttgtccaggtgattcttcctttgattccctttgcctttaacttataacttttacctacattcaaggtaatgcttttcctgttcagtgacgctgccttggctgaaaccggcatggccagcacactcaccagcatgcaaagaagcagtactattgacatttttttgaatctcttcatttctcttccccccataatgatatactatatttttttgcctgaatcaggcattcatttctattataaatattaacatttccagacacaattaccctgctgcatagtatcagaattcttcttaacggatgtgtctaatggagcagcggcctgattttgctgcacacctttgcaatcctgccggaaactattcatctgcatattattgaaaagctgccttagctgtatctacaggatgctccgctttattgtcaatgtctgtatcatttcctgagaatatgcttcctgcaaaatcaagcacttctgttcccggcagattgttgatacagacagccgttccgttatcagtaaacgtattatttaaatagtttggagcagaaccataagaagtgctgctgttaaatttcaatgctgttatattatttgtaaaagtacaatccattgcattgacccatgccccattttgcgcaagcgctgcagtatcccatccgtcaaagctgcactgggaaagaagtaccagacaatacgcattcagaccggttcctgaatttccagcaaaatgtacgccggatatatcagcataatttccattcattcctctcatacttacggttccggtaaaggtagtggtgatgtcctcttctgtgcttccataaatcccccatacatgatctccgaaaacaatatctccatcataggtcactgccggaagatgaagatatactgtggtatctgatggcacctcttcctcaatggaagccaacagcgcctttaattgatcggttgtttccatcggggtatcctcgaaataataagtaactgctttctgcttttccaatgtaagctttgtacgtagggaaatcgtatctccgttttccatagtcagcatccattcaatgtcattggtgccgctgtccgcatgaaaaaggatatccgatacatatgctgcatctggaaagctttcattatgagttggttccacaaactccatcttctgagaattttcataaggctttgtatttacctggcaggacttaaccttttgtgtaaattcttcccatgccagcttcccggttttctgatcaagaacatacagctgacaaggcagggcactgtccatcccctcagacagtgtatcggtacgctctccctgtgcatgtcctgtcacaccatcttcctgggaaaaagtcagcagaaccttatatgacttatctttatcctgataaacgatctgcgcgccgccttcgtatttttggggcttgtgatgcattaaaaaaacagtccccacaactgcactcagaatcagaatggtcaaaatgatcaacgctttcttcttccatcgtctgggtggttttatctcctttttttctgcctgaactgctgtacaatgcggacaaaaggatgcttcatctggtatcagctgtccgcattttatacactttttactcattgattttccctcttgttatttataaaatctccatcagatgaagaatacttttgtatcttttttccggactgaccattgtacatttttgtacgatccttcccattctgccaccagcaagctttcgtgatggatgctctccggtaagcataatattaagcaaaatgcccagcgcataaatatctgcacgcccatcagattgtgacagaccatactgttcaggtgctgcatatccggtagtgccaaggatctgtgtgtcttcctggttattgtttttatagatcctggaagcatcaaaatcaatgagaactgcttcttttccacgtatgataatgttctctggttttacatccctgtgtactacacccatagaatggagcacccacaaagccgaacataattgcctggtgatctgtcttgcctctctgcttgtaagaaggcctccttccagaagttcccccagattatctccctgtacatactcctccaaaagagctgtcctgccctccttctcaccaacttccataatctgcggcaaattgggacagtatatggcaagaagttttcgatatacctcactgtttcctgaaaaatgcttaaaaatatacagggtgccactgcttttgtgacgcacaagagaaacttcccgctgttcactttttttaaaaaatctgatagtatcatattcataatggactgcttccagaagattgtcataaagattcattgtttccatccctgtcactattccatgtgcatatatttctgtcgctattccatgtgcatattgttttttttatcaatttattgtacatttaaagttatatgtattgttaaaaatattgtaacttataataaaattattgtaaaggtatggaaaatgaaaaaaagaaccacagatcatttgcagcaagagcttatggattcaccagatctggcacgttttctgactaagaatgagaatttatttgtgaataaaagtatcgctgaattattaaaccagctgtttgaaaggaaaaatatttcaaaggctgcacttgccaaacaatcaggaatgagtgagatttatctgcaccagatttttgcaggtcgcagaaatccctccaggaatcgttttttatgcctgtgttacggtctgggtgcaagcatagaggaagcccaggagctgttgaagctgtgcggcatggctcagctttatccaaagctgaaacgagatgcgatcatttattatgggctgcaacatggtcttgggctatttgagatcaatgataaattgtttgatgaaaatgaagaaaccttgttctgatttcatatcctgaaatcacagggatacagaaaaaaatgcaaaagagagaatatcttatttgcaattcattaagatattttttacatcaggtacctgaagctttacataagctcttgaggcaattccgctggttcttactgcttccgctaccaatatacaagcaaaaccttctttccgtattttgccagttcttcaggcagacactgtatctgatccttaccaaatctgatatctgttgggatatgaaatgtgaaattattcattctgatctccttctttatcctgcatctatttctccgaaatcacaaaacagttaaatctttgcctcataccggtcataatgtaaggcctggatatccacatctgtttttccggtgacaataagctttgcaagctgctctcccactgccggcgcaataccaaaaccatggccgttaaaagcacaagccacgtacaatcccgggatttcatccactgttccaagggatgggacgccatctgaggaagcatccatccagcctacccaggtccttacgatcttggcattggcaagatccggaaagtacttcatgattccacggcagatacaaggtgctgttttggatgaatttaccggtgttccgttatccttattatacctctccaggccggaagaaccgccaaatacaaaggagccatgcttggtctgatgtccataaaagtctgcctctgcagtacccccacagcttctcttgggaccattcatggatgtgatttaatcaattccgtactctttgcagagcttttgacgaaacgcaggatcatcaagtgcccgtttcaaatcatcaagccgattatctcttaacagggatcttgtaagcttctgctcgcgctgtatcccggcagacactccctctgctcttccctctgctcttccttcttctcttccagctgctcttcccttttcctctatgccaagaattcctttacaaacattcaccttttctcccctggcttccttttctatcttcattcccgtcatctcctccatcactcgaacagcttttctgtccacagttgcaaatgcagcgttcgctttcacaagcctttccagtttttctgcatcttcagaatacttaatgaactgcatcacttcccgaaaattagaggtaaagtgctccagttcctcttcgctcatttcccctggtgcgattagattgatccgataatccggaaccaatgacaaaatcttttcatcctgcactgccaacatctcatggagagatcttggtgcctcccaattgtcagccccgaaatacaccaccacggttatgattggaagcagtctgtcttccttgtaaaagcctgaaaggaactctgccggatccggtttcttctcctttggattcttcttccgcaatgcttctctatgggaagtctccgctttctgtacctgtgccgcatattccagagaatcataaaccatgtttttcactggcattgcgtaatgaacatttgactggttttccactcccaggagcagatacaccgcattttcatcctccatcgcacacagaatcttgaacacatcccggtatttctgataaggcacctccgccccgtcagctccatatgggatcaccacactggccgtatccagttcctttaaattcttagggtcaatgaccttttctccttggtagatcatatggttgaacacatccgcaaagacctctgtgtcttccatgtactcttttgtgatgatatcctttcttcccatggattcaccaccttctatgatttgtttttcagaagagcttatgtaaatcaaaatttcttatgatatatataggataacatactgtttcctgttctgaaagaaaaatatacggaaaatgtataaaatccatttcatgagtttttaatcatatttttaggaaatccctcattgacagatcataaatccaggaatgcgtaccttttgtctatttccatttaattgaatacattcccgaaacagatggtttcttcctcacaaccttcagataataggttccgggctccaggctgtgctcatatttatctcccatccagtccgtatatgtagtatcatagctccacatataagcatcttttgtacgaattcccggtcctatcagatatatccacattgctcctgtaccatatgaagtaaaactcagcttaattttctttctctttgtcagcttcagcttataccaatgcgtttttttctcattctgatagaaaaagccagaaacgcttttcccagcttttacaggcttcgctctattttttgaagttgcaggcttccgggaacaatatttataatccagatgaagtttgtatccatcaaatccaatatacctgagataataagttccaggctttaccagaaaataagaataatcccaataaccatgcttatcctctttttcactttcactgtaatctttaatattcatgattactttcttgtcactattacaaagtgcaaagtccccatgcattttatcagcccaatatgatcctgcgaaatagtaggaatctccataaatttcaatcagtgctgttttagacactgaaaatttatgatataccacataatcctctatatcagaataatcagccatatcttccccattgaagaaatactttccttctgcaattttctgcatatcaaccgtttggttaaatgcatatgcatgggctgtaaatggcataaaaacaaacattgcaaacagtaccagctgttcatcctcaaacaactattctctatttatcgtattccgtatcttcgttttgctgatcctaaaatttttccgttcgctcactgataatgtatcttggtctgtgcttactttcaagatacgtctttcccacatactctccgataattcctaaggacagtagctgaatacctcccataaaacacactatacagatcgtactactccatccttgaaccgtattgcctgtaatgttactgatcactgcccatatcactccgataaaactaagcaatgcaattacacaccctgctgcagtaatcattcggattggtttgacagataaactggtaattccattcaaagccagtgcaagcattttctttaaaggataatggctttttcccgccattctttcatttcgttcgtaataaacactggtgcttttatatcctaccagaggaaccattcctctgagaaaaatattcacttcctgaaattgctccagcccgcatagtacacgcttggacagcagcctgtaatccgcatgattaaataccacttctgtacccatggcattcataaacctgtaaaatgattcggccgtaaatcttttgaaaaaagtatccgacgtccgatcactacgcaccccataaactacatcgcaaccattctcatactcccgaaccatcgcatccatggcgtttatatcatcctgaccatcacagtcaatagaaatcgtaatatcacacttttctttcgcttccattaatccagcaagcacagcgttctgatgccctctgtttctgctttggcgtatccctacaaaatgttcttcctcctgtgacagccttgttataatctcccaagtatgatccttactcccatcatcgacaaataatacacggctttggtctgatatatgtccttcctgctccaactgctgaagcttctttaaaaatcctggcgctgtaagtggcagaacctcctgctcattgtaacaaggaatcacaatataaagaattggtatcattttcttcccctctccctgattacattcttgatattctcaaatccaatagatgccaatatacaatatattggtacatatatataaatatatctcgctcttgcctcaaataaaagttcaaaaagtgtaagtccaataaccgcaagcataagaattgtttcttctttcatatatctactatttttccttacgccgaatgccgcgctcagcaaaataagtatccagataaccttctgaatcgtctgaaaagttccatggtttgcagcttcatccccataataatatgaacgtaaaagcctacacacaccagaattaacttcatcatacgttactgcataaaaattcccttctttgccccaggcaaaggttccatcattaaacaataccagcatcttttttgaaaaatgctttgccagccccagcggtcccatatcctgaatccgctttactgcccgctctatatcctttttatttcgttcagattttgatgaaatgttataagaaaactctatatcttccggtgcataaactccatttgtcttttcattcattcccatcataaaaaaatgcggaagtccgaaagccgcctcatcatctagttcattacctgctgctttataagcatattttatacttttctgtaatcccgaagaaaaaacaatcacaataaccaacaatcctgtaaccgttaatgctgttcttttcctgtcccttttctcaatcccccatatgatttctacaagaacaattgcaataaacataatcacacactgcggtttgatctgaaatccaattcccgccaatatggcggttcctgccattgctacattcttctcccatttcttttcatatggttttacaaacagataaaagcacaaaatcggaaacagcaaacctaatgaatccgaataacacactacagtccatggcgacaggccaacaatcagtacagtggcaacaaacccataaaacgcatgtttttttgatacaaacaaacgtccgcacttatataccagaaaacatgacaccgtgttgattaaacaattcaagatcacaataggcatcaacaaagcatctccgttgaagatacctatccatttgttaatttccagcagcaaagcctgcacatatacaataaacagattattaggatatactgaaaaattataccaagaagacatttgagatggttctccaagtaccaattcccttgctgcatttaccacaccagctgcatcccacccggcaaaaaaaagaatattccaggcaatataaatctgtacaaaaagcaaacatattgctgtcacttttactatttgatcataatttgatgatttgctacatacttttataatattccgctttttcaattccatatatagaatgccaataactacagcaacaaccacaatcaacagatttgaaatcacataatctgctttaccataataattacttttttcaaaaaataataaaagagccagcaaccatatcatcatcattgcatacataatgaatattaattttgatgtcaatatttctatcctgttttttctcatatcatatatccttacctgtttcgttacctcataacaatagtatacatctttttattttacatttttcttttttctgccacgcctgatcagcattacaaataacaccatcacatataaagcagatattgctcccccgataaaccattctttcggacggaatttcataacgatcgtatgcgttccctttgatacatgaagtcccataaagcagttattaattgtggcaatttctgttttctcgccatctacataagctgtccatcctttatgcttcgcctgaagaactgtaacataaccttctgttggcacatcaacaatcatctggatactgttaaacccaaacctgtaagcatccacaatattatctgtggtcattctttctgtctgaaccagttcggcattagctggaacctgtccatccatagtaacactgacctgctgctacactttatccaaagatgtgaaataaatatctgtataaaaacggccatcctgttcagtcaatgtataatccccgccgactgtctgatggttgccctcactgtccaagaaatcaactaccatcgaaatggtatccgtttcctttgtatctcaacgaaatcagccttttcctatccgttttcttatgcttgcatactgccttctactataaatccagtatccgtctgtgtcagagtcagcggctcctgagccgcaacaacaggatttaacgtctgctactcctggatctgttcctcagcccctgatccgtatatatctgttccggtgtattatagtggttcagttgtctgattaaacacaagctctttattattcattccactggtacttctggtatgcccgtcagaatttatacctctctgtcgattctcatatgacttaaattccgaatcaacatctctttttgtgctctgatgccatatatactatccttgtggatattttgcaataatgatcgacatttctcccaaaaaccatgtaaaaacctctattacaacaatccctgtaaccaggcctttaacgccataaacttgctgcctgcccggtgcgcaccatataataattcgtcatactggcttcgccgaaatcaataaattgtaaaagcaaatgacagaaatgccattgcagaataactgtctggtctgaccccgtctccatttcctcttgtaattaatgacatattgcataagaaaatgctattgtagccggagtatatccgatccacgccagaataagcgtaacaaaataccataccggcgttccgatcaccgaataattaggtgtaccaaaacgcactaatggattccacaatggtaatgtatggttggaaatagcctctgacatcaatacctgtgacggatattccgcatcccagatatcatattgcatcagattttccccaatcaataatgaccagttcaacaagaaactgattaacagaaacagaagaaagattcctgcataattccatgcatgccctttcaagacaaaccgcttattctttcccatatctcttttcctcttcccttttcttcctattatccttattttttgaatgcccagaatttattcataataaaattcaacggtacactgatcagtaaattgacgattggagcgatcatctttgaaatccccagaatctgaacccataaaacagacaaaaccgtattcaggaacaaaccggtaaatgcatatgaaatatacgtttttatcagtgccttataccagggcactgcctccccatcctcgctgttaaacacatatttacgattccagtaaaacgaccaaagcacactaagcacaaatgcaatgacctgtgcgatcaaatagtcggctttcacaaaccatccgtttttttggaaaagaagcagcgaaatcacatatatcacataagatacaaccgtattgctgactcccacgattccaaatttaataaattgcagaaatccctgccatttttcttcacttatatgaaggtggagtatcttaaacacaacaaaccctgctgctttctcaataaatttccatacactgcctgcgattttctccataaccagaactctctttttcctttattctcttgcatctaactgcacactttcacagctaatattatcaaccttatctgctacattttccagacttccacattgctgacaatacatccctttaacaatctgtctgatcgtcatgagtatctttctcatggataaggagcctaaaatcataacaccaaaataaaccactctcttcgtccatatgttagaaaaagaacaatatcggccaagccaataatccataaacaacctatgatataaaaaaatataaagtgtacttcttccaatcactgagcaaagtttaaatcccatatttattacccgattatgcattttctccagcaaatctgttaaataaaagatagtcagggcaatcaagcacgccaaaataattccagtaatccctggtggattaataccattgcctagtctaagcttctggtctaaggcaaagcgatctgtaaattcaaaccgataccacagaaccaacataaatccagataaaacgcaaccaacgagagaggataatttacgaagctgtcctgcatacattttcaacagcattccaagataaaataaaatcagatatgaaccgccggccagaacgccgcctccgccataaacatccatgatatttgtcatattattggcgaacacagaaaataagaacagcaatccaagattaatcagatgaatatattttctgtgtttgcccaacgcagctgctccataaagaatgggtgcaagcaaaataacctgaaaataaagtaacacataataaaaaggtgctgtcatgttaaaatgaatcaatcgatttaaaaattcagtaaaaagaaagctatgactatctaaaagaaagtaaatgaaagttgctcccacatatggaatcatcattttcgttagatttttcttagtaagctgccacaatgtgaggtttctctttttctccgctgcaatcacaaacgtatacccacttaaaagcataaaaagagcaactgaaaaaaaggctcctactacaattaattcgttatcatataaaaccatgtatgtatgatctgtcaaaacagccagaatagccactactttagcaatatttatccacttttcttctctccccataaatcctctcccatatgtttcctacatctttatttcttctgtatatccattaacctctgtcagtcttttttcatcgatccagatttcatcttcgattccacctaccgatgccgggtgactcccacatacctgaaagccaatcttcagataacttttatatgcagcatgattctcctgatgaacagatgcaacgatcttctttaatcccatttttctaaatgctaccatcatggccaatacaaagcttttgccaccgacgccatgacctctggcttccatatctcccacctggagccgtccgatctctgcctgttctccctgaaaatcatataaagacagacttcccaccatacggtgtagatgttctgtctcttcaatagcaaatgcaatggtgtcattatcttttaaataagattcataccacttttcctgcatttctggcgtaatatgatcaatctttctaaggaagcgggtctgtgtggcgtcatttcgccacacccgcagattctcgatatctttccgctccaaaggacggagcataatattttcataagaagcatgatactgatgattcacagtcattcatcctttccaaattcattcaaacatttgattacaaaatcctgctcttcttctgtcattccattataaagcggaatagacagcacttcttttgcatactgttctgtaatgggcaaagacccttctttcattcccagatactgatacgcctctgataaatgcggaggaatcggatagtggataattgtcccgatctctctttcattcaaatattggatcagttcgtctcttctctcgcaatgaatcacaaactgatgccatacagtagttgcaccttcacgaatctttggaagatggatcaatggatttttaatttctttcagatacctttcacaaaggctggtcttttctttcgtcaattcttccaggtggccaagtcttactctgagaagtcctgcctgaagctcatctaatctggaattggcacctaccaccttgttatggtaacgcttttcacttccataattacggaagattcttacatcctgtgcaatcttatcatcatttgttacaatggctcctgcatctccaaatgctcccagattcttggacggataaaaagaaaagcagccaatatccccaaaggttcctgtcattttcccgtcaaagcaggcgccatgagactgtgcacagtcttctaccaaccgtagatcatacttctttgcaagctccacaactggtttcatattggacgcctgtccgtataaatgaacaaccaggatggcttttgtcctatctgtaatcttctcttctattttggatgcatcaatattgttgtattcatccggttcaacaaatatgggggttgcaccgttaatagtgatgcccataacactggcaatataggtattcccctgaacgatcacttcatccccttttccaattcccagaacacggaatgcgatccacaaagcatccagtccacttgccaggcctacacaatgttttgctccttcatattgtgcaaattcattttcaaaagatttcacttcatttccaagtacataccagccggatcttaacacctgcagagctttatcctcaaattcctgctgatacatttcaaatccacgatccattctattgggcatgatcttcattattgctcattcctcccatctttatcctcaaccttattttcttcttccacaatataggtgggtctgttcctggaagcatcaaaagtcctccacaagtatccacccaagattcccaatgtgaccataataatcccaaaactgagaaggttaaaaataaacagagtagtccaaccactaacctgtatcaatcccatcagcttacagatcaatacgagaatcccccaaaccacagcacctataaaagataccgttccaatacctgtaaccagcgtaatcggcagtgtggagaaactaaacaaagtatctgtcaccagacggacttttttcttaaatgtccatttacttgttccgatctctctttccagacgaacatatggaatttcttctgttttaaatccgctccacaggatctgcccggtaagggcactatttctctcatccagagccaaaagcacctgtatcaccttccgatccagcaggtacacatcgaaaccgcctttgggcatgttggacagagctgcttttcgtaccatccaataatatgtattggcaaaaagcttagttccaaagctttcattcctgtcttttcgtacagccaggactacattattgcccctcttccaactttccaccattttcaggatcaattctgtaggctcctgaagatctgctgcctttacaactgcacaatctccggtacatttctcaagcccgcacaaaatcgctgcatgtgagccgaaattacgggacaggcttacaatcttgatatttgaatcctgctctgccagcttctgcataacgccatagctgttgtccttggatccatcattcaccataacgatctcatattcgtaatcaatggcatcaataaacttttcttttatgtccttataaagaggtaaaagattatcctcattataataaaccggtattactatcgaaaccttcatgctctttctccactattaccttctgcacgtttcacgatactgacaaactcatcataatcacggatatattcatccggatcgtaatgctcacttgcaagtaccagaagaacggagtcttctgaaaaatcatacatatctttccataccatctgtggaagataaatccctgtatgagggcggttcaagctaaaaacagcttcatttccaagtccgtccttaaccttcactttacttttccctgcaacattaatcagtacaaactggcttttcaggttagcatgctgtcctcttacaacatctgtatctgaaccatagatataaaaaatacgcttaatatcaaaaggtacatctttatgcccctcaacaattacaagatgtccccgctcgtctcctttttgcggaaactccagcattttaacaccattttcactcatattggatcctcctttgtttcatttatccattatacttcacttttgtgtatatcttttttatcgtatatacctcgataaatgtaataatctccatccttctgtgggctctccacaggatctaaataaatgtattgcttccagcccactttcattgcacatgtatcactgatctgtgtacgtgaaaatgcaacataattcccattttccttgtctacaaccgtaaatagttctgctgaagtcgcatacaattgaagaggacctgcatgatcagcccgaatcactgaaatattttttccctgcagctgtgcataatcagtccagtaagaatcatgaactgcaagggtattatatgcccaatatatctcttttgagcaaatctctcttccattgaattcattcattgtatctgttctgaaaagggcttcaatattttcaagtctggtaaaatcataatccatttctcttgaaaaaatatcattttcaagctggattgcacagccaaggccaagaatgcacaccagcatcacaacactaatgacctttttgaaatgaataagctttgtaagttgccaaataacatatgaaagcatcagggtcgtaacaaaataagagaaatatgaaaccggaagagaaacaaatccttgatcccccacattcccctggtacattttagataccgaaataggtaagaaaggcaaaaccacacagccaagcaatattaccaggatcagcaggctttttcctaattcctttttctctttttcaacttcttttcggaaaattttccataatgcatatccggcaatcatcaagattgcaatcactcttataacaccttctggagacaaccagtgtttataatagttaaacaaatataaatatttatctgaaaggaacaatccccctggtacagcgctgcgaagcagattcttaataatcacaagagaagccttcagattaaatcctatttgtgtaccatcatattgagacggaaagagctttccggtaactacataacatgccagaaaaacacatcccacaataatcggcaccagacacagcttcatattctcttttatttttttccagctgtacatgtgcctttcggtaattcccaaaagaagaaacaccggtgtgtatgtaataaaagcctcataactgcagcacacaatccaaaacaagatcatagctataattataaattttttcttttctgtacggagataataaatataaagtaataaagatacatataataatgtaagcggtatcccatataaagtcacataggcattcggaagtgtgggttcgaaagaaagtggcataaacaatgccagtaatactgtcactatacctgtcagagcctttttatgaaaaatctcttctgtcagttttgcaaataatccaatattggatataattgtaagaacctgcaaaattcgaaagcaatatcttgattttccgatataccccaggatctgtgtcacaggtactaccaggcaagacatagcccgcccttttccctgaagaagttcggtatatgaatgagtcaaaaattcctttacccctcgcatactccaatatcttgcaagaagttcatcattatgcattattcctaatgtaagcaatggaaaaaagagtaaaacagcaccaataactatcaaaaaaataaagcactgatttcttttcctttcattcataatatcctcctcttcgatccggactttccagcctggtcaaatcatttgtttattaatttttgtttattaatttttgtttattaatttctgtttattacattttgtgtttttcattgtattgatcatatactggatcatcataggaaatcctactcccactaaataatataccggccagataccgtcaaaagatctgggatatgcattcaacatatccatctgcccggagatccggcatacaatataatctacaatcttaaagcccaacagatgaagtgacatgattgcaaaactatactgtccggccaatgccagaaacctttccagaacacttatcctgcacaaaagttttgcaagcgacaggcagaaataaatccccacaaatgttacaggataaaataaccattcattaatgatcatataacgtgacagttctatgatccccagatcactgtataccacatataccaggattccaaaggacaggatcagcccaacaggattcaagatccttttccctgaaagccttcggaagtaatgtcctgccgcaatcacaggtataaaaagatatgcaacctgaagattacataacagccccatactgtgcttcattgcgtaaaccccagcaactccaaacgccatataacacagaactttgactgtctcacgcactccttttcccgaaatacgctcggtaactttccatattgcagcatacagaatacttgcaaaaaacagcattggcacaaaccatagtgctcccagcagttctcctgggctgttaaatgtaagcgtattagaaaatgaaaccagcatatctcctggtgtactcattgttcctgcaataatcccaatctttataaaaagattccgtgtaagcagataaagtaaagaatatagaagaaacgggcgatacaaaccttttgctttctttcctatataactccatatatccggaatatctggtttaaacaggtaccctgtacaaaaagcaaacactgcaagatggtacaaatatacaaaaggccctgcatggattacatgaccgccaaaaggtatatcccagcttgcatgtccgatcacaatcgatatgattcctattccctttactgcatctacaaataaatctcttttattatcttttgcgctcacgtctcttctctctccacttgataatcttcacttccagatcatacagaatattacacggcgtccagaacaggcttaaaagcagataaagctttttcttcaataaaaatacagaaatccgtctggaaagctgaatcattggcgtatcccaatgtacaaattccttaatctcaaaattatcccaaagatccgggaacagttcttccaagcgaagcatatacttcttcagcataggatatcttctttgtaacttttccctacgaattggatacaatgccagagaaagaacctgatgcaaataaacggatcctttgatcaattcttctttcctgctatccatatgctcttttttgatacgttctgtacacaaataaccggtttcaaggataacaaatcttttttcattaaatgaactattctgtatggatcctgttctttgataatatttataaaaaggctgattgactactgctattttttttgcacgtgcaagcacgatcggtgttacagcaacgtcttcattatttttccctacagggaaagtcaatccatgatacagttcacggcgcacaatcttgttccaggatgcaggcatcatagtcatatctatcacctgcgcaaaaatatcctctcttgaacttacagtacaaggatgaatttcattcagtgtgggatcatcaaaagtcatttccagatcacagacaactacatcagcctgctcttcttccagcctatccatcattgacttgtacatttccggatccacataatcatctgaatcaagaaaaatcacatattctccggttgctctttccaagccataattctttacatctgacaatccaccattcttcttgtcatattgatgcatataactgtatttttcacagtattctgcaatgatctgtgcggatctgtctgtggacccgtcattaataataagaacctctgccgtatatttaaggccatccagtgcagccaccactgaatccagacatctctccaggtatgcctgcatattgtataccggtataataattgataatttcatttcactacagcccaaatctgatcttctccctttcccttctctcaaataccttcttttttacatcctctgaaacatcaaaattattcaacgcataatcctgaagtcttacaatttcctcaaattctttctcatgggatgtggaaagtgtcagcccctgtgtttgcattctgtgataatttaatgactcacgataatatgcaatttttcctagtttcagcaaattcatatatgtataccagtcgcctgcaagcttaaagctttttgcctgttccaggatatccgtataatttccgttacgaatcactgcgcttgacacattggcaatggtattgttaatacacatggtttcagcaacctcttccctgccgtctttcacatagttatgattccattttccagtctggaaaatatcgatccatacacgcagatcccccatcagcagtgtattattttcatcaatagttaaagactcacaataagaaattacaacttccggatcatcaaaagcctgcatgactgtttccaaaaacctttcattacagctgtcatctgcttctgcaatccacacataatctgttttggcttgtaaaaatgccttctgccactgtgcgaaaacgctcccggagtttttttcatttttgatcaaacgcataggaatccctgtttgattctctgcaatcagctgattaatcacctctatactgttgtcactggaacaatcatcaagaatgatcagttcagccactggatatgtctgaaacaaaatagaatctacccgttccttcagatatcttgcatagttataattagggataaccgctgtcactttatactttgcttcaacctttttctggggtgtctggctggaataatcggcactcaccgtactttttcgtattttgtttttgaaattacccaagcagcccaaaatatatttcattttcccagtcacgctcatgataagatccttcctttatctctctgcattcttgttatcttttcgctccatgcttgaaaaagccggtattagtttcttccatttttcgaatctgagcctcatatccacttataatggcatttttttctttctcatattcgtctgttctccgtgccatttccatttcataatcctgacatacctgctgaatgtgtccctgttcatattccaatacggacaataattctccaaacagctcatcttcaaaatcgtattttaaaattttggtactaatgcgaattttttcatcctgctcttgcaatcctactgtaatacatggattatcatttacaaaaaaaatctgactgccaattgttttaccattgcacgaaaactctgtaattgtccgcgtattgtcttttgaaagaacctggatttccagatcaccaagcacacaattggcatttataggcttcacctgtacctgattactgcctgcaattacatcaaaagttacatccagcattccatcgtaaggatcaaaatacctgtcacaggtttttctgaaatcatactcaccattattttcaaataccagttctgtaatgtaatgggatgtactgtccagagaaacggtacgtatctgattgccataaagatattctgtactgggcgtcagaacaaacatgtactgatatacatcccctaatggacggtgaatcagttcttttgcaagctctttcggaacatctccataagtatttttaatctctgtttctcccacacggatcctctttgcacgttcatttaccacagcccatccggattcccctgccattctctgaaaagaagagcgggtaaaaaatctcacatgtgtattatccaagataccagttggattataatgaaattcgtcatttaacaattctatgatcacagaattatgcgccacattagggacagaaaccagaacctttcccgtctctttcacagcaatacggcatcttttcaatacttcatccgcatgtaccagatgctccaacacatccgcaaagataataaagtcatatttcttcccggtttccagccaataatacttctcaatatcacctttgtccacaccgatcagtgcattctccgcatactgtgctgcttcactccctgattcttcatcaatctccacaatatccactttgcaatttttatattcctttaaataacgggtcagtcttccatttgctggtccaaattccaacacatccgaatcaggttccacgctgtttgcaatccatgatattgtattctcatcatacatatccagaccaaaatcgtattttcccattactcctctgtatgatttctctaaatcatactctcctttcatattcgtctaaattcttgtagcaattcctatttcttctttttttctttcgttttccattgatgaggcaaaatgcaaactccttctccgatataatcggcagtcactgtaaactccatgatcttacctctgtattcaatgggaactgtcgctgttttatcaaacatccctacatcaaagtaatagccgcctcccagtacgcgtattccttcctgatataccagccgacaacaattccttccataattccagggtattttttctccgtccaacagagtatttacaccgcagatatactcatcatcaatcctttttaaggcaacccccaacaccggtgtctctactttttcatcataaacatcgtaaaacacctccacagttaacggctcatcccatgaaatggtatccactttattgcccttactatcacgcagacaaatccctgcaatttccgcaatggcatctttgcctccgggaacaaattctttcattccttcccctaatggttcctcgtccgcagacagctcctctgctgtttcttctcctgcattcatcatcttcagataatccatatacaggtcacataccctattcgtatcgccgtatgcctgaacctctccatccttcagccacaatcctttcgtgcaaagtctgcggattgcattaatatcatgagaaacaaagagaaccgtaacgccgccatccatcatggatttcatcttgtccatgcatttcatctgaaagcgcaaatctcccacgctcagtgcctcatccacaatcagcacttccggatccacattaatagccacagcaaaagcaagtctagcaaacattcctgatgaatatatctttaccggctgataaataaaatcaccgatatctgcaaaatcaataatactctgtagctttttttccatttcttcgtgggtgaatcccatcatagttccatttaggaagatattcttaagtcctgtaaattccggattaaaccctgttcccagttccagcaaagctgcaatcttcccatctatctttacctgtccttctgatggagtgaggacacctgtcacaatcttaagaagcgtagacttacctgcaccattggtacccacaatccctaccacttcgccttttttaatatccacatttacatgattcagcacacacttctctgtactgtatattttgtgcgaaaaactgaatgcttcctttaccctatcaaagggtgcattatataatttatagctcttcgtaagattctgtatcgatactgctatattttccataaattctccccggatcagatcacatcggcaaactgcggacgcatcttattaaatactttacttcctaaaaacagaagcactgccattactgcccagaaatagagagacaacatcggcttgtcaaaaaaccagactttattgataaaactgtctcggtatccctcgataatataaaaaacaggattcagcttcacgacccactgatactgttcaggaacaatgctgtaagaccatataataggtgtagcccataatgccacatctagaacgatatttacaatctgtcccaaatctctaaaaaacaaaataagagaagacgtaagtcttcccaccgcatataccaatacaagagcggaaaacagataataaatcgtctggacagcatatatagttacctcttctctatttaccagtccgatcaccaataaaagaacaatgaaaacaagatggataaaaagtgaagatagaatcttgattatcggaagtaatcctacatcaaacaaaacctttttaacaagatagctgtattcaatcaatacattggttactgcccgtatcccgtcagatacaaaaaaccagggaatcataccggctgcaaaccagtatatataagatacaccggaaataggtgattctgaacgaagtccgtattgaaacacgcacgcatagatcaaaatcgtaatcactggctgagcaaaagcccagaacacaccgaacagggatcctgcatattttgttgaaaagtcattgactgccaggctccatatgatttctttgttgtctttaattttttttatcattttctattacatctctccgtctgtttcttgtcggccatcggcaaacagtgcagtttttccattgtggacaaatctctacaattagcctttctattttagcacatacctatataaaaaacaagtaatgagaactcttgacaaaaaaaccgatggtgtgcaaattaaccataacctgccccatcggttcacaaatttgttattattcattatattcatctttatgtttcgcagacttttatcccttggctatcttaatcagctttaaaattgacaaaggaaagattatatcccgagaggtattttggtctttttttgccgtgtaactgtgatggcactaaacagttatatattttctctttcatcccggcctatattatgctataaatgtgttagactattttcttttcatatattatgatgttgccgattgactacatatctgtttaattacaccttctatactttagaaactttgtgccgccgcctggcggcggaatggagatttttatgaatattgtatacattgccacagattcttatgtttccatgcttgggatctccctgttctctttgcttgaaaacaataaaagtatggagcaactaagtatatatatcttgtccacagatcttagccagactaatcaaaacgttttgcgacaagtggcaaatccgtaccaccgtcagctgcactttgtgcagattggtgattatcagagtgctttttctgctgatacaaacacttccggctttcaccccattgtattagccaggctgcttctcaccagataccttccacaggaagtgcatactgttctttatctggactgtgatactattatccatggggctcttgatgctatggagcccgcagatttttgcaggactgattatgcctttgcagcagtaccggaagtgtatatgccttctgctcagaagtcctttattggacttgcagaaaaagatatttattataactgtggagttcttcttataaatatggactactggcgcaggcaggaactctgccaggattttgtagactactatacacgaatgaacggaaagctgatgtataatgatcaggatattctgaatcactgctgccagggacatatccttaccttaagccaaacttataatttcgccccggtattatattatttcccctattattttatccgtaaatatcagcccgcatacaaggtttccagtcgtacaacatataaagaaatcatccgacatccttccattattcattacctaggtgaagaacgcccctgggtacacggcaatttcagtccatatcggaaggtatatgattcctataaagcgcagactccatggaaaaatactcctatgatctatggaaaagaaaaggtattgttctgttatcatatcctgaacctgattactgcgatatttccctggttccggaggctttttacaaaatgtataggaatccgttattatcagttcacaaaaaaagattgagtataaggagttgttatgaacgatccaaaggtacacattttattatccacatataatggttccaattatattctggaacaactggacagtatttttcagcaaacctaccagaatttcactctttttatccgtgatgatggatcctccgataataccctggcattgattgaccaatataaaaaacagcatccggaatatgcctccaaaatcaatatactgcccaacctttccaactcaaacctgggctatatggaaagcttctggactcttcttcaaaagtgtggcaatgctgatatctattccttctgtgaccaggatgatgtctggcttcctgataagcttatgcagggtgtcaaatttcttactgcacatgataacagcctgcctctcctttatttttccagcttttatctttgtaatgaagatctttctcaaagatcacctgcacctcaggtttcccttcctatcggttttaaagatgtgcttttttatacacccgcttttggtttttctattatgatcaatgagtgcctgagaaatactgccctaaagatttctgaccgcaggaatcttcctcatgatggatggatgcagaagttagctgctgctttcggcaaaatcctatatgaccccaccccaactgcctattatcgccgtcacggtctggctgtgactactgaaaatcaaagcacaagatctttgatcagaaactggatttctcatgatattctgggaagttccatgtctgaaacccattacgtgatctcccgattttatcaggaatatgcttcttctgtatcagaagagaatcaaaaaatcctgaaattattcgggacagaccaaaaaggacttatcatctggtggaagcgtcttacttatagacctcatcttcgtccaacagctggcggtcgccttgccctgaagatctgttttttcctgaacagatactaaaatattaaggaacattgaacggacaaaaaccttcaaatcactgtgtgaatcatttatcactttcagtaatttgaaggttttcttttttattcgttacttttcataactcttatatcctatcttataaaaccgcatcagaagcttcaccaccggtgccggccagaacttcccgaacatctccagttcttccctggtcttctcctgattcttcagacaagcctttgtagtggcgccatcgtgtatcctgtagtagaacaattctttaggaatataggtaaatcttccctttttcctggcaatctggacaaacacatcccagtccagtgcgtaatgatagccagactggaaaatgcttttcccaagtatagccttatgatagcacacagacggacagcagatcccgtttcccagtgactgcactcccagcttgacccagcgcttgtctgccagaaagagaagcctgagcggcagcttcatgatctgcttgatcagaagacttacatcccaccgaacctgctggtgttggttgatgatgcggtaatccgtcatggcgatcagtgtatcttgatgctttcccagatactgatccatatatttcagataatcccgatgataaatatcatcctgatgggtaatggtcacgtattctgtctcagcctggtcataggcataattccagtcatcctgcaggctgctggtgccttctctcacgtaatatggcaggtgatatttctctgccagatcacggatgtagtcgctgggtgtggatgtacatacgatcaccctggactttaccgactgctgtactacagaccggatgcttttctcaagatatggggatttcccatatgcacatactgcaaatgtatgactgatcataagcctctaacctgccttttgtcttgatttctccacctatttgcattttgtcttcacaaaagcaacaatgtcatcatttttatccatcacattactatctgcttctaattcttcaatagatttccaagcatatttcttaccgtccagttcaaaaatatcgcctttcatgcattctggtacatcattcaatgcaagactgtacagtatatgtttatattgcttatacacttgatcactttcagaatatttacaatggggagcactggtaatgtatgatgttgtaacttgcattttaaccaaatcacttgcatgcttatctatattttccttgtttggatcttctgttcggtaatatggaaataaccaacatttccatctctcatcataaacctgcaaatacttacccgtcggatttgtaatagccaatagagaaaattcatgatatttttctgacaaatgttctgtaaccaactgcgttattttcaataggtcactttcagacaaatcaccgattttcttttccattcgccattcatccatttgaatgatcctgtcaattcttgcccatgattctcttgtcaatccagcttcttgccaatcatcaattctaatactgtacggatttttcttagctttactcgtaaccatcatggcaagaacagcaatggtatttttatcaatgacaatcgctggcctgcgctttgatacttttatctcctgaaatgggaactgagtccaccatacttcacctaaattatattttcccatcttttttctctccttgtttataaatctcatcccactgatcttcttgcatccactcatcatctaacgctatatcatctgccttctcagcacttgcatatagtctgtctctatttaattcaataaaacgcttgaaatcatttatctcttttaccattttcatgaatgctcctttcctatcaatgtgacaattgataaacttccatttccttatcaaaacaaggcatataaaatagttcttggcaggctatctcacagcgattcgattccatataattatttctgcttttctttctcaggatggctttcctgattccccctctatctctccctcacgttcttccagttcacgggtgatctcctcatcgtcgttcaggcggcggttggctgccttagagcgaagcgccacttcagcagacaggatagaaatcttttcctccagctgggacacgataagtgataaggtaaagatcttttctaccagaaggaaaatgatgatcacaaataccaggttagaaggtgacataaatccaagatgcttgctcaattcaaagcagatttccggaaaaatagcaaggataagcaatatcgctgcaaaaaatatccagaaaatggcatcttccattttgaccttgaacttccggatctgccgcaggatccagatcactgtgatcaatgctgccactaccagcagcgcccttaatgtaatggtcatggtctactctcctttcacctttttcgtacccactggaacagcaggatcgagaaaagcattttcatcatataccacacggaatttttgaaattcaggtagctgactcctgcaatacgttcagacatgtgtacctgcacctcacggatatcaactccacagttcaacaggtatgccagtgtatccggctccgggctgtaatgcatgttgtaaccgaaatgcttgatcatcttcttattgaacaggcgcatgccggaggtcacatccccgatatacttgccgcctgtggtcagccagatggctattgtaatgatctggctgccgatcatacgtgaattgatgggcttacgctctgtcttgaatctggaaccgatcacgatatcacagccggtccgctccatctcatcgatcatatctgcaatatatgccggatcatgctgtccatctccatccagctgcagtacataatcatagccgtaataattggcatagcgcatgccgcttttcacagctccggaaagcccggtattaaccggaagatccatgaaattatagcctcttcgggcacagatcttacgtgtatcgtcggtggagccgtcattgatcaccacataatcatactggggataattccggatcagattgtccaccactgtttctatacatcctgcctcattgtaggcaggaatgataatgagtattttcataattctccttgctgcttagctgtcttcgtatgtctgtatttttcttcgatcttaagaagctccctggccctcgcctcaaaggaatactgctcccggatcagcggccactgctttgccaccttctctttgatctcatcataatgtgtctccagctgcatgatgcaatcatcaaactcttctttattattatagtaaagaactgcgtctggaaagatctccttcagttcttcacaataatctgagatcacaggcagtccacaggccagcgcatcaaaaatacggttatttacaaactggtaatccagcatatccttccaatggtcattcaaggtagcctttgcactgcggtacagatccgggatctgactgttctcaatggatatatcctgaaccatgcccttattctgtcccagcatagccttccagccgctgccccagatcttaaggggaagctgattctgggcagaccagatcacgcatcgtctggcaacgcctctggaattgcctataaaaatatagtctcccttagcctgtactgcgctctggtcatctccggactcctccgccggataaaacagctctgtatctgtacactgaagaagcggcagtaccggcacttttaccttttcctgcagacatttggcatagtaattagagcttacacatactacgtcatataattcatattcctccggagtgatcatctccggatggctgatattccacatgatgtacaaacatctggcattccgcctgtcaggtctgtagaaatgacagcctcgaagcaccagtaccacatctgcgtcttcctcgcagccccagtcctccctggtgtctaccactgtatacacgccaagtctgtccagataacgcttcagagtcactgcatatgcgtaatctccccagcgtacctttaccggtccttccggtgccgggcacttgatcacccacaacggcctgcctgcagcttctgtgtgaagctgggcattacgcaccggccagtcatccctgcgtctgaactcctgctcaataaaagccttcagctcttcgatcgcttttgtctgggcaagagatgctttctgaagatctccgatcaccttgctctgacgtttattttctttttccatatcgccaagcttcttatccaggtaagtcctcggcaccggaacaatccttctcagcttgttcttaatggaagcccaaatccccataatgctactcctttaacactttataggtcacattatacccaatccggctctttagtgcaatgcttttcgcctttcaggcctgtgtcaccatatcagcagcaaaaagtgcggctccaagtgcaccgcaaagctgtgcctgttcgctgatcacaagctttgtgcccagccgttcttccagggtttttacaaggccctgattcctggaaacaccgccagtcatcatatatttttcttctccgcctacccgctttacaagggctgctgtcttggcagccactgccttattaagaccatggactatatcatctgtttctttattctgggcgatcagggaaaccacctctgattcggcaaaaaccgtacacatactggaaatagtaatgtcttctttatattggatgccgcaatttccaagctgatccaggctcatctccatagttctggccatcatctcaagaaaacggccggttccggcagcgcatttatcattcataacaaaattcactacattcccctgctcgtccagtcggatcactttgctgtcctgtcctccgatatccaccacagtacgcacagaaggatccaggtaatgtgctcctcttgcatggcaggtgatctctgtaatacttttatctccatcctggatggctgtccgcccatatccggtagtaaccagggcatcaatatcttctcttgtaagcccagcatccttcagggcctcctccagagcacgttctgcaccaatggcagcccctgcgccggtaggcaggatgatcccggctacgatttgtctgtttttatccaggatcaccacatctgtactggtggatccgctgtcaatgcctgcaaaataaccttttcccattttccgttcctgtcctttccgttcatcctgcaccaggctttctgcaaatgcctccagtctagtaagaagctgtccgctgctctgtatagtataatccgactcgatcttcaacaaaggcactgctgcatgctgctttagttctgcatattcaaagctgtaaaaatcacagaattttactgtatggtatatgattcctttcagacccggatcctggtacagctgtttccggcctgtatggtccatcatacgcatacatggcatctgacccagaagttctcctgcataccagtccatcagcttatcaaaatccttctctttgggaggctttgcctctcctacagaacgattatttacacaggaatcgttctctaccggatatggcatggatttctgtaccatttcatatagttccttgcccattctggcacccataacgcttaaatgggctcctttttctttcaccggcggtacaaatgcctttgcaaatgcttccctgcaaaacatctgcagataatcctgtcctttatagtctgcatatgcctttgccaggcctttcagctgaagggcagtcctctcccggctgcagcagccttccccatgcagcatgtctaccatataaaggaaatccagctttcccatgtcttccagcacatcataaacactgcggatggtatcgcagcagttcacaagaaccagctccttcacccgtccttccataacagcttccagcacagctttcccaaagccgcagatattaggatggaccatctgctctgcaagttcaaaatttcccggcattccattcagattttcgcagctggctcccattgcagccagcagttctattggtgtatatttacacacataatatattttgtcattattcatcatgtcctcacctattatgcctgaagcatttccagaaaagcaccaagtctggttgctgtctggccttcccctccatggcttctgtcacaaccgtcaccatccaggatcaataacgggattccctgctcctcaaacttcttttttgcaatcctggatgcgcccagcgtgtgcttgcagccccagtgtccaaaccatacagcaccatctgctcctgcttttttcgcatttttgatcccattttcgatcctgcgggaagcacttccgttcagtgcatggtaaaccatccttgccgccattgcttcataaggcttctggggatcaaaatcgtattcatcaagatcataggtatgtgccagctcgcagcctacgatctgggctttttcctgaaacatcagctctttttttactgcatcagaccagaacggaatggtatgcatccagtagatcttctttccttttgcagggctggcctgtaaaacatcctttaacagccgggtggtatattcctcttcctcttttttcccaagaagaatgttgttagtcatgccttcatacaggggcgtcaccagatccgtaggaatacacctgtcttttctaagagactgaaacctggaaatattctccagagtgcgtctgcttatgcaaagccgctccttcaggctgtcttcatcaatgggatagcctgtgcacttttccagaaaagcggccagctcctccaattgttctgccacatactttacattgtcatggctctgcccaaagggcacatcaatggcaaagaccggaacctgatacatatctgccagataacggaaggtaagaaggtttgcatcacataccagattggtataaacgatacacttgggcctgggaaggatcccccggtctgctgccccgataaaggttttgtggtagctgcaaagggtctcggaaatcccctgatcctcagcctgctgaaggcaggcgcgctctgctgcagaggctgtaaggtaacaagaaaaagcttccacattgtatggactaagtcccgcctcatgaagcagctcacagggtgtaaaaatactgaccaccgaacatttttccggtcttgttaagggtgccagcatggtgttcatcatcagatgggccagatacctgtgcgcagggatcagccttttatccgaaaaaaaacgaaatttcagattctgggcagaccagccggttttcaaaagccatctggcctttgcaggatcctcatttccaaatttctctatatattttccgtatgtctcaataatctgcatcttatctagtctccaataattaatcttgtcgccaataattgatcttgtcgccaaaaagaggactattttggcaaatagtcctccttcggcatttattcttctattaatttataaactctcacaatctcgccaacgctccaggcctgtgcgtaacagcctctggatgccactggcttctccccgtcgtaaatctctgccagatgaaacagacagccttctgtaagccatccttccaaaagtttcagatcctgccggatctcctcttttgccatttgttggtcttctgcgcaggcaaccacagccctgtaatatgctcctaatgggaaggtccacaccgttccctgatggtaggctctgtcacgctccggctgactgcctccatatatcggatgaaatgccggatccgctggatccagggtacgaagtccaactggcgtatacagtctttcccgtacagccgcaagcagtcgtctgccttgctctttggaaagcatagtataaggcatggacagggcaaatacctgattgcagcggaactgttcttcctctgctgtgccatttaccacatccttcagccagcccttgtcttccatccagaagttctccagaaagcttttctttactgtgctggccagcttctgataatccctggcctcctgtcctacaagcggtgatagctcctccagaatcttcagcgcattataccagtatgcattgatctccaccgccttaccatggcgcggcgtaggaagctcatcattaatccgcacatccatccaggtcagctgctctttgccctcgccggccataaccaggcagtcccagtccatatggatatgatagtctgtgcctctgcaataccagtatacaatatctgccatcacaggataggcttctttaaggaattcctcatcattggtggctttataatattcgtacacaccattgataaataaaagcggtgcatctaccgtgttataaaagggatccttatcaccttcaggaaacaggttgggcatcaaccccttcctgcaatacatcataaaggttttcagaatgcttttgcactcctcgtacagtccaagtgccagtgtgcacccgggaagtgcgatcatggtatctcttccccagtcctcaaaatatgggaaacctgccaggatcgtcttgccgtctgtggactctctgtgtgccaggtactgaaaagcacttgctgcaagcgtctgtcctgcagtgcttttcaggccactgtgccgaatcagtgcctgtctgtcctccttagcatgccggatccatccggaaatagtatttgcgtcgcattcatccactctccggtccagactgtagatcagataaaactccctggaataatcgtccatcttaaaacagatctcatgattctgcagggctgtccctaccgaatcacgaccatctctagcatcctgatcatagtacagatcctgagaaaatgcaatttctttttttacaagggtaccattatgcttctgatgaagcaccaggccattccctgcaatataattctcttctactgtaaatacctggtcttttgcaggatttttaccttttggaacaaaggccagaagcggagacacatgaaggatcacttcttttgctattttctgggaaagctgatacctgagggcaatggtattctccccctgaagcataaacagctccttttttacagatacgtctcccacctggtaataccaggtaggaagcatctccatctcaaaggcttccagataacgaaagccctcctgattctttgtccggtttacatattcctgggaaaaaagcccggtatttttcccccggatctccagatattcctctacattggaaatcagacgtactcgcttattaggtgccttctctgctgccataaacagcgcatggtcattccttgctgtatctccgatcacagtcagggaagaataaccacccagtccattggtcaaaagaaaacatcgttcctggcctcttctgaaatcctgccagtgaaatctgcacagacttactttcatagcttacctcatcagatcagcctttaacagctcctgaaagtccatccgaataatacctttgcatgaatacaaacaggatcgcgatcggaatggagatgcatactgcacctgctgcaaagctggtataccatttatcaatatactctttctcaagcatcttccacaagccaacggatactgtatagtatttggcatttgcacggcagattacctttgcaaagatgaaatccagccatggattcaggaacgatgtaagaaccgtatatacaataatcggtttacttaatggtatggttacttttgtaaaaacctggaatctggtagcaccatcaaggtatgccgcctcatccagtgccttgggaatggtatcaaagaatcccttggcgatcagaaattctatacctgcaccaccactgtataccaggatcagtgccacacggatcatggctccgtctgtcaggttcaggactttcaggatataatatacggcaaccatggacatgaatccagggaacaatttcaggatcattgccacattcatatacggtttacgcattttgaaacgaagtcttgaagtacagtatgccatggaaagtacaaagaaagtggaaatcaggcatacgaagcaggcaataataaatgtatttttaaacatctgtgggaagtcaaggttctgtgtatccgtgaacagccgcacataattgtgaagggtatatcctttcgggaaaaatgtagtaacataggatcccttctgagaactgaagctaagcagtatgatccacaggatcgggataacccagatcactgccagaacagccagcaatacatgtacgatcgtatcggaaatgatcccttttctccgcatagatcctgtctttttttctttcattattggaatccctcctcattcttgtaagaaccgctgtttctgtatgtaaccagtgatacaatagccaggatcacgaatgtaaggatacctacaactgcacctacattgaaatattgctgatcaacggtcagcttgtacagccatgttaccagaagatcggttttacctgctgtatagcctaccggaaccggctcgcccttggtcaggaggaagatcacgttaaagttgttgatatttccggtaaaggttgtaataaggtatggggttgtaacaaacagcatgtatggaagggtgattttaaagaagatggtaacggaattggctccatccacttttgcagcctcatacaggtcatttggaatattctgaaggataccagttacctgcatcatggtaaatggaataccgatccacaggttgacaataataaccgtcactcttgcccatgtaggatcagacagaaacggcagcgggctgttgatgatccctgcattctgcagcataacattgatcaggccgctctctcttaacatacttctcataagaagtaaggatacgaactggggaactgctgcggaaagcatgaagcagaatctccagaagcctttgatccttgtagttcttctattgataatgattgccagcagcattccaaggatatagttcaagaatgttgcgaacactgcccataccagggtccatccaagcactgaccagaaggtcttgccaatggtgttccccatgccaagcacggtagcaaaattcttcagccctacccagttaaacagggtcagatggtctcctaccttactgtagctggtaaaagccatacaaatcataaatacaagaggcaggatagtaaatacaagaatgccggtaatcggcggtgtaagaagtgtccagtgcagcttctgatcaaacagttttttgaaatcctcacggaagctgttcacatgtttgccttcttttgtgcggcactctgcctcataggcgctcttcatatttgcccgccaggtcacgatgaacagaccggtcaaaaacacggtagcaacgccataaaggagaaacaggatcgtcatgtctcctgctgtgtattcgtagataccttttgcttcattccacacctcttcctgtgcatttccgcccagtgtaatgaagtgttccagatttgtgataccgcttgtcaccatgaaccagatatatgctgcttccatggcaaggaacagcagtcccttaatcacctgcttatgagcaatgttcccgaatcccataatgatcatggaaagctttgtggctgcatttcctttggtaatggccttactcaccttgtaaggttcatcaaattgttttgctttctttttccagattgccatacttttccctcttcttttttcatcactaagggcattgcctcaatatctatgtggcaatgccctcaggtcatttcagtttaaaagtttaattattcaactgcggaggtgttcatgcttgtgttgaaattctctgtcatttcagcagcattgtcatgagtaacttctccgtttacaagggatttaccaaagttctctgccggtgtccagtagttattcatagctgttacgaatggctgaataatagatgttgtattgaatgtatcattctgtgctgttacaagagcgtcgctgctgattgcttcgtctgcaaggagctctgtgttgcaaggaatcacacttctcatctcatagtgagctttctgtgcatctgcgcttccaaggtagcttgcaagagctacagcaacctgtgggtattcgcagttcgggtttacaccgattgctttggatcctgcaaaggatttcatctgtttctcttctccgttgatagtaacggttggaagagatgttacgccaaagttgtcgccaagtgcttcttttactgctgctgcatcccaggatcctgagaagactgcattgatagaaccatcacgaagaccggaaagaccagatccatcagcatcgtttgtgaagtttggatttgcaacaaggtctaccaggtaatctgtaacctgtgttcctttatcgccggagaagtcaacaccagctgcttcatctgttccgtcctcaccaaacagtgtacatccgtttgctacatagaaggaagcaatgtaccaggaatctgtaagtttgaaggaaacctttcctttttcaagcattgtacattgtatcaaggctcttcacatcatcatcgctgaatacggatttgtcatagtacataaaccatgtatttgttgtgaaaggaacaccatatactgcaccgtcaatggatacagaatcaacgatctcctgtgagtttgtctctttaatagctgcctctgtgtcaccaccaagtctggaaattgcgttagaagaaaccagatccggcagattgtcgtttgcaaacatataaacatctgcagcgccttcaacgtcctgtgttacggtggcttttgcttcgccctccgggcaaacgccatactcaaaggtcagatcccagttcggatgagcttcattgaactgatcgcacattgtctgaagccactgtccgttctcctctgcctgatcctctgaaggtccccatacagtaagggtggctgtgatcgcttcctcatcggaatttgcctcttctgcagctaccatattcaggcttcctgctgtcatcattcctactgtcatagcagcagtcagcataactgatacaacttttttcttcatacttaaatatcctccttattatcttacaaatccatgtctggattgcttcctttgatgatgttattataacaagaagaaactttggatgaatatatgaaaaatccaagaatcatataaatattttaggtttttggaattgtattttatgcaattatccatgtttacaccagttatctccaatgttaaaatacaaaatagctatttattgaatggattatcgagaggatttttcttatggaaatgggaagtaatatactggaggtatgtgtggattccacagaatctgccctggcagcccaggaagggggcgcatccaggctggagctttgtggagatcttgtgatcggcggaaccacacccagcccatgtctttttcaggaaatac

SEQ ID NO: 64 - DNA, 31271 bp, Unknown
  gut microbiota DNA sequence
cattattttacagaaaaagtttcatactctcgctattggcttgttatactacaaaattcttctggagaatatacagtaaactttgcctttttatagtctttaagatttcgagtcacaatacaatccattttttctctgattccagtttctatcattacagcatcttcataatcagaaattgttgatgataatgccaaacagatatcattagatgttgtatctaaaatttcgacgatagaaaaaagtttttctaatgtttctcttgttactgaatcactatgagttatacgatgaattaagtaataaatatcggtaacagattttgcagtaatatatccattaatctccccagacccagcgagcataaagacttttaaagcactttcggcaaaaggctgccgttgttgaaggaaatccacaactacacaagtatcaattaggactttcataaatttttgagcctttctttttgggcatcttctaaagtgactgtattgggaatgctgccataaagctctttcacaatatctaatttgtttttatatggagacgtaatttttgcaatgattttgccgtttttggagatataaatatcttcggttgcagcttgatcaaggtatttccctaaattcgatttaagttcagtagctgtaattgacatatgcaagcctccttttcattttctgtgtcaatcatagcatattcgcatgattcaatcaatgttatcgtacgattttatcaatgtttttgccaatactgctttgtacgatacggctatatgcttttgactgctctgccggacgcaagaactgttttatattgctgtagtttacaaaaaaatgagccttctgattgcaaaaaaatagtatggctgtaattaatgaactgttaatgaataatttatgtagctgtagtttatgaaaaatttattgttttctgtacaggaaagtgttaaaatagataagtgtatcattcgcctgtttatagaaatagggacaggatacatatgaaaggcaataacaaaacgaaaataataatcaggagcatctatttgcacctgtcaagaggagtagattcatgagcatgttttcaaaaatattcgggacgcacagccagcgagaggtaaaacgtattcttccactggtggacaagatcgacagcctgcgcccggagatgcagaaattaacagatgaagaactgcgtgacaaaacaagagaatataagaaacgcctggaagagggagccacactggatgatcttctgccggaggcttttgccactgtacgtgaagctgccaagcgtgtactgggtatggagcattacagggtacagctgatcggtggtattatcctgcatcagggacgtattgctgagatgaagacaggtgaaggtaagacattggtatccacactgccggcatatctgaatgccctggaaggcaagggcgtgcacatcgttacagtcaatgactatctggcaaagcgtgatgctgagtggatgggcaaagtacatgagttcctagggctgaccgtaggtgttgtactgaatgacatgaagccggaagagcgccgtgctgcatatggttctgacatcacttatgtaactaataatgaacttggatttgactatcttcgtgacaacatggttatctataaagagcagcttgtacagagagatcttcactactgtatcattgatgaggtggactctgtattgatcgatgaggcacgtacacctttgatcatttccggccagagcggtaagtctaccaagctttacgaggtctgtgatattctggcacagcagctggagcgtggtgaagccagccatgagatgaccaagatggcagccatcatgggcgaggaagttatcgagacaggtgactttgtagtaaatgagaaggataagatcgtcaacctgacagaacagggtgttaagaaggttgagaagttctttaatattgagaaccttgctgatccggagaatctggagatccagcacaacattatccttgcacttcgtgcccacaatctgatgcacagggatcaggattatgtggttaaggatgatgaggttctgatcgttgatgagtttaccggacgtatcatgccgggacgccgttattccgatggtctgcatcaggcgatcgaggctaaggagcatgtaaaggttaagagagagagcaagacacttgctactatcacattccagaacttctttaataaatatgacaagaagggcggtatgaccggtacagcccttaccgaagaaaaagagttccgtgatatttacgcaatggacgttgtagagatccctactaaccgtccggtacagcgtaaggatctggatgatgctgtgtacatgaccaagaaagagaagtttaacgcagttgtggaagcagtcaaagaagcacatgcaaagcagcagccggtactggttggtacgatcactattgagacttccgagctgatcagccgtatgctccgcagggaaggcattcagcacaatgttctgaatgccaagttccatgagctggaggctgagatcgtagcacaggccggacaggcaggggcagttaccattgctaccaacatggcaggtcgtggtacagatattaagcttgatgatgtggcaagagaggccggcggactgaagatcatcggtacagagcgacatgagtccaggcgtatcgataatcagcttcgtggacgttccggacgtcagggggatccgggagaatcccgtttctacatttccctggaagatgacctgatgcgtctctttggttctgaacgtttgatgaaagtattcacatctcttggtgtggctgagaatgaacagatcgaacacaagatgctttccaatgccattgagaaggcacaggagaagatcgagttcaataactttggtatccgtaagaatcttcttgattatgatgctgttaataatgagcagcgtgagatcatttacaaagagcgccgccaggttctggatggtgagaatatgcgtgatgccatctacaagatgatcacagacattgtagacaatacagtggatatgtgctttacagatgatgtggattcagaagagtgggatctggatgagtttaattctgttcttcttcagatcattcctattgagcctcttaccaaagaggtgaccaaaggcaagagaaagaatgagatcaagcactttgtaaaggaagaagctgtaaagctttatgaagaaaaagaggctgagttcccggagccagagcagctgcgtgagctggagcgagtgatccttcttaagagcattgacagcaagtggatggatcacattgatgatatggagatccttcgccagggtatcggactgacagcttatggccagagagatccggttgttgagtacaagatggctgcgtttgacatgttcaataacatgatcacatccattcaggaagatactgtacggatgctgtatcatgtacatgtagagcagaagatcgagcgtgagcaggttgcaaaggtaactggcaccaacaaagacgataccagtgtgagaaagcctgtacagcgtaaggagatcaaggtatatcctaacgatccgtgcccatgtggaagcggaaagaaatacaaacagtgctgtggaagaaaagcagccaacgtgtaatcatgattgtggtgttttgacaccaaaatcataatatgtgatgcaaatgcccctcaggctctaaagagctgaggggcatttattaaacatttttttataggctctggaaaaggtggtgtaatcggaaaaaccgctttgtgcggctgctttgatcacaggcatgccttcactgatcagatcacgggccagaagaagacgtttgctgttaatataactgtgcagagtataacctgtttcagatttgaatttacgcatcatatggtatttgctaaggtagtacttttctgcaagcacatccactgaaagatcagcagtcagattgtggttgatatattgaagcagctcctggatctgttggtcgcaggtataggatttttgatcaaaaatatattgtttttccagaaagatccggttcaggtacaccataaactgggaaaaaagagcatcgcttaatatgtcattgccgaattgagtacttttcatggaggcctccagttcaaaaagaatttctttcagcttttcctgcatcctgctttttaaacgaatcaggttaaaacttcggtcactggccttctggaaacattgggtcagtgattctttttccaggtcatccctgatccacagcacaaaacgttcatatggaagagaaggcaggatttccggcttgtggatcgcatgctgattaaccagaaggatatcccagggcttcagatgataggcttttccctcaatatgataggtgacttttccggataaaagaatcaccactttgtggaagtcatgataatgaaagggaaagatccggtcttgctggtcccggatatggaaaagccggaatgactggtccagatatcctgttttttctgttggctcctggtcataaaacataaatacacctccgtatgttaagcccatttggtctcctaaagacatttgctcacaacattatcctcacaacattattttatacattgaaagcattttttgcaatatgtatggcattatattctatgtacaatgcgaaaataaacaaatatactataggtaccaggattgcagaggtgcgcagtagaagtatgtcatgcaattgcatgacgcgcacctcgcagcaagaatgccgaggcattcttgaatggggaaaaggagcaggcttatgacagacagtattgttatgacaaaatatcagggacttggtaacgattatcttgttttggacgcaaaaaagaataaagtgcagcttcaggggaaaaagatcgctgttttatgtcagagaggctttggcctgggggcagacgggatcctgtacggtcctgtagaaattaacgggaaaatgggtgtgaggatctttaactcagacggcagtgaatctgccatcagcggcaatggcgtaaggatctttgcaaaatatctgatggatcagggctatgtgcatggaaataaattttccatagaaacagaggccggaacaatggaagtagagtgcctgaatgccagggcaacagaatttcgggtaaaaatggggaaagcttctttcatatccagggaaatccctgtaaccggagaaatccgggaagtgatcaatgagccttttgtatttcagggtcaggaatacaaggctacctgcctgaccgtgggaaatcctcattgtatcatctttacagatcagatcagtcgggaaaaggtggaaaagctgggaccctatgtggaaaatgcagatgaatttccggaaaggatcaatctgcagatctgcaggcagatcgacaaaggaaatctggaaatagagatctgggagagaggctgtggatatacaaaggcttccggtactggcagctgtgcagcagctatggcagcttaccgtttggggatgatggaacgtcggatcaatgtgaaccagccaggaggaatgatccagatcgatatcggaaaggatgacaccatctacatgaccggaacagtagggtatattgcagacatccgcgtggcagaaagctttttctcctgaacttcctttgaactacctcctttacgggacgttgacaaaatcagcgttatgacgtattcttttcagaaagaatgatcaattacgttgcagtgatattcagcaaggatgatcatgcggcagtgagtggttactgccggcatccggatagataaggatccataaaggaggagtaaatgtcatctacagacacaggtaaggccagtgaatggcagacagaagaaatacggaaagagatttgtaatacagattatcataagctttataatacaggcagcaacgaagaacaacagaatccagacaaagatcataagggggtgcccgcagggcatgcccttattgcaatgagtggaggtgtggacagctcagtggcagccatgctgatgtgcaaggcaggctatgagtgcattggcgtaaccatgaaattatacgataatgaagacgtgggactgtccaagaatcacacctgctgtacactggatgatgtggaagatgccagaatagtagcgcatcagctgggaatgcgtttttacgtaatgaattttaaagaagacttttcccatcaggtgatcgaccgctttgtggatgcctatgagcgtggggatacacccaacccatgtattgactgcaaccggtacatgaagtttgcaaagctttatgaccgggcaaaggcagtgggcttcggtaccattgtgaccggacattatgcacgggtggaatatgatgaggaaaaagaccggtggcttttgaaaaaggcaaggaatctggcaaaggatcagtcctatgtgctttattttatgacccaggatcagctggcccataccaggttcccactgggagaatatgcagacaaagagaaagtccgggaactggcagaagaatatcattttgtaaatgccagaaagcatgacagccaggatatctgctttgtgccagatgggaattacggagattttattgaaagacgcacagggaaaaagtacgaaagcggagactttgtagaccagcagggacatgtgctgggacagcataaaggtcttctccgttataccatcggccagagaaagggccttgggcttgcacttccggctcccttatatgtgcgtaggaaagatatggccaaaaatcaggtgatactgtccccggaaaaggatctttatacaaaagagcttttggctaaggactttaactggatctcctacgagccgccaaaggaaccgatcaaggtaacagccaagacacgttaccgtgcaaaggaagcaccggctatggcccaggcactgccggacggcacggtaaaggtagtatttgaagagccggtacgtgcagtgacaggaggtcaggcagttgtactttatgacgaagatgttgtagtaggcggtggcacgatccttggatagaacctgtaaaattattataaaatttgacaaatgatattttactttatctgcctatgcgaactacaaaatgcaattccaatgcagttgtttttttgccggggatatgctaaagtataagacagcctggaaacaaaggcagtaagcctgtttccacacaaatataagaaagaaggtgaagctgtggttgaattagaccagttcaagagcattcttgcaacgtatacagaaccattagtggaagtgagggattcactttgacctggctaacaaagagcagaaggtcgaagaattagaaagggagatggaagcacccgacttctgggatgacgcagagaagtcccagcagaaaatgaaagaattaaaaagcatgaaggatgacatggagacatatcagcacctggtatcccagatggaagatatggagaccatgatcgagatgggttatgaggagaatgatccggcgatcattccggagattcaggagatgctggatgagttccgcacagattttgacaatatccgtatcaaaacactgctttccggcgaatatgacagcgagaatgccattatcaagctgaatgcaggagccggtggtacagaagcctgtgactggtgcagcatgctgtaccgtatgtatacccgatgggcagacaggaaaggcttttctgtggaagtactggactatcttgacggagatgaagccggtatcaagtctgttactttccaggtcaatggggagaatgcatacggacttctgaaatccgaaaagggcgtgcaccgtctggtacgtatttctccgtttaatgctgcaggcaaacgacagacatcctttgtatcctgtgatgttatgccggatatagagaaggatctggatgtggagatcaacgatgaggatatccgtattgatacctaccgaagcagcggcgccggtggacagcatatcaacaagacttcctctgcgatccgtatcacccacttccctaccgggatcgtggtacagtgccagaatgagcgttcccagcacatgaataaagacaaggctatgcagatgctgaaggccaagctttatctgctgaagcagcaggaggcagaagccaagctttccggtatccgtggagaagtaaccgatattggatggggcaatcagatccgttcctatgttatgcagccatataccatggtcaaggatcaccgtaccaacgaagagaccggtaatgtggatgcagtgatggatggcggcattgatattttcatcaatgcatacctgaaatggatcgccctttcaaaataacctgaaaatacaagaaccctcttgcggcagcccctgaggctgtggtaatatatccattgttagaaaacaaatgtttttgtaatacggacagagggacatgcatggatagaacaaacgagaaaaagaaatattatgtagtgacagagcgggctgttccggaggtgcttcagaaagttgtggaagcaaagaaacttctggattcaggccgcgtactcactgtacaggaagctgcagagcagacagggatcagccgcagctctttttacaaatataaagatgatatttttcctttccatgaacaggccaaaggaaagacaattacctttatcatacagatggatgatgaacctgggatattgtcaaatgtactgaagtccgttgcagagtttcatgggaacatactgaccattcatcagagtattcccatcagtggcgtggctacgttgaccctaagcgtagatatccttccgggggccggtgatgctgaggccatggtagagaacattgaacagacggaagggattcattatcttaaaatattaggcagggagtaaacaaatgatcaacatagcagttttaggatacggcactgtaggcagcggagtagtagaggtgatcaataccaaccaggacagtattaacaggcgtgcaggagatgagatccggatcaaatacgtgttggatcttcgtgattttccgggggatccggtacaggaagtgcttgtacacgattatgagaccatcgtaaatgatccggaagtagacattgtagtagaagtgatgggtggcctggagccggcacatacctttgtgaaaagagcattagaggcagggaaaagcgtggctacctccaataaagcattggtagcaaagtttggtcctgagctgatggacatcgccaggaataagaacattaatttcctgtttgaggcaagctgcggaggaggtattcccattatccgcgcactgaaccagtctcttacagcagaccagatcgatgaagtgacaggtatcctgaatggtaccaccaattatatgctgaccaagatggacagggaaggcagccgctttgaaagtgttctgaaggaagctcaggaaaaaggatatgcagaggctgatcctaccgcagatgtggaaggatatgacgcatgcaggaagatcgcgatcctgtcttcccttgcatacgggaagtttctgaattatgaaaaaatccatacagaagggatcaccaggatcactccggaagatatggagtatgccagggttatgggtatgtccattaagcttctggctacaagcaggaagctgtcagaggattcctattatgcagtggttgcccccttccttgttggtaaaaataatccgctgtacagtgtaaatgatgtgtacaacggtatttttgtccatggaaatgtattgggagatgccatgttctacggcagcggggcaggcaagctgcctaccgccagtgcagtagtggcagatgtggtggatgaagccaagcatcttcatgagaacatgccaaatgaatggaacgatcagccacttccccttgcagatcctgatcaggtatccggacggttctttgtacgtgtgcagacaaccgatctttcgctgatccggagtgtatttgggactatagagcagatacaggtaccaaaggcagaaggagagacaggctttgtcactgcacagatgacacttggacagtacaaagcaaaagcagcagagatcaaagcggagatcctttccatggtccgcatcaaggactgagtgaccggaggcatatatgttaatagttaaaaaatttggcggtacatctgtggcaaataaagaacggatctttcatgtggcagaccggtgtatagcagaataccagaaaggcaacgatgtagtggttgtgctttctgcaatgggcaaatatacggatgagctgatcaaaatggcaaaggacatcaatgaaaagccaccgaaaagagaattggatatgctgctgaccattggagagcagatgtctgtggcactaatggccatggccatgaaccagagaagggtgccggcagtatccctgaatgcatttcaggtgactatgcataccaccagtgatcacggcaatgcaagactgaaaaggattgataccgagcggatccgcagggagctggaaaaccgcaggatcgtcatcgtcaccggatttcagggcgtgaacaaatatgatgattatactacccttggcagaggcggctctgacactacagcagttgcactggcagcagctcttcatgcagatgcctgcgagatctatacagatgtggacggagtttatacggcagacccaaggaaggtgcccggagcccgcaagctgaaagagatcacatatgatgagatgctggatctggctactttaggagcaggtgtgcttcacaaccgttctgtggaaatggccaagaaatacggcgtgccccttgtggtgcgctccagcctgaacgacagtgagggtacagtagtaaaggaggtaacaaccgtggagagaatgctgatcagtggtgtagccctggatacagatgcagtaaggatcgcagtgatcgggatcaaggatatgccgggtatggcatttaaggtttttgatacacttgccaaaaagaagatcaatgtggatgtgatcctgcagtccatcggacgggcaggcaccaaagatatttcctttacagtaaataaggatgatcttgaggatgcagttgccactctggaagagaaccaggcaagactgggctataaagaactgcattcagagagaaatattgccaagctttccattgtaggggccggcatgatgagtaatccgggcgtggctgctaagatgttcgaaagcctttacaacgaaggcgttaatatcaatatgatctctacatcagagatcagggtaacggttctgatcaatgaaaaggatgggatccgcgcaatgaatgcagtacacgatgcgtttgggcttaccgactaaaagcctagaagggagaaaacgatgaaaagaaaaatgatgattgccttattgatggcagccagcttatgtacagtatctgttcctgttattgcagaggagaccgcagggacacaggaagcagcgcagacagaggaaactgctgaagcaccagagactgcagaggcagaaaacacagaagaagcacagccggcagacccgcaggcttccactactttatcggacaacatttatgattttcagctgaaaatgggagaagatatttgccagttccctatgacttatgaggcttttacagctcttggttggcagctttccggcgtggaagaggacgaaagcgtaccctctaattcctactatatgatcgattttgaaaaagagggacttcggatcggagcagaggctatcaacctggggatcaatcagacatctgtaagccagtgcctgatcggttctgtgactgtggatgcaagcagcagctacggagtggatctttccaaaatgccggtagagcttgcaggcgggatccagatgggtacctccacagtggatgatattaaggcagcttatggagatccttctgatgtatatgaaggagattattatacacagatgacatactccaaggatacttatgagcgtgtggaactgtatgtatataaggacgacaacacattgaaaaaagtagatgtgcgtaatttctcagagccggaagattttgaaaaaggtgaagtagatacctccacaccggatgttgtatctgagtatcaggcaccccaggaactgggcagtgatatgctggatccggtagtagagtactgcggtgatctttaccagcttcctgcacctgtaagcgcttttgaggcaaatggctgggtgatccaggatgcagctgaggacgcatatgtagaaggcggcggtctggaatttattgatatgatgaagaacaaccagagcgtaagattttctatctataacaaaacatccaatgcagttacactgtccaattgctttgtaacagaactggaggttggaaattatgacagtgacagcctgagcctgaagctttcaggtggatttacattaggtgcatccaaaagtgatctgatagcagcagcacaggaaaaaggatatctttacgatgaagaaaatggttatctgaccatttatgagagcgaggataccaagatcgacacaagagcacagttctggttcaatgaggataaggatccggacacagctgctgcagttacctataagaattataaccttcagtaacacaaaaggcagcatgcctgtgtcactggaccggaggagaagatgagtgattatattctgagctgctgttcaacagcagaccttaccaaggaacattttgaaaaacgtggaatatcttacatctgttttcactatcagatggatggaaaacagtatacagatgatttgggacagagcatgccttttgagaagttttatcaggcaatggcagatggggcagaaacaaaaacctcccaggttaatgcagaagagtatcaggcatattttgaaacattcctgaagcagggaaaggatgtgcttcatgtgtgcctgtcctccgggatttccggagcgatcaattctgctatgatcgccaaagaagagctgtctcagaagtatccccaaaggcagatcctggtggtagattctcttggagcatcttccggatacgggcttttgatggatcagctggcagatcttcgggatcagggacaaagccttttgcaggtttacgactgggccgagcagcataagctggagctgaatcactggttcttttccacagatcttaccttttatatcaagggcggcaggatttccaaaaccgccggctttatcggcggcgtgctgaatatctgtccgcttctgaacatggacgaccagggcaggctgatccccagatttaagatccgcaccaagaaaaaggtgatccgtaccattgtagacaagatggaggaatatgccagagacggcatagattattccgggaagtgctatatttcccagtccggctgctatgaggatgccagagctgtggcagacctggtagaggccagatttccccacctaaacggaaaagttctgatcaattatgtaggtactaccattggaagccatacaggccctggtactgtggctcttttcttctgggggaaaaaacgtacagactaagaagctgtggccgaatcgaaggagatctgataatctatgaagaaaagaagttcaaaagaactgaaaagatacgcaaagcaggctttggagggcagatacgggatcgctatcatgggtgtgctggcagcatttggcatcaaccttctggggaatcttctggcagggaatctttttacaggcgaattcctgccaactatgatcatgagccaggtttttctgtttatcctgtcccttgttacagggatcctgtctgcaggattgtattacatgtttctgaatatggccagagacagggagtttggtcttggcgatctgctgtactttttcagaaatcatccggatcgggtgatcgtagccggctttgtgctggcactgatcgatctggtggtatccattccctactactggtacagctatactgtgatccctggtaatactctggaagcacaggtggagtggatgggccgctctatggagctgatgctgttatccattgtacttaatgtgatcgttacgctgccttttgttatgacctactttctgatggcagatcacctggatatgggcggcatagaggctttaaaggccagtgcagctatgatgaaagggcataaaggcagatatttgctgatgcagatcagttttattcctttactgtttctttctatattcacattatatatagctcttctttggatcgttccctatatgcagatgactgtgactatgttttacagggatctgttaggagaactggatcaggacatttatgaggatcacagggaaaataaatctgcctgggatcaggatgactttaattccgaggcataaaatgttatgtgcggaacataagactttaattcccgggcataaggagatgatagattaacatggatattatacaggtgatcacccaggaactgggtgtaaaaaaagaacaggtagaagcagcggtaaagctgatcgatgaaggcaataccattccgtttatttccagatatcgtaaggaagcaaccggtgcccttaatgatgaacagctgcgtaatctttatgagcggctgaattacctgcgtaaccttgaagataagaagaaacaggtgcttgccagcattgaagagcagggcaagctaaacgctgagctgaagaaacagatccttgaagcacagactctggtggtggtagaggatctgtaccgtccttacaggccaaaacgccgtacaagggcaaccattgccaaagaaaaaggactggagcccctggcaaatattatcagccttcagatgaccaaaaaaacattggaagaagaagcacaggcttttctttccgaagagaaagaagtgacttccgtggagcaggccattgcaggagcaaaggatattctggcagaacggatttccgatgaggcggattaccgtatccgcatcagggatctgaccacaaagaaaggaacaatcagttctgtggcaaaggatccggagactcagtctgtttatgaaatgtattatgagtttgaggagcctatcaagaagctggcaggtcataggatcctggcactgaacagaggggaaaaagagaaattcctcactgttaaagtgaatgcaccggaagaagagatcctccgttacctggaacatcaggtgatcacaaaggagaatcctgttacctctcctgtcttaaaagaagtggtggatgactgctacaaacgactgatcgcacctgccattgaaagggagatccgcagcaatcttaccgatcaggcagaagatggcgccatcaaggtatttggaaagaatctggagcagcttcttatgcagcctcccattgcagggaaggttgtgcttggatgggatccggcattccgcaccggatgtaagctggcagtggtagatgccacaggaaaggtgctggataccacagtggtttatcctactgcacctaccaatgagactaagatccgtgcagccaaggatactgtggagaaaatgatccgaaagtacaaggtatccctgatctctgttggaaatggtactgcttccagagagtcagagcaggtgatcgtagacatgctgaaggagatcccggaggcaggcgtacagtacgtgatcaccaatgaagctggtgcttctgtatattctgcaagcaagctggccacagaagagttccctaactttgatgtaggacagagaagcgcagcttccattgcaagacgtgtacaggatccgctggcagagctggtaaagatcgatcctaagtccattggtgtcggtcagtatcagcatgatatgaaccagaaaaagctgggagaagctttgtccggagtggttgaggactgtgtgaacaaggtaggtgtggatctgaatactgcatctgcctccctgctggaatatatttcaggcatcagtaaagccattgcaaaaaacattgtgacctacagagaagaaaatggccgttttaccaacaggaaaggtcttctgaaggtggcaaagctgggtcctaaggcttttgaacagtgtgccggatttatgcgtatcacaggaggtgatgatccattggatgctacaagcgtgcatccggaaagctatgaggcagcaaatgcccttcttaaaaagctgggacacacaccaaaagatattacatccggaggtctgggcaggatctcttcccagatccatgactacaaaaagctggccaaggaactggagatcggcgagattacattgaaagacattgtaaaggagctggagaaaccggcaagagatccaagggatgaaatgccccgtcccatccttcgcacagatgtactgaatatggaggacctgaaagaagggatgatcctgaaaggaactgtgcggaatgtgatcgatttcggagcatttgtggatatcggggttcatcaggatggtctggtacatatctcccagatgagcgagaagtttatcaaacatcccctggaagcagtcagtgtaggagatgttgtggatgtacaggtgatcggcgtggatcttaagaagaaacggatcagcctttccatgaaaggatttcagaaataaaaaataagaaatatgaaatagcaaataagaaataacaaaaaagtattgtgatccggcggggaggtgcaggattttatggaagaaaccgcacaggagcttactgatcatgtaagccagtttcagaaatatctggatgaacacacgcccgagctgatcagctttgggatcaaagtggttctgtccattgtggttctgtatattggaagccgcctgatccggtgggtgcttggtcttgtgagacgatccctgggacggaccgggatggataaaggggcggtacagtttttgtgttcattcctgaaagcccttttatatattctactgatcttcgggatcgggatgaatttcggtatcaaagaatcgtccgtagccgcccttttaggtactgcaggcgttaccatcggtcttgcattacaaggtggactgtccaacctggcaggaggggtgatgcttctgatcttcaagcccttccaggtaggagactacattattgtagataaggccaatggctgggaagggactgtgtataagatcgagatctgttatactaccctgctgtctgtggattacaggcatattgtgatcccgaatggcaccctgtccgggaatacagtggtcaatctgacagcaagggatatgaggaagctggagctgaagatcgggatttcctatgattcagatatgcacaaggcaaagcagatactggaacagatcataaaagatgataagggcacccgggaagatcagggaatgctggtatacgtagatgaattggcagaaagtgcagtgaccctggggcttcgtgtatgggtacctacagaagattactggacggtgcgatggcgtttgaacgaaaccatcaaagatgaatttgaccgtcagggtatccggatcccatatcgtcagttggatgtacacgtaatttcctaaatttgttatatttatcttagaatttttatattttccaaagacgtgtacttgattatactataattaaagtacctgataaagccaaccgggtgctttggaaggaaaacgccggagcagaggcgtatgaaaaagtaacaataaactgacaggggaaaaccggagattatgaatgagaaaaaaagacggctttttctgctgattggtgtgctgttggtgctggcaggagtggctgtaagagcatatccgaccgtaagtaactggtatcgtgaatatacggccaagtatgaaatcaaagattattgcgatattgtagatgtagagaataaggatagccttaccaagatgaagaacatggccacaaagtataatcaggagctggaggaagaaggcggggacgtatccgctgtcagctatgatgacctgcttgcagtaacagatgccattggttttctggagatcccgaagctgcaggtttatctgcctatttatcacggggcgggagaggatgtgcttgaaaaaggaatcggacatatgcccggcacctcccttcctgtaggcggagcttccacacattgtgtgctgtcagggcacaccgggcttccatcagccaagatgtttacccatctggatgatctggaagagggtgacatgttttacattcatgtattggacgaggtattggcttatcaggtagaccagaagaaggtagtccttcctgatgagacggaagatatagagattatagacggcaaggattatgtcacacttcttacctgtttcccttacggggtgaacagccacaggcttctggtaagaggtgagcgtacatcaaatgttccatcagagctgtccgttcagatgcctgtggagcaaaataaccaggagatgatggcaccacgtaccgtgctgatcatagcaggagtatgcgtggggctcttctgcattttcctgatctggcttgtgtgtcggatcaccaggggaaagaagaaggatgaggacgtacgggaggaagaggaaaagtgaaaaaaggaagagtaaaggcagcagttatctgtcttgcgatttgctgcagcatgctgcttggcacagtaagtgctaaagcggaacaaaaaggcagtattacactcaggcttgcccagacagcggctggcattgaagtgactctctatcagatagcagggtatgagaatgatggatttgtgtacaaggattcttttgcaggaagcggcattaatgtatccggtctgaaaacagcctctgaatacgaaaaggcagccgaaggtttggcagcttttgccaaatccaagaagcttacaggtactatggcacaggctggtacagatggcactgtttcttataagaatgtagagaacgggatttatctggctgcacagaccggcggtgaggatattatggtaatgcagccggtgatcataccggttccttacagtgagaacagtacagagaagtacgatccggtactgaatcctaagaccaccttcccaggcggtgcagtgatcctgaataagacagatccagatgggaaaacactggaaaaagcagtatttgctttatggcagaaggtttacccggaggcaggagagacgatcccccagggagcagtttccggatctgatgaaggaggaaacttctactggaaagagtttaagactcagcttacaacagacgggaacggacagatcgtagttaccgatcttcctcttggttcttaccagtttaccgaggagaaagctcctgacggatttgtaaagctttcacagcctgtagcattcaagatcacacgggtcggacagacagcagtggtaaatggagtatatgtacaggcttccggaaatgtgcaggttttaagtgtggtgaaccagccggaagaagtgacacctacaccggagattaccaatacaccagctccggaaccaacggctacacctgttcctgatacaccatcagataacacaccgccatccagcggcacaaccaatgtaaagaccggggataacacaccgatccttcctatgatcgcagtgcttgtactggcagtgatcgttgtagctgttgtggtgatccttaagaagaaaaagcatgataaataactctttatataaaaaagcatgataaataccttcttatataatgaagcaaaaagaagtccgcaagggcttctttttgtatgtaaaagagaaaaaaataacattttcttaaataattcgcagagaaaaaaataacattttttttaaataatctacgaaaagcttgtcataagagaaaaaaataaatataataaaaaggtacacttattgttctaaatacagggggagtagaaattgcgaaagatcttgatcgcagatgatgagagaatcgaaagacaagggatcagaagccttctcgaaagaaaagactataacctggagatcctggaagcaagcaatggcaaagaggcgttggagattgccaggagccagaagccggatattttattaagtgatataaagatgccatttatgaccggactggagctgatggagaaagtgcgtcagtttgattctgagatggccatcattattttcagcggatacagtgattttgaatatgccagactggcgatcaagtacggagtgttgggctatgtgctgaagccagtgaatccgtcagaattttataatgtgatcgacaagacgcttattgccattgatgagaagaagcagacagaagtactgatgcagaagaatcaggattttatggagcagttttatctccagaaatatttgaatacaggcagacaggatattaaggcggaagctatggctacgctggatgtttcctggtgggagcaggtccgtcagatgatcctgatagagactgccacagacttttttgaagagcatgcagaggattttgagacggaactggccgctgaactgaagcttccattccattatctgaatttgagtgccaccagttctcttctcttttttgatgacaaggtaaaggtggattattctgtgctgggacagcatatccatggattcatgagagattatatgaatacagaatgctatgtggctgtttccagtacgattacatccgatttcaatatggcagatgcctatcaggaagtagagattcttatggagaatcgtttttacaagtcggatatgtgggtttatatgccggatatcaactgggaaggcaaggataattacgatgtggtggttgatctgctggaaaagatggagaatgatgtgcggcttcgggatctgacccatttgtgggagcatttccgtaagtttgccggacagaagcagcagggagggaagttttctcatatttttgtgaagttttcctgctcgaatattgtaaaggaaatgtataaggatatgaatttctcttcggacaaatgtgcagatgccattgagaagctgtatcagtgcactacagttcaggagatcatcgatatcctggagcagaatatccagctttatgaggataccatgttttctaatcagagtggtgccagaagcgatgtagaaaaggttaagagctatgtgtatgagcattatgcagatgagcttagtgtggagatcctggggaagggcgtgtatctttcacctgggtatatgagttacatatttaagaaggagacaggggaaggcctgactcattttatcagggaatttcgtctagagaaagccaaagagcttctttgtaccactaataagaagatcgtacagatctgcaaggagaccggctttaccaatgcctcctatttctgcaaaagctttcgtgaatattatggatgcagccctgagaagttccgcaaaacagccggaaatggggaggatataggatagcatgttttgatattttgtgctattcgcttgcataggcatacttacattaaatatggatatgaataaaaatgctgcttatttttgactgattcctggaaaagcagcttttttttaccaaaaaccagactattctttatgatagttttttatattttacaaaaagttatatgtttctgggaaatgtgatattccattgctgtaattctatagctataattaacaataaaggtcagtgttaatgttgtccggtttcggacactattcttggaaaggtgaggaacatgagaaagcgaacatggcagaaagcagcagcgctgatcgcttgcgctgcgatgatcataacaacacctgatatttcaaatctggtaaatgtcagcggttcatcctatgaggatgagaccacaggagttgagttcatcagtaatgaggcagaggatgtggaagctgtttctgaggatgataatggattctccggtactgagatttcagatgagagccaagctacggatactgatttttctgcatctgatgcagatactgatacagccgaatttgtttctgatttttcatccggcacggatgagggaacagattcagcaatgattaccgacacagagactgaagtccagccagctgcaacggtgatccttgaaagtgcagatgccccccaagcgtcagcagcagttcagggacagccaagatgggtacatattacttccaacgcatccagtacccggcagggcaaagcgagaatccgtctgtatatgacggatgatcaggacgacagtccggcctatatattgtatacatccctcttttcgcagtggcaggagaccgttccggaacaagaaccctcatccggggcggtgacccttccacccacaaagcttgaaggagctttgaatggaacggatgtacttagcgtttcccgggtacaggagtacctgaaagatgataatggggaatacgtattagacgctaatggaaatctgatcactaccgcatgctatctggagtatgagcttgcttcaggcagcagtgcggatttttatgcagcttttgtttataagacacaggatgaaagctattcttataaagcggatctgaaggccagtgttacctgggaagaggaagaacagtcccaggatgtgacccttccggaggatacagggaagatcaagcttacctgggacagcagcgcagaaacatccggggataccatcagtgcagatccggaagtgccggacaaccaggaggacgaaacatcaggagaagaaagccaggagcagccatccctggtgcgtatttctatgaccaaaactctggaggctgggtgtcaggatgtggcagaggacgcttctgatacagaggcagaggatgtttcagatgaaaatacagattctgccgcagaggaaaatacagcttctgcttcaaatgaaaatacagacgatactcctgcaaagtcagagatcgctttatccggtcagctttatggtgtacatgtgacagcacaggatcttcatacggatgctacagcagacagtaccattaagctggatctgaaagacatgggatccggacttccggtttccggccttttcgtttctatgggaaagacagaagaggaagcattaagcagcgaagcctgtgacagcagcgtgatccccaatgggctgacagatggagatctgacagtgacacgagtgcagaatgattcagaggattatcttaccttccagctgccggctggggataccgctgatttttatgtaggtatttcctaccatgcacaggaagaaacatatcataagactattggcatagagccggaggcactgcaggaaaccagtcttcaggacgtagatgcacagcaggaagctgatcctcagaacatagaagaacagcagtcagcaacaaatgcagagctggatgtgctgtccgcacttccgggggccattcctgtggaaagcgagactgcagatgtccaggatgaaacttctcaggatccggagtcccaggaagacacagaaggggatgctggagaagatgcagggaagcagctgatcagcgtgctggagagcggagccgcagccattacattggcctgggcagataatacaacaccatccaccgggatggtatactttgctgcaccagcagactggatcagtaacgggtacacggtgaaggtttggacacaggcaaatcagagtgataccaatggtacacttacagtgatgacggatacaaaagcatcctatgatgggatgaaggtatatgcacttgaagtgaccagtgcaataaaaccatatgcaggtctttacaccatgctttttcaggcatttgcagctgatacctggaaggccgagcttataccatttagagagaaatggacggatgagagtgtatttctgaataagctgtataattcctcaaatggacaatgggtggattataccccatttgatccgaataatcacacttcctttaaagggaagaccatgtactttgaaaataagacagagcaggccatttctggtgtaaatgctgttttttatgagaaggacagcagcggtaagctgcagcaggtacagtctgttgctatgacaggaaatgcaaataacaaggcaaacggctattttgttaccattccagatgttgcgtgctcttatgtacagtttacagacgcttccgggaatgtcctgggcgacacctattccaatttctatggacagggtgaaggagaaactggtgtagaaagcgtactgtttgcagaaggttctacagactgctacaaatatgcaggcacagacgacaattccacctggggtgtactgggaagcagaacagtttattttgacgctacatattccaaactgtcatataagggaagtgccgatgcggcatacagcataccggcagaggatggaacttttaaatactatatctctggagatggcaaaacagatattgaagggaatatgacccttgtgtcctctcattctgaaaatggacatacctggaaggacgtgtacagagcagaattaccggaagggtatacaaacattgcattttttggatttgatcccagtggtgcaacgaatttcggcgagcatggcgagagtacgaacacactgaccattccaacagatctggtaaatccctgcttttatgctgatgcaggagatacagtagtatatgacagtggccagcgagacggttactgggatgaagtttataccatccgaaatgcagaagcaaagaaatctgacaaagatgtagtagatgttgcaaaggatacatttaccagagcatcagataccctgtatgtaaattctacattttatgattattatacagactatgaattaaatggaaataaccgtgacaattatcctggagtaaatggtacaagttataggaactgggtaacataccgtgagtttgaccaggcgctgagtgattactatcaggcaaatacctcgtcaattcccatttatgttggacatttccagccaagctattcagactgggaatatcgatttagtggcattgcacccacactgaatctgtatggatatgataattacaataatttcttttcaacaaataactcagcgcttgatatcaacggaaataataatggcgattacaaaagtatagccaagggtcttgtaaatgatgcattggcaggcggaaatctggtaacaacaaaagaaggagcaattcttccattatttaatgaagcttttctattgggggataacagtaaaaatgctgtgatcggagatgtttaccacaatgtggcatttccgttcaagcagaaagacctgaaaggcgatggagtgaattactgggtatttgatagtaatgaaactaccctgctgatgcgacaggactctgctacaggagaatatcacctgcaggatccaggaaaattgtatgagaattgcacgaacctgaatagctccagtgcactacaggatatgcatggcttcttcccattcaatgaaggctctgcttctaaaagtgctaatacatataactacggttttggagcaaagctggaattcaatttcaggctgacaaaggacggaacggttaaagataataaaggcaacaaagtacctattgagtttaacttctccggtgatgatgatgtgtgggtatttattgacggaaagcttgcactggatgtggggggcgcccacagtcctgctactggaactcttaattttaatacattgaaggccactgtcagtgatgtaaaggcaagtgcaggagatggaagtccagccacagttacagattttaccctaaagggagagaaaacagctgaacataccttgaccatgttctatatggaacgtggtatgtgggaatccaatatgaaggttactttcaactttccggatgagaaccagctgcaagtggagaaacaggtagacactacgggtgtaaacagcctgttcagtgatctttttaaagatagttctatcttcgacttctccatcaagaatctggcaacccattatggagaaaagaaagtggattcaaacgctgcaaagcctttgaggatcgcagaacaggattatactgttgctccaactcataaagacaatatatttgcgaaggatgaaagtggcaacagcaattttacaggaagcgttcactggcatgcaaaagaggatgatgcggacagcaattacagagatcagcgatatggagaattaacactgggtaattcggtggacatttcaaagatggcttatctggagattaagttctattatgattacaatgataccccgtccctgtccaatatgtatctgcagtttgaagacagtagcggaaacttaggtggtaatcttggaacggaaacactttccggacgtacttatggggcggtttccataaaaagtaaagaatgggtaacagtaaagctggatcttagcaagatgtcctggagtaagggctttgacaagacgaatcttaaaaagctccggtttggatataactttccaagagatttctacctgaaagactttgtgttcaggcctacggttgagatttccgagcctaccggatttgttaccaaacagtacaagattccggattatggctctgccacaagcggagagctgaagatcccggagggagctacctatacctctacatcaactaagcgtgatgcccgtgtgatcggtgaagatggagagttcgtactgcaggatcaagaaaccgttactttcaaagatcagttccgaaggggaagctacatatccctgaaggaggaagttgattcagatctgtttgataccacctggactatgtatgagaatggacaggcagttgccggaatgggaaccgggaacactgttaccaatgcaagttctataccaggcatgacgaaccagactggcacagccattgatgacggacgaacagaggtacaacttaccggacttgacgcagatggacatgagcaggctaatgcatacacaggtacaaagccaaatgaaagtacttttgtattccgctcttatgcagatcctgacaatacaacaacagcaacaaaacttaaagcagtcttttacaataaagtaaagaccggtaccctgaagatcaccaaaacagcggcttatggcgaactgctgtcaggtgagtataaattccgtgttacctttacaaatgtgggtgacctgggactggaagaaaatcctattacacaggagtataccattaatctgaatggtgatggacaaccgggctcatgtgaaattaccgggattccggtaggaaccttcttcaaagtagaagagatttcaacatctgatggttctactctggacagtattttgatagatggaaccaaacagcctaagggaaccacagcagcaaagggagatatcaaatcttccggacgtactgtagagactactttcaaaaatacaataaaaccagttgtaaacatttctgtagagaagctttggaaggatgcagacgaaagtgtttataaagggactcttcctgagaagatttatgtacagcttcagagaagaaagcctgatactgctacctgggaagctgtatctacagatggaaatgcaaagacttatacagagcttgcaggcaatatgtacacaggaaaatggctgacttcctttacaggattggataaatgtgtggactataaaagtaatccccaaatagaatggcagtaccgagtagtggaagtcagtgtgggtactgatggtacagttacacctattgaaagtaaaaatacaatacagctttcagaaggccggtttgcggtaacctatagcaatcagattgatttttctgatggaaaaacaggaaaagagaccattaccaatacatatcagcttccaaagacaaggatacagatcctgaagattcaggcaggtactgccggagataatctgaataaactggcaggagcagtattccgtctggagaagatgatggatgaaaacggtagcagcgttgacagcggttttcaagcaatagagaaaacaacttccgatcagtctgacactcttggcctggcggagttcacagatctgtcagatggcacctatcggatcacagagattcaggctccagataggtacagccttctggcttccccgatcaaagtagtacttaaccgaaagggtaattcgattcttgtagacaaccaggatgtttctggcaatctgcaaggagataccattaccattcaggttgcggatcagaagaaattcaaccttcctgcaacaggaagctggagcagactgatccttggattttccggtgggatcctcatcggattggctgtaatcatttatctgttacaaaagcggagaaaggagggcaaagcttcctgaccgctaagaagcagacagatggtgcaacaataaatgtgtgagagacataaaaacagcgagtgcttataacaaaaattacaggaaagcagcaacgctgtataaaaagaaaaagagagagaggatatgagtatgaagaaattcaaaaaactgcttgccggtctgcttaccggagcaatgttgcttggaagtatgtcagtttctgcttttgcagctgacaaaacaccagtaatcgacacaacaaaaacaggttccattactattcacaagtataccgaggacggtggtgaaggcgatccagctacaggtaaagaagatgcaactcaggttccgacaggggcagttgccattaaagatgtgggatttactatttacaaggttgcagatgcaaacgatcttacaaactattacaatacaaatccaaccagtcttccggatgtaaagaactattataccggcactgggaaaaatgtacaggttaatgcggatgttacagcgaacatggttggcagtgaagtaaagacagatgctaatggtgtggctgcatttacaggtcttgaacttggtatttatcttgtagtggagactaccagtccagcaattgtaacaagaccctgtgatccatttttggtcgctgtaccaatgactacagatggagatgactggttgtatgatgtacatgtttatcctaagaacaaaacagatgttggtggtgtaagccttgttaaaacaggaaaaaacgatgcaaaactgcaaggtgtaacctttgttcttcagaaaaaggatggagattcctggatagatatcaaaaagaagtcaactgcagccggagataacacaggtgatgatttgaaactggttacagatgcaaatggtgaaatcaatgtagacgggttgtccagcggtacctaccgtttcattgagacatctgtaggcacagataataaaggctatattatggatggcgctactacctatgaatttacagtagatggtacaaatgttacttatggtggaaatacagatacagatattcagatccctgttaccaatgataggccagacatgaccaaggaagtaaagaatggaagtgaatggaaacatgatgcggattacagtgtaggagatctggttccataccaaattacagtatctgtaccggcaaacattgcacagctgaaaactttcacacttacagatacacctactaacctgaaagatgatgcaacttcagtaaaagtaacagataaaacaggcaacacaacaatccctgcaacagcaacagcggatggaaaaggatttaccattgattttgcaccggcaactcttgcttcttatgcaggacaggatattatcgtaacttataatgcagaactgcttaacacagctaaaacaactacagatggcaatccaaacactgcaacactggaatactccaataagattcttccggaaactgatgacggatccaatcctaacaaacctaacaaaccgggagagaagcctacaaccgacaagatcacagatacagctgttgtatatacctttaagcttcagatcgtaaagacagcagaaactgagaatggaacacttcttgcaaatgttgaatttgatctgtacaaagaggttgcagatggaacaacaggcgctgctactgcagcggaagtaaagaaagcaggtcttgacagttctaaaacatggaagaagattaatgcaacatctcttataacaggtgctgaaggagaaaataaaggtatagtttctcagagcggacttaagaatggtgagtattatctggtagagaccaaaacaaataaggactataatcttctgaaagcaccagtgaaggtaactctgaatattgcctatacaacaaccaccaaggcagagtataatatcgacgaaacaggaaagacaacattagtgaaacatgaggtagagaaaactgaatttaaaaatgctggtgttgcttctgatggtatccagatccagactgtgatcaataagaaaggcttcacacttccattaactggtggtatgggtactgtactgttcagcgtgatcggattagcacttgtactggctggtgtggttgtgatcacagcttccagaaagaaaacagcaaaataaaatcatataaagtgatatgttaaagaggttatacgcattaagctcttgacgaatactgatatgtgaaagaaaatcctccggctgcagtaaatgcagaccggaggatttttaaaacagccggtacactgaaatcagtgcagccggctgtcatttatcttatgtattttctgaaaaatctcttaggtatttttgaaaaatcatggaaagtatttttaaaaaatcactttggtgctttggtatcagcttctgtatcttatagaattatcattggtagcattgctttttcaagcatctttattgtacgattttcggcgaaatttgtcaagaaaaaaatcgcccttttgttctcggactttcctttttgcgcatttctgaaaatcggctcaaaagtgtggaaagaacaacctgattgccttttatagggatgtttctggacagtagtattgcaactgcccagaaatccttattttaagcggattcttcggattccttcttagccttagccgccttctctttttcgtacttgctacgcatacaggtgcgattccatgcatgtctcttacgtttacgttcctcctctttccaatgttccggtgtaagttcagacatcggtacatcgagcttccctacaaatttcaggtaaatatcaatctgctgaatactggcatttgcccttacctttgcaataaattcttccttgtgctccttgacataagcacttgcatatttgagtgtctgcaggattaaatctttccacttataggagatttttaatgggataatcggaattgtttctaaaaaaatcaaaaactaatttgataagctgaataaaaaataatagttgaaaaagtttttttt

SEQ ID NO: 65 - DNA, 521 bp, Unknown
  gut microbiota DNA sequence
tcatcacttttccaccaggatagtaaccggcatgactcataggagaaagaattactgtatctacatctaatcctgactttttggcattggtttcattgatacctgtagtggctgctgtcatatcaaacacttttataacggagctttcctgactgcccaggtaacgactatcaccgccacaaatattatcagcgatgattctgccctgtttattggctggtcctgccaaagaaatcagcgcatcattacccgtaacataatgttttacctgaactgcatcacctgcagcataaatatccggtacagaggtttccattctgtcattcactacaatactttccttgatgccaagttccagaccggcttcttttgctaatactgtgtctggtgtgactccgattgccagaactaccatatcagcctgaagggatggattatctttcaacaggacctccactccgttgtctttttctttaaatccttctactgtatagcccagtaccagttttatcccatgcttt

SEQ ID NO: 66 - DNA, 58400 bp, Unknown
  gut microbiota DNA sequence
ctggataaatctcctgctttccctgcaccttcagggtatcccccggcataatcggtccgcttataaaatccactgtccttatctctgttgcattgatcttgtaagtaatatcttccttacatatgagatcccttgctgctgccgaaacctgggtcagcatcactgctgctgccgctgtccccaaagccactgccagcctgtgcagccatcttccttttttcattctcaataatcataccctccttttccttcagtcagtcttttctctattttactatatattttcttataaattatgatatttccgattttgtcattgccaaaaccggaaaactcccttaaacgccaaaaagagctgccacattttcatgcagcagctccctataggggatagggtcaaaacccttaacaaattatagacagatagttgcttcatgaattatttcataaaagcagccatctctttttcaaaatcatactcatgctcgttatttctgtgctctcctgtaatggcaaactccacccattcagcaatattcacggcatgatcaccaattctctcaaaatattttgcagtcataagaatatccagaccagtacgcgcatcaagcttttttccgtagatctgatccgccagattctccttgatctcattgaaagcattgtccacaatgtcatcactgttgatcacatatctgctctttttaagatccatgtccacaaaagcttcaatgcttccctgaaccatatgtaccgtagcatctgcgattcctgcaatatctgcggacacctttactgctgcagtatccatatgaagcgccagatcagcaatatctgcagcctgatctccgattctttccatatctgccaccatacgaagtgcagctgagatccgccgaagatctccggcaaccggctgctgaagaagcagcagtttcatgcattgtccttcaatctcgcgctcttttgcgtcaatatcccgatccgtttcaaatacctgacggacgacctgatccccgcctccacgaacagcttctgcggaaagagtaatcgcctgttcgcacagatttcctattgcgatcatctgtgcatgcaattcttccagctttctttcaaaatgcgttcccatagtctttaaccaaaccttcctgtaatatagtcctctgttctcttatcctgaggcatggaaaacagcttctgtgtctctgcaaactctaccacttcgcctagtaagaagaatcctgttttgtcggaaattctggttgcctgctgcatattatgtgtaacgatcacaatggtatagtccttctttaattccattgccagttcctcaatccttgaagtagaaataggatccagcgcagaagtaggctcatccataagaagaacttccggctgcactgccagagctcttgcaatacaaagacgctgctgctggccgccggacatccccagtgcgctctttttcaatctgtccttaacctcgtcccagattgctgcatcacgcagggatttttccacgatctcatccagttttgccttggaacggatcccatgtgttcttggtccataggcaatattatcataaatactcatagggaaaggattgggcttctggaaaaccatacctactctttttcgcagcagattcacatccatatctccgtaaatatcctgtccatccagttctacttttcctgtgatcttacatccttctactagatcattcatcctgttcagggactttaacaacgtagattttccacagccgctggggccgataaatgcggttatttccttctcaggtatttccatattaatattctttagcgcatggaaattgccataatgcagatccatattactgatctggattttcgttttttcactcataaaattatcctttcgctatcctttttgccacacagccggacagccagttaataagcattacaaataacaaaatgatcacagccgttgctgctgcctggttcatgtgaagaccttcacaggaaagtacatacatatgaagagccagagtacgtcctgagcccatcaggctgtccggaattttcggaagtgtaccggaggtatagatcagcgcagctgtctcaccaactactcttcctactgcaaggatcacacctgccaggatccctggaactgcagaaggaagtacaatggtaaatatcgtccgaagctttcctgcaccaaggccaaaactggcttcccggtaggaatcaggaactgattttaatgcttcctctgatgtacgcatgatcagtggaaggatcatgatcaccatcgtaaatgcacctgcaagcagggacattttccacttcaatgctgttacaaaaaacagcataccaaacagaccgaatacaatggatggaataccggaaagtgtttctgccgtaatacggatcacattcacaagacgacttcctttttttgcatattctaccagatagattgctgcaaaaatccccagcggtgcagcaattgccaatgatacgattgtcatgataaaggtattgatcagcgccggaacaagtgaaacattatcggatgtatatgtgaaggaaaacagatccttattcagataaggaactccttttaccaggatatatgcgatcaggaataataacactgcaaaggttatacctgctgccaggatcgttaaaaatttcaggatttttgatccaatatatttaggttttgctgactttgttcctgtataagccatagaacctcctatcgtcattgctgcatcacccttcattttcgctcctcctgttcagcagagaaagactgagatttatgatcagaataaatacaaacaacacaacagccgttgcaatcagtgcctgcctgtgcaatccggttgcataccccatatctgttacaatattcattgtcattgtacgcacacctttcagcaatccttttggcattctgggctgatttccggcgatcattaccactgccatggtttctccgatggcacggccgatccccagtacaatacctgccaggattcctgattttgccgctggaagcataaccgcatatatgcttctttcttttgtagctccaagagcaagcgacccttcataatagctttccggtaccccccggatggctgcttctgtcacacctacaatggtaggtaggatcatgatcccaagcagaataattgcagccagcatgctggctccaggtccgccgaatacgtcccggatcaaaggaacgatcagtacaagtccaaaaaatccatatacgatggatgggattccggccatcaattcaatccctgatttcaaaacaccataaatccttttgggacaatatctggccataaatacggatgttaaaaccgcaataggaactcctaccagaattgctccaccagtaacataaatactggcaacgatcattggaaggattccgaatttgttgttagaaggtttccattcctgtccaaacagaaactttaatggtccgatctgtgcaatggtagggagtccattggcaaacaaaaaaatacagatcagaagtactgccagaacagaagtgcatgcagcgatcagaaataccatcttcatgcctttttcttttactcgattcataaatacacctgtcttttttcatagatacagttacatgttacaacgccgatgccctgttatttccaaagcaccgacgccgtttcgcttgtgatatcaaggatttttatttcgccagatcatcccaggtagttgtctcgcctgtgaaaatggattttacctgatcgctggtaagctcatctacatcattgtctttgtttacgattactgcaataccatctcttgcgatttcctgtgcagtaagaccatctttctcctcatctttcagatcacgggatgccataccaatgtcacagataccttcttttgcagatgtgatacctgttgtggaatcgctctgctgtacctctactgttacgtctttgtttgctgcctgataagcctcagcaagtttctccattactggtgttacagaagaagatcctgctacaacaatttttccggatggtgctgcgctctcataagctttagcttctgcatctactttaatgtatccattatcctcgatgatctgctgtccgtctgcgctcataatgtagttaataaaatcctgagctgcatcacttacagaatcgcctgtaatgatgttgaacggacgagatactttgtaagaaccgtcagatacattctctacgctggcttctacaccgtcgatctttacagcctttactgtgtcatccagagatccaagagaaatgtatccaattgcattctcatcaccagcaacggttgtcatcataacagatgtgctgtttgtgatgcttgcctcctctgtagtcatatctaccttctcatcaccctgtttttcttctattccgaacagttcgataaatgcgcctcttgtaccggaaccatcctcacgggatacaacggtgatatctccgcttgctgcgcttactgtacctgcaaatgctgtagctcctaatactgctgctgttaaaactgctgcaatttttttcttcatgataatctttctcctctttcttgattcgctttatttaatttttcctgttgcctcatttacaggtgctattgtagatgccctttgtaaaaggaaaaagcgtagttttgttaaaaacatgtaaaagaaattgagagaaagtaaagttctgtgtttgtacgcttgcagtagaatctctttcaaagcataaaaaaagagccccttgggactcttttttcttgcatttccgtttttatccggttatttggaaaacaaattataatccatattctttatatagcttttctcgatattctttatcctcagaagctctttctgcatcagaatactttttatttttcaagaggatattcataagcattcccaaacgattttcacctatcttctctccctgctctttacctatctttttcccttttttctctccctgctctttggcataagccaccatacttaacatatccgccacctccttttggcatacttcattgtccggatctggaatatatgataatactttttcctgattaccagaaagaatgtcaaatgttgcagcagcttcatcagtggtatgtaactcatttctttctccccgtatcgttttcgccatgtcttcttcaattaacgctgtgccggtttgtatcgtatctccttcaatgcattccatgatttcttccagggaacagtttttatattcctctacagtatatttaagaatattgctcatgatcggcttatatgaaaaaatactcttggccgactgatcttttgattcttttcctcgtatcgcattcattgactcagaaatactatttttaacattcataaggatctcctgttgtctgcgatttactggtatttcaatgataccccagagtcaaaatttcgtcaaatgtttgttgttttccaaatattatcaaattcgacaaactaattgcctacatttcatatggaaatatttacttctttcatcatgaactataatgcataaaactccccagtcaggtacaatacctgtacagaggagttttcaattatcttataaaaatgttaaatcacataatcgtctgctctggcgttctgccaggaaagaagttcctccagacttacatgatctaccacactactgatggcatcatccagcttcttccacagcatacgtgtgacgcaggtgtcttccctgtcacagctgccattttcttcagcagcacagtcaaccgggcaaagactgccttctgtaagcctgagtatcataccaaccgtataatctgccggtgtcctggataaagaataaccgccctggggacctcgcacgcttctgacaaatccggctttatttaatatagaaattatctgttccagatatttttcggaaattccctgcctctttgccacatctttcaaacggatcggtgttcccgaatcattgctggcaagatccagcatcagacgaagggcatacctgcctttggtagatatcttcataccatgcctccgtaattattttgtaaataatggtgtagaataatatctgtcaccactgtccggaagaagggcaacgatggttttccctttattttccgggcgtttagccagcaaaatagctgcatacagggctgcacctgaggaaataccggtaaggattccttcattcttagtcagctttctggatgtttcaaaagcatcctcattttctaccttgatcacttcatcataaatcttggtgttcaggatatccggaacaaatccggcgccaatcccctggatcttatgcggaccggcttttccctcggaaagaaccggagaggttgcaggctcaacagccacaatcttaacctctggcttctggctcttcaggtattcaccaacacctgtcagtgtgccgcctgtgccaacacctgctacaaaaatatctacctgtccgtctgtatcattccagatctcaggacctgttgttgcaatatgagctttcggatttacaggatttacaaactgtcctgggataaagctgtccggaatctcttttgccagttcatttgctttcgcaatagcgccagtcataccttttgtaccatctgtaagtacgatctcagctccatatgctttcagaatgttacgtctctcaacgctcattgtttccggcatggtcaggatgatcctgtatcctttggatgctgcaatggcagcaaggccgatccctgtatttcctgaagttggctcaatgatcgtagaacccttcttcagtgcgcctgtcttctctgcatcttcgatcattgctcttgcaatacgatcctttacgcttcctgccggattaaaatattcaagcttcagcagcacagttgcctcaagtccttctgcccgctcaatattctcagcctccagaagaggtgtgtttccaatcagatctaaaatgctcttattaatctttgccataatcattctccttttctgcctgctgcctgacaccggctatgccgcttggactggcctggcgctgcgtccggcttcctttttcctagttatcatatatgaattacgtatttgatgtttctgattatagcgagcatttcctactttgtcaataggtttttgtgattttccaaaaaaaaccggaaggccactgtgccatccggttttttgctttcactgtactggtttttactttctcagcttttctatatgctgcgtataatactgataggttacgccacactctcccagttccctgggattgggtatgcctgttttctggtcaccatgaaaatccgaacctccggaaaagaaaatgcccttgctctgatacctgctttggatctgctgctccagctctgccttggaatttctgccagcgtagcttgacttatcgtaggtatagcttgcctctataccatccagtccggcatctaccagcatgtccatatactggaaacgagtcatagtcttgccttgatagggaggatgttcttttaccaaaaacgggtgtgccatgatcgctataccacctgttttgtgaagcagctgaatgatctttacaggatccggtttctcccggttggtctggaattccggtacagactgtaccagacgctttgccttagcccagtccacagcatatccttttgcagccaacagctcatacactgactttttctggacagtttccggacaatcagttttccctgcatgttccagaacctcctgccaggatacttgatacccggcctttgccatctttcggatcatttcctgatagctttccatcctgcttgtctggacaccatgttccagatccgcaaacgcaggatcatcccagttacagtacaatccaataatatggacgtcgtcattccaggtatcgcaggatacttcgattcccggcaacagccggattcctttctcagccccatatgaaacaagatcaattcctttccaaatggccggcagcgtcatgtcatggtcagtaatggccataactttcagcccaagagacgcagcacggtcaatggattcgattggtgtcatgtgtccgtcagaacggatcgtatgtgtgtgcagatcgcaaacaaacatgtgtggcttctcctatcatgttcaaaaccaaatcagatatctttaatgttatttttaaagatgttgcagatagcatctgcttcaattctctcaagcatactgtatgccatgaaaaggtcagatccagaaacaacaaccccatgcagcggcatgatagctccgatgggatatttctcagccagttcccttctcgcgtcaaaatatttataaacctcttcatgcagattctttgtataagcctgtgtatatggaatgcactctacagggcctctcttcatggttgcctctgtaatattgggaatcggctttgtctgtgctacaaataccatgcagtacataggatgtgcatggatcgttgcaccgatatttttgaagtttttcagaagaagtacatgcatgtaagcttcacgggaaagctttcctgtaccttccagaatgttcatatcatagtcgatcagtaaaaaatcttctggtttcatctcgcaaaaatgtctttcagacataagagatggagaaatcagaatcctgttatcatctactctcactgcaaaattcccgcctgcagcatttgtaagtcttctgtcccacatataatgtgcaactttactcatatcttctctgtctttcatgtaagataactctgccatcttttcttttctcctcttctttttcttttctttccatatcagtcttcataaactattatattaaagaaccaggattccgggacgaaggatcttctgtcccttgtattctgcttcttcataaacccattcccctgtatgggaaacaatttcctgtttgccgtcaatcacaaggaaggtatcctctgcctttacacctgcaatggtcggattccaggaaaatccctgtctgtcatgcacaacctctgtgcaggcaaaattggtacaataatctctggtaggatatccaagaccgcctccctggtgatgcagatcaaaatcagggccatagccttctgcttcgtaaacagcctttcctgcttccaggacgctgactgctgtaacacctggaaccgtagacagaatataagctgcatctgcttttactaccgctttcagacgtttcatcttgtcttcgtccacctcaccaaaggatacaattcttgaaatagaaatggtgaggccgtatttctgtgcacagatcgctgccattgcatatttctccaccttattagcggttggaattggatgacggaatttcttcaatctgtcatctgcagctaccaggcaaaccggcacctgatatccttttgccattaaagctcctgtgatcctgccggcaatctcaaattctgtttcaccttttttgatctgccttacacactcttccagaatccttgtgctttccggcccaatctggcggaaccgggcgatctcttcatctgtaagaatgtaacggagcggctggatctcactgcctttattctcgccataacaaccattatcgcttaccactttaagccctttaagataaggctccaggatcttcccttcatcctcatgccacaaataaccgatcaattcaaagccaagcccatccagttcttcctccatcacacggtatctttcactggaattacacactgcatagcttttatcctttgtaatcaggatcttagaagccgcaggtcctgacttgtctacaaaagcactttttccccctgtgatccagaaaaagttctcgtttgtattcagaaccactgcatcatagcccttttcttccatcagctctcttactcttaagatcttttcttctgtttccctcatctgccccaatgccttcttttcacacactctttaaaagagttttaaagtactgatacttttcttcccagacagcctgatctgcaggtaaaaattcttcaatatcaaaggatttcctgataatttccctgccctgtaatacatccctgatctctccctttgctttcatctgcatcaggaagttgccagccaatgctgcttctgtaggccctacataaaccggacgtctgcaggcatttgccgtaaattgatccaatagtctgtcctgaccgccgcctccaagaatatggatacagtcaattttctttccgttgatttcttccagtgcatccattacccaacgatacttaaaggcaaggctttcttccactgcccgcacaaactgacctggtgtttcaggctccttctgccctgtcatgctgcagaatttccgaattttttcaagcattcttccaggctcgtaaaattcttcccagtccggatcaatgagagctttaaatggtgcttcctttgctgccagggcagccagctccccaaaggaatactcctgacccatggtctgatattccctgcggcactcctggatgatccaaagccccattacatttttcaacatacggtacctatgttccacaccgccttcaaatgcaatgttatatttaaaagtagtttcatttgtaaagaaatcgcaggtttccactcccatcaatgaccaggtaccactgctgatataagcaggatttccagacagtgcaggcagagctgccactgcagaagcagtatcatgttctcctactgcgatcacatcaaagccgcctgtcccaaacaggctttgcatctcccgtgttgcatgtccgaccacagatcccggctctacaatcggcgcaaggatcctttccgggatcataaaccttttcagtacttccttgtgccacaaattcgtccggtaatcaaacatctgtgttacagaagcaatcgtatattctgattttctttcacctgtgagcatatatgccagaagatcaggcaaatgaagaagagtttcgcacccttccagaagataaccatccccttgctgtatcatagctgccagctgaatggcagtgttaaacagtgcgttctggttacctgtaagctgatgaagttctttttcagaaatcaggtcgtagattttatccctgtttctctttgtacgtgcgtccctatagcagtgcatctgcgtgataatgtctccgctttttccaataaggccaaaatcattacagtaggaatccattcccagtcctgcgatctggccgtctgctttccggaagcccgtcttaagaccttctattagattttgatatattccaagaaaattccagtataaacttccatttgcagaaatctgacagttggggaacctgtggatcacttctgtgtccagcctgtttccatcaaagcttcccagcatcatttttccgctgctcgctcccaaatcgaatgcgatatatttcatgtaaactcctccagtcttatggccggagacgtttcctgtgagatacttaccggcagccatccacagatggccgccatttcatttttattgaagtgttacgatctcagttccctgagattcaatgaagtgcctgtattcttcggaaaccgtctcgtccgtaatcagacaatcaatgaaatcaaactgagaaagaactaccacacctgttttgccgatcttgctggaatctgcaagcagaaatgttttctttgcctgcttcagcatttcacgctttgcatccacctcataaatacttccgtctgtgatcccgtctgtcatactgattccatgacaggaaacgaatgctttattagggcggaaattgtggatctgttccacagccatcactcctgtaagagagtaattcttggacttcagcaaacctcccagacagataaacgtcaggctgggatggtccgcaatggacgcttccaccagaagccggatggaattagtaatgatcgtcacccgataatcctgcggtatgtaagataccagattcaaagtagtggagctgttgtcgataaagatggtgtccccatcttcaatatactctgctgccttctggcaaagccggatcttttcagagtaattccggatctccctggtaagaaggggatactccttcactcctttggatgcctctgataaaactgctcctccatgtactctctggatgatccctgcttcttccatctctttcaggtcacggcggatggtttcctttgatacctggagtatctcaaacaattgattcacattaatgcgttcatttttttccagaagccgggcaatgtgtgcctgtctttctttattcttttttctgttgtcattcattacagattacctccggtatcaatttgatatagtactaagaatggtatgattatatcacgaaatccataccggaactatcgtttttcaggaaattcctgacatttttacttttgattaatgaatatctccattattcttgatactgtctaccattactgctacgaaaatgatcagtcctttgaaaatattctggatatatgcagaagctccaataatggtaagtccgttgctgatgacctgtaccataacgataccaatgatcgctcccgggatcacctttcctttaccgccgaaaaggctggccccgccgataactgctgaggaaataacagtaaactcatcattctgtgcaaagttaggattaataacactaagtcttgccgcattcaccatacctgcaagtcctgcaagtgcaccacatattgcataagcgataaatacaactcttggtccgttgatacccattttatttgcaccggtcagattgttgccacaggcaaacagctgacggccatactgggtttttgtaaggacaaaatgtccaaggataacaactgcaaggaagatgtaaaccatcagcgggataccaaagatcctggtagaagagaaaactcttacctttgcatccagaaaaagcatctgctgattggtaaacataagtccaagtccttttgccacactgtaggttgcaagggtcgtgataaacggtacgatcttcagtctggatacgcagaaaccattgatgcatccgattaacagaccgcttaagcaggatcctacaaagcaaaggatcagcgggcatccaagattgttcagaagcgtggttcccacaactgccgaaaagtacatattggatgctacagaaatatcaatacctccggtgaccaatacaaagaacatacctactacagagattcccagtgtagaggaaagctgaagtactgtgatcgcattgctcagggaaaggaaacctgtggactgtacggagaaataaatgatcataatcaggaatatgatataaattccgtaattacagaaggtatccaccagtttttttctaaaaatcgcatcttttcttgcctgggatgtttccattactttccacctcctgttgctattgctgctttcataataccttcctggctgtactcccctttttcaagctcaccggtgatcttgttatggctcattaccaggatccggtcacacatacccatcagttcttccatttcagaagacacaatcaggatggaagatttgttctttgcaagatcattgataatgctgtagatctcgtattttgctcctacatccacacctcttgtaggctcatccaggaagaagatctttggctccttaagtacccatttaccaaatacaaccttctgctgatttccaccggaaagattgatcacagcctgtttggatggatcaaaggttttgacccgcagttccttaacgatcttatctgtatgctctgactctttttgacgattgataaatgacttgtcacaaatatcatccaggctggccataaccacattttctttgatggtcttcggcatcatcaaaccttcctcacgacggttctctgtgataaatgccattccattcttaatacaattgatgggggtgatcggagcgatctcctgtcctttgtatgaaatatgaccctcagaaataggatccacaccaaacagacagcgaagaaactcggtacggcctgctcccatcagtccgaacagtcccaggatctctccttcacggatctcaaggccaagattttcaaatctgccctcctggcagatgtcctttgccacaaaggctacttcaccaatttctttttccacggtaggataaatattattcagctcacggccaaccatctgcttgataacctctgcattggttgtctcggaagctttcttctgggaaatgatctccccatcacgtaacaccgcaatctcttcgcagtgttcaaatacatcctccaggatatgggaaatgaaaatcatggatttttctttttcctgaagtaggtgcatgataccgaacagcttttctttctctttattcgaaagagatgtggtaggctcgtccagtacaatgatctttgcgtcctgcatgatagccttaataatctcgatcagctgccgctgtcccatgggaagggttcctacaatcgtatttgcatcaaagccttcaatgcccagctccttcagctgctcattggcgatctttttcattgttttcttatcaatggtttttgcttttgtccttttcatctctgtgatgaaaagattctcatatacggtcagattggtaaaaaggttcagctcctgatgcacaaatgcaatacctgctgcctttgacacctttggatttgtaggctcaaattcttttccttccagatagatctttccaccgtctctttgatgaatacctccaagtacattcataagagttgattttccggcaccattttcacctaccagacccaggatctcaccttttttcagtgcgatcgtaatatctttcagaacctgtactgaagcaaaagactttgtaacatgttccatctgtaaaataatatcccgtttttcagtcaacttcttcacttcctctctctgatcttgcattaccggatcctgtaatccatactctcttttctctttctgatcttacaggatcggatccagtaatttatgctctctcttttctctttctgaatacttcgattgctgccgcaaacagaatgatcagacctttgatcattgtaatgataaaataaggtgtatttaaaagattcagagcaatattgatcagaataatcaatacagcaccaagcactgtgtttggaatctttccggagccacctgccgggcttgtaccacctacgatgatacttcccataatgtcattgaaaagtgtggctccataactggatgcgccagactgcatctggcccatcataatgattccggctactgcggagcaaagaccgctaaggataaagatccaaaaaatagttttctttaccggaataccggagatcagagcagcctttggattagttcctacagagtataatctgcgtccataaagggtacggctgcagataatatggctgatcagcattactgccagtgccaggagcaatacgttaggaataatcccgaaaagtgttccgccgccaaaatcagcaaaggaatccgggagaccgcctatcgtctttccgcttgagtagataactgcaatacctgtaccgatcagctgtgtagccatggttgcaataaaggaaggcattttaaatacggtaactgctataccattgacgattccaaatacagctccaagagccagcattgcaagaagtgctacagggatcgcataccatttgccagccagatatccgcttgtctcgctcatgatggaggcaccgaccacactgctcagtgcgatgatagaagtactggagaagtccacgcctccattaagcactgcaaagtgtacgccgcatgctacagtaagcaaaacacatgactggctgagaatattcttgaaattgttcatggtggcaaaattggggactgcaatcattgccacgatcaggaaggccaaaatgaaccagatgatcgcatccactgaactaaaaaccttttttaactgtttcatattccaacctctctatccgttttctcaggtttttaaaccttatcctcgtacatccgcccacggcttttcggccgtagatcagaccgtttcttttcagccacggccgggaagccgtaagcgaatgttatccatcttcaccttgatctaagatgaatattgggcagatattatatctgcccaaattcgtcacttatgcctctctgccatcaggcaaggcatatcctcttaataaaagaatcaatatccctcgaatccaagctcgtctacgttatcagctgttacttcaaatcctgggtctgtcatggaatcaacttcttcgcccttaactgctgctactgctgcctcgatgcaaagtttagcctggtttgtagcatcctgtacggaaacaacatctacataaccttctttgatcgcatcaacagcatctttagcaccgtcgaatgtaaccagagttacatggccttcttcgccgacctttttatatttgtcaagctgctgcagtccggaaatgatagatggaagcagtgcgtctgacgggctgaaaatcatgttaatatccgggttttcctcaaatgcacttaagataccggcaagagcaagctcacctttccactctgtagcaacttcagaaacaacatcaaatacgtccgggttctcatctgcaactgcattgaaaccattatcacgagcgattgcatttgcatctgtaagacttcctaccagtttgatcactttatattttgttccgtctttttttgctttttccaagatgtactcaagctctctctgaaccattgcctcgttatcagatgtaactgtaccaacaacctctgcgccttcaccagcagctctgtttgccataacaaccggaacgcctgcttcattacacttcttaatagcagccacaactgcctcgccatctgcaggagcgattacgatagcgtctgctccaccggagatcagattctcgatctgctgattctgtttctgtgtatcattctcagcaataacttctgtgtatttaacacccatctcatcgcaggttgcatgcattgttgactgatactctgcccacatctgggactcgattgcgcacatggaaataccaattgtgatatcctcgttgctcttctcctcagcagatgctgcaacagttccaaataccatgcttgctgttaatgctgctgccattaatgcactaaatactcttttcttcataaatccaccttctccttttcttgttgcgttgtcgcattgttatttataaaaagaacttttgctacgcccttatccccggccgcggccccccgttctctttattccattttttcaagctgtacctggtcttttaattccatggcacggttcaaatcatatcccactgtcaggtctgactctgcagttgcagctgagatcgctgttgccagctttaagatctccggaaactccattcctttttcaaagccgtatacaaggccgcttaaatatgcatccccgcatccgatggtgttgatcacatcaaccttcaaaggatgcaccttgtagatctctccctgatatttcacaatggagcccttactgcctcttgaaactgccacacagggaattcctttttctgaaatcagctgaataccttccagtacttctccgtcagtagatacaggcttgcccatgatctgtgaaagctcatcctcgtttggctttacaagaaatggttttctctcaagtccccggatcagattctccgagcttgtatcaagaaatacccgaatatgcttgcctcttcttatcagttcatctaccacttcattgtagatgaaaggaatctctgtattggaagcatctcccgataacaccagtacatcatcatcatccatggtatccatcatatgatcgatcagctgtctgcatatcttttcaggaactgtcttccctttctcagtgatcaaagtacaaatatgattgtcttcgatcagtgcgtaattggtacgggattcaccctcatcaaagtgtaaaaacgctacatctacaccgccgtcggaaagtatttgctcaatccgttttcctgtctgcccatatccgataccgtatgctcgattactgcatcctaagatacttaaattcacagacacgtgagttcccttaccaccaagcacttcctctatgcgctggatcctgttggtgttatctctatgtaattccggtataaaaagcaatttgtctactgccggattaatggtcaacgtacagatcataaatctacctctctttttccttttgttgttgtcttatttgtgggttgtcctcactataacacgcttatttggaaaaagcaatatctttttgtggttttaccacattttattttgtattttatgacctttttacacaaagttggtttttgaccatttcaaacggctattttcatggtttttgtttgttttgttatgcgttttcgtttacgcactttgaatataccacatattatacatgatgtcaattggattttttggatattgtaattattttgatcatgtggtatgattattttattcaaaacagcaaagatttttatttttacaatttggcacattcgcaaaatcgctgttttaatttgtgtattttccacattctttttgaaaagtaactttttttgagatgacagttattttgttgcagtgacagttatattgcagtgacaatgtcatgcagcacattacatacttgtaggatttatattccggatttctcaggaaatgcttggatataccttacatgtatggtataatttcaaaaaatagtcttctaaaagacatcggaaattcaagcgatactatgactttttattatgaggaggattcagaaatgattaaagcaatggaccatgttaccatcaatattaaagacgtagaagcaacgcttcatttttacggagagatccttgggcttcaggctcttccttctgtagatatgggggatcatttccttcgttattttgccctcccgtcaggtggcaagctggaactgatccagtattattatgacgttccccaattagatgtagaagctaccaataagggatgtgcccgtcatcttgcctttgaggtagaagacatccgtgctctggagaaaaagcttactgatgctggctttgtattccatgtacctgtttcttacgttaaaaatcttgattttacaggcggccttaccaaagaccctaatggctttgagctggaatttctccagtatggagagcactgatgccaattgttaaacataacaaaggaccaatcgtatgtcacagattacactaaaacaaatagcagagcgtgccggcacatctgtaggcactgtggatcgtgccctgaataaccgtggacgcatcagcccttctactaaagaaaaaataataaaaatcgctgatgaaatgggttatcagcccaacaagatcgccagtgctttaagccgcagcaaatgccttcgcattgcagtgatctacgccaaatatccggcatactttgtagatgaatttactgcaggactcaaaaaagccattgaacattttacccattacaagatcgagatcattacatacaggtgcaatgccctggatccccaatcgcagatcgaagtgatcaaagatattgacttttccaatattgatggtttctcattgaatgccagtgggcaggagcttgccccttacatcaaccggatctcagacatggggataccagtagtcacctttaactctgatatacccggcaccaagcgcctgttccatgtgggaatggatccatttatggccggacgtgtatcctttaatctgatggccaaaatgcttcagggcaaaggaaagatcctggccatgccaggctttcattctgtgctttcccatgaagaacggatcaaaggtttcctggaagcggccagagattatcctaacattcaggtgatccccggcggtgaatacaaagaccgtgatgatcttgctattgatctggtacaaaaagctctggcaaaacaccaggatattgccgggatttatacagtcagctccccgggcgtgatcggtgccggcaaatacttaagtcagcttccaaaggagtcccggccaattgctgtaggttatgacaccagccaggatatgaagcagctgatggaaaaggatgcctgcacgtttgtggtatatcagaatcctgcagcccagatttattattccatcgtttatctggtggaatacgttctgttcggcacgcttccttcccaggagcttaatttcctgcctccgcagatcgttgtccgtgaaaacattgactattatctggaaggggataataagtttattttcgttaattaagataataagtttattttcgttagttaatatgaagatgatgtcagggtcaaaaggtcattctcccacctgtgcttgcacaagggtatgggaatggccttttgcatatgcgcctggtaccatcctgtaaactgcagattacagcatctgctcctgtgattctataatatagccgaagctatatatttattctattttttaccagaagcggaggttcactatgaaaaaggtaaaacatattttttcaacggctgcattattattcacacttggtctttgtgtactgtttgcaagccctgtccaggccaagtccaacccgaccaaagtatcactgcagccaggcaggatttatcgacggtacgatattacagggaatggcaagcgtgacaagatccagatcaagacaacccctgccacagacagcgacggaagcatctcagatttttccatttatgtgaatggcaagaaggcttacacattaaactcgatccgcaatttctacacagaggatgtatgtgcccagctttatactttaagcaatggcaagcctttcctttatctttatgtagcatttgagaacggagacggaccggtatgtgggatcttccagtacaaaggacgcagactgaatgagatcattgattttcaggaaaccctggagacttatggctatcatcaaatgggctatgttaccggagtttcaggcaaccgtctgtacgtttcccaggaacttaattcttactcactgggtcttaattccattcggtttgtctacaagtattccagaggtactcttgtaccagccagcaaatatggctcatacaccagtatctatactttaaacggcagatccagatatctgactgccaaccgcgatatcccggtatatactaccgcctatgcaaatgcttcactgaaattcaatattcttaagggaaatcgggtacgcatcaataaatgtgcactgatcaaaggcaaaatgtatattcagatttcttccaagggaatgaccgggtggatccttccggcaacctcttatccggaaactgcagagtatcagcagttcacggaaacccaatacgcaggatgattctgtaaagaatatgtcagcttacgctgaccagaattacgcgccaagtctcgcgactgctcgacttgaatattctgtttatgcagcaggggccatacagctgttttatatgcagctgcatggcccctgtttcgtttctatgattttattttcattgtaactgttccgtatcctcaccgttacgattgttattatctactattcttatctttcaggatcaggttacggattccttccacagctgttcgtacagccatatccgtatcatgcacaaccggattctccagacccagccgttctctttcctggttagcgatcaccagaaagcaggctccggttcttacccgcaggcagcttcctacaataaaaagtgctgctgattccatttccgaggcaaggcaccccaatcgtttccaggcttcccatttgttcagaagctgatagcttaccggcttcacttccggctcatgctgtccgtaaaaggaatctttgctttgcacaacgcctgtatgataaacatatccggccttctcggcagcctctgccagtgcattggtcactcccagatctggtacggcaggatattcaataggcgcatattccctgcttgtcccttccatacgcacagaacctgtagcgatcacaatatcaccgctttttatttccggctgcatacctccgcaagtaccaatccgcacaaaggtatctgccccgcatcggtacagttcttccacagcaatggctgtagatggaccaccgatcccagtggatgttacactgactttttctccttccagcgttcctgtatatgttacaaattccctgttgtcagcaatccgtacaggatcctgaaaatactgtgcgatcttttcacatctgcccggatctcctggcaggatcacatattttcccacttccccaggtgctacctgaatatgatacagccggttatcttctgaataattcttcatagcatgccctcctaatttgcaagaagccctcagagctgcagctctgggggctttcgtttatcatggaatctcttaacttttcttaactgttattatcatatgccagaaccggcaaagtgtcaaccaaaaaagtgttttttaacgtgtattctatgaaccaaaaatgtcttttaagcgtgtattctataaatcaaataagtgttttttagcgtctattcctgttcctggcatttaataattccctgcttatttctcaggtctatccggaaggataacctctccaaggtgctttaattcaaaaccgtttttcttgaactcttcatagtcaaaagcttccagctcatcatatgcaagtttatggaactcatagaaattcggccagtcttcatagccatcacccagattgtgctccaggaatgcatctgcaatctcaatacccatctgatgagcaacataatggccacccatagcaataacattacagttattacctgtgatacatctaagtgctgcaggaacactttctacaactgctgcgtgtacatgcgggcatttgcttgctgcgatatggatacccatacctgttccgcagaagatcatagctctctcaaattctccctcagcaatctttgctccaacctttaatccgattctgtggaacatctccggattctcttcatctgcagagcgaacaccgatatcggtaactgtccatccttttttcttaaggtgggcaacaactgcctcttttaactcaaatcctgcaaaatctgctgcaaccaaaacctgtttgtcttttactgttttcatgatccttctcctttttcaccccaaaatataaaaagcgttatcgtttacgcttttcattatactgtatttttgtggaaaaagcaagttgtttatgtgttttttacatattattttggtatttttatccagaggagtatcgaacgaccacgtgtcgaaaagatatatccacataaagtttatattatttcaaatttgtcccaatttactctatttatgttatactataagagctgtcgtacctccagcagaaaggagggaaatgcccatggatgaacttctcacaacttttcttgtttccgttttagcaggcgtagttagctactacatatgcaaatggctggacggagaacaatagacagcaacagcctaaacggattagctcaccgtaacgagcaagaaagccctcagagttgcagctctgggggctttcgttttgctacatggaatctcacaactttccttagctgttattagcatatgccagaacaggcaaaatgtcaactaaataattactatcattccagatccagattatatcgcaggaatataccttataacagccgcgtgtacgcgtaactctgttactttccgaaattaaaccctggttatttttacaacactcagatccccaactccaggattttctttgagattgcctctgccatcagataatgatcctttttggtaaggtgcatataatcaatggtattcggcccatctgtggcgatctgatttgcatccaaatatgcacagccggtaagctctgccacaatcttgtattctgctgccagttcccgtgtcttttgaacacatcctctacccatagaaccagtaaatgggctgtcaatatatctctcatccatattctgaggcgtgatcagcagaatgtttggttttccttctgcccagcagtcttttacagactgggctttctggatcagccgcttcatgccaagtgcaatacaggcggcatttgacccaaacctttcctttgcatcattcgttcccagcatgatgataagaaggctgaccggctcatgggtcatgagacaggtatacatatgagtcagtccgcaaagcccctcttccaaaggatcctcaaaacaggttgtcctgccgtttaagccttcctcgatcaccagataatcctctcccaaccgtttctgaagcaggcaggtccagcgctcattttcattgaatctgccacagccgccttctaccggaaaatagccgtgtgtattagaatccccgaaacacacaatatgttttttcatcccaagtacctcccatataacacctttctcatattactttcttttcgatttacaaaagtttattgtattcgtaattacttctgtcctatataattatgtatacactattcacaaaacaactgcaaggtttcttttttatttagtgatatttctgtaatctgatacattcgcttgctctataacataatttagaagtaaaatctgtcttgaagtttcccacattatattcctaatcaacagtccttgtggtacaatcatattaatctatttgaaaggaatttctgcatatgcaacatcagcattttttaacaattgattccaaatcctgcattaaatgcggtttatgtattaaggactgcgtgataaataatcttcatatgggcaaagacagcgcagttgccataaaaaacacttgccttgcctgtggccattgtgttgcaatctgtccccaaaatgcagtcagtctttctgattttgaagactcccctttaccagttcttccttcatctgctttcaccggctcagatttagttcagctgatccgtcaaaggcgttcgatcagacagtttcaaaatcgtaaagttcctcaggaactcctcaaacagctgcttacggccggacagtacacacctactgccagcaacagccagaatgtttcttatcttgttatccgtgaaaacatcgccagctacgaacagcctgcccttagtacacttcgccggctgaaaagaatacaaagtattttttcccacagctgggacaacttttctatagacgaacattttctgttcaaaaaagccccgctggtgatgatcattaaatcacctgaccttgtaaatgcttcgcttgcagctgcttctattgaattaaccgcaaatgcctttggattaggtgttctgtacagcggttttttcagccttgcagtaaaacattcccgtaaacttcagaaaaaactgctgctttcttcgcgcaatgaagctgtccttgctcttgcagtcggccatcctgcagtaaaatataagcgtacagcacaaaaagaacatcctgtcgtaagctatgattaagcctgcgcaggatgttaatcttttaaaatctcttctaaatcagttttctgtttggcatataaatgcttgattcgatccaggcttccgcacctgtatactcaagaaccggcagtttgcttaatgtatttgccacattccaggaaagcggagcacgtttccagtcaatatcaccgataaaatgaaattctccttctgctttccatgccttttttattacattttctgtgggcagatacgtcgcatagcttacatcagcgccgttcaggtctactgccgggaaatgcttatatccaagccagctttttccttcacctgctttaatgccagcatcaatctcttcctgtgttttttctttcagattccataattttccttccagaagccttgttccttcttcagctgcatagaatcttacttctccatccagcttctgagcatccggaacctctgccattaattttgctgcgccaagtagttctcttcccaaaaggataggatagaacttgtccatccagagaaccagggcataggatccttctgcatagtctcttttccctttaaattcaacatctacatctacgcagacaagattgtacccgccacctgccatataatcaatgccacggcactctgcaaagcaaatacttataattgccggatcttttgcaatatatccaggcggcagaagtctctgtaccatatctcggtctgttctgtaggatactttatatcttctgttttcattgtaatgtgcccctaccaatgcgtcccttccatcttttccaggcggaagaagacttatcggcataaaatagttttcgttttccttaaattcaaagtttcccataattatcctccaattttttacaggtttttcctgtttttatacatcgtgctgtgactgacaggtgccacgtccgttaattataaagactcattcccagcatacagaatgcttttaatatccccgatctgcaaaggaacaagctttcctaccttcctaccgcatactttccatattttttcagctaccagatccagctgccctttatcaaactccagttctggattcagatccttatatacagatggagcctggatttttttcagccactgacagtatttttcgattcccagtctggcacattccacagttttttcttcctgtatccccattacattccttgcaaatcttgcaaaaatttcaggtcttttttgataaacatgcagcatccatcttggggtaataacccctaatccgccaccatgatgtgtatcaaagaaaccactgaaccgttcctctatattatgacagctcatttctgcctctcccctgccgatttttgtaagaccggtaccccaggtcatggtagaactccagagaagctcgcctcttgccagcagattttgcggatcttcatgcaattgctctgcacatttcataacagttcggataataccctccgaaaactgaagctgaaattcactgtccatatcaccattcatataaaattcaaaggtatggctgagaacatccataattccccagattgtcattttttccggcaatgttgtcgttaattccggatccataaaacacaatttgggaaatgccgcataacaccagaatttttctcttttatcacggtctacaactactgccgtattattcagttctgtccctgttgctgcaatcgtaggaatcataaccgtatctatagactgtgtatctttatctgcatccccccacacataatccctggcatcaattccggtttttgctgacatggctatgattttggagcaatccataacggaaccgccgcccagggcaaccacacagtctgcctgcttctctgccgccatgtgtacaccctcatatacattggtcattttgggatttgtaggaacagggctgatctcaaaaacttctccacctgctttttgcagctgttccttcactttgtcatatgttcccagtttcctggagcttctggttgataccagcaaatatcttttatatttcccggagagtttttcccctatctgcctgatacagccatttccaaatacagtttccacaggattccagtattcaaagtctttcatattctccacctccaactataatttttacagtgccacaatcatatgttacccatataccataatcactttcatccccgtttcggatcctggtcatctgccatctcccttctctgtcaaaatagccttcttctacacattcataatcaacatatttatccattttctgtctgaaatacacagcgtcccggttccctctgatggacaggcaaaagctgtctccaactgcataaaatgttcgttgattttcccttataagcagaccttttccgtatccacatggagtatcaaaatagccatgatggtaatctgttctttcatagctgttaaagcctatccggatatatgtatcatccatcacaattctctgttcaatggcatcttcttcctgataaatcacctgtatgtcacattctttttgcattcttcggaacacagactgtaaagaagtcattgccttcagactgttccagacatccacggactttgcccgaacatggccgtcttcatcaatcatcgcctcaggtccaaagaaaaatattccttgtgttttgtatttacctaatgcccagaacatatttctgctgcttgccggttcccaggcatgggtttccggcaaaaacaggggattcccatactttgcatagccctgacagtccatacaatactctgacagggcaagcttatagttatccagtccaatcacatcaattgccggtgtaagtgctttccatagtcccaggactttagatacaggcccccctgctggataatctgctcccggctcatcccagcccacacggtctacccatacattcactgaaaaaggaagggacgttatttctttacctgcttctgcaatttcattgatgtaagatgcaatcccatatacgctgaaatattcttccgcatatcttccaaatacttctttccaggttccattttccagttgtcccgactttttccagttgtcagttacctctcccatatcttttgttttaagaagtgtttttaccttctccgggatttccccattgaaccagatatctgctttctgtgaatgatccctgtaaccccgcatcatcatgccaggctcattttccacctggattcctattatcacattgtctgcttctttttcatttaccttctgtgcatactctgcaagctttacaaaggcttttttatctgcttccagattttcccggcaatacggtgataaaatatttgtttctattccctcataagaaataacccgtgtaaacctgtttctttgatttctgacccattgcggtgcgaattttgatgttccgtttttccatgtaccaaaccatactaacagcagttttacacgatgctgttttgcctgatccacatgctcttctaataatttgtaatcaaattttccttcttctttctcaaatttctcccaatacacagggatttcgacagaattaactcctgtcctgtccacacactgccagaatctttccatttccattctgctgtaagcgcttgaattacagcactgcaatcccaatggaaaaaactctttcccattcccccaaaacaactcttctcccaaaatagacttcctcactttcgtcttatgtctgacggataacagccatatgtttctataaaaagctttgtaaaatatctggttgaagaaaatcccactctttcgcacacagcttttatagataaagttgtatttctgattagatattctgcttccttcattctcagttcatttacatatttaacgagatttaaagaagtttcttttttaaacaaattactcagataatttggtgtaatatgaaacttttcagcaagccactgcacattgatctgttcatggtaattttcatctatgtacttcttaattttggctattaactgatccccctttaattctttctgaagaccttctcctgactccatgatccggttcatagcttcgatcagagtatgacccgtttctgctccgaacaccttttctgaaaacagttttatcttttccagttcttccatattcttttcgtttttttccagaagcccctctgtattatggatgatcctgatacattgaacaaaatcctggtgtatatatgcattcacaaaatgatccacatattccgccagctgcaatgcctttgccttaccctcgatcaattgttttttcaatgtacacatgtggacacatttacctgttccatacatgcatcgaagatatttcagattttcaatctgagataattgtttcaccagatcatctgcatctgaacagatatccgttctgtaaaccatcagccacttttcttttaaatcaccttgcagtgcgtccagttcaaaatcaatctttttctgtaaatgttctgtttctgaatccgtactgcagatactgatcaccatatactcgttccaatcccgttttatccagaaagtaatcctttctgaacgaagtgactgtgcacatattttcagaaatctctgttcaatgatctcatcgtcagagcttggcttccccttcaggttttgatccaccagaaccactgtccccaaaaaagatctgccttctattttcagttcttccacgctgtcccgttcattataaaaatgaataaaatcatttcgtattttctctattttttcttcctgtaactgtctgcgtatctgctgtccacgctccatgaccttttccagttcctgaaagctgaccggtttcagcagatagtcagtcacaccatactggatacattttcttgcatattcaaaatctgaatatccggacaaaatgatccactgtgtatctgttccttctttccattgttccagtgcttccagtcctgacattttaggcatttttatatctgccagtacatagtccggatggaatccgcttccgattttcaggatctcctccccattggatgcctcacgtatttctgcatccggacacagctgctgcagcattgccttaattcccaaacgtacaaatccttcatcatccgccagaataatcttcataactcagtcctcgtatattttaaacaaaatttttgttccattattcacctgacttataatctgaaattctgaattaggaaaataatgtttgaaacgattttccacattttttattccaacactgtcatcatattgaaccttgtttacgtcaaatcccacgccatcatctgcgattaccaccataacacacagcttgtcagcttcctgtacaagattcgcagtcaccgtcagctggcagctatgatctgcttcttctataccatggatcaccgcattttcaacaattggctgaaacaaatgtctgggaattttaaaattctgcaccttgggatctatcagaatctgctcattgattttatccataaaacgcagcttctgaagccttaaatatttcctgataaattccgcttcctcaccaatggtaactatcttctggtcagacaatgcatacctcatcagatcacgcagggaaaagattgcttcttccagttcatcctgcatgcccattcgattcagccctacaaaaactcccagcgtattatacaggaaatggggttgtacctgagcctgaagtgcttcatattctgcgtttttctgattcagtttggcctgatattccagcttgatcatctgatccagtctttctaccatcttatttaattctttttctatatcccccatttcatcattggattcaaccttacatcttgcttccagatcattgttctgtgctgccttcataacacgtttaatttctgccaggggcactgtaaatgttttaatataaccaaaataaataacggccatacatccaagacttatgactgccatcacaagtcccagtacataataaaatctgatttttgaatttaaatttttatacgacagaaggctgaccagtgaccagctggtacctgttttttcatatagcaatgaatacttctctccgtctacagatacttttttctgctccagcatatcctcagtaaggctgtctttcaggatattatctccgtatacatattcatttttatcatccagcacagcaactaatgtgccaggttctacagaagatgcctcctttacaacctgctgcaggattgtagcatctgcacaggcacatacaacgccgataactttttgtttatctgtatcaatcactgctctcgatacagtaaatacactttctttccccatatctgtctgtatatatttctgctgatgaggaccgcagaacactgccctgccatctgcttttactgcttctgtaaaccatttttccgatgaaaaatcatacccttccacattatccagagttccgttttttgatgaaatgtacacctgttcctgattgatcggaatcagtattacattcataatatcttctctggttgtctgcagataaaactgaaattcaccattcaacgcacgatttgccatcagcttgatcctgtcactcatagaatcaaaatccttcttatttaccagttttaaagccactaatacatcattattgatctgtgccagcaatgacatccggtcaagctcatccaggtaaatatccagggttttcgcatacgaatccgtcagactcttcatatatttttccgtctgatttatctcatgatttctcatgtacgaaggtgctgcaatccctataaaaaagcatggaactacagccataatcagaaatagtgttagcagcctttgcttgatcgtaaagcgtttcatatgcgtctccttatgcattattttgatttacagaatatatttttatatctgataatgactattttacagcttaacagctcctgaagaaagccctttaacaaactgtttctgcaaaaccaaaaatgcaatcaccagtggcagtgaagccatcagacagccggctgccagccagtttacctgactctggtacatggaaaagaatgaattcaatgctacagggatggtcttcatactgtttttctgcagaaaaaatacagaaaactgataatcgttccacacattaacaccacacaaaataataactgtcgcagtgattggctttaaaatcgggaaaataatcgtataaaaaacacccagacggcttttcccatcaataagtgccgcctcatccaattccccgggaagggttccaataaatccggtatacaaaaatgtacttaacggcagcataaatgtaacctgtacagctataatcccccagtaactgctgattcctccaagatccgccatgatcttatacaatggaaccagtatagtcagtgcaggtacgatcatacaggaaatgattgctgtataaacaaaggtattcagtttcgtttttctccgtgccagaggatatgctgccatggaactgaataaaatgatcaaagctgtggaaatcaccgtgataataatattatttaaaaacgccctgcccatatttgctgatttccatgcatttacaaaattatccagataaagagattttggaaatgcccattttgatgacaaatctgctttatctttaaaagccattgtcagcaagatgtaaaacgggatcaaatggatcaacgatataaccagaagaatgaccgaatatactttttttttcaaatttccacctcttttcttctaagcaccagaagtgttatcacgctcaatactgctattgcaagaaacatgaatgttcccattgcagcagcataaccggcatcctgttttccaaaatacagctgatacatcatcgttgacagtgactgtgtggaatatcctggtccaccatttgtcatagccacaataatatcgtatagcttcaggcttccaatcagatttgttacaacatttaccgtaatagatggaatcaaaagaggcagttttacatagaaaaagctttgaggtgcagaggctccgtcaatcattgcagcttcctgataatctccgggaatcgtttgaagtccggccaggtagatcatcattgcaatacctacatactgataggaattgataaatgtgatgatccatacggttgtagtcccctttgtaagaaaatctacagaaggttgccccaacatattcagaagatcatttactgcaccgcctacaggctggaacataaaataccagatatatcccattaccagtggtgcgatcataaccggaagatatatggcagctcttgcaagtcctacagtttttgcttttcgatccagaagcactgcgtaaacaagtcccaccacattttcgagaacagcacttccaattccataaatcagtgtatttttaacgatcagtgaaaaatttctgtcagcaaacattttccggtaattatctaatcctacataccgaaaattttcagaatatccatcccagttggtcatagatatcccaacaccttttatcagcggatatacaataaacatcaggaaaagacagataaccggaatatacatgatattaatgatacacttggaattccatatttttttcgctttcatattccgttctcctttaaggaagcctgcatatctgcaggctcccaactgatcatttaatcttcatttgcttcaagaagccgctcatattcattctgcatatcaagtgaatactgttccggagtaatcgtacctgtaaacatgtctgcagcatctttacagatcagatcccacataccatttggaagaaacgctctgtcaaaaatcgggaaggaacggatatctgcaaattcatcataatactctgtagcaaatccaacgtctaccggtacatctgtattaattccaggaagcatagattcagattcgcagaatttcttaatattttcgcctcttgccataaagtcaagccatgcttttgcaatatcaatattttcactgtctttccagattccaaaggcagtctgctcaccattcaggaaactcatatcatcatcttcataccaggcaggtaaaggctgaaggccggcctgaacatccggattaatctttcttgcttcatctacaatggaatttccataccagcaaaatgctgcttttcctgttgcaaatgcttcagctgaatccgcatatttagctgtaaaaatatcagaattaaagtatcctttgtcatacatgctctggatcactgatacaaaatctgtccacttattccagtcaaagcttccgtcaagaagcgcttcctgattgttatcctctgctgttgtaaatgccggtgttgcaagctgatcaaaaatctgaccaatcggccagctgtctcctccggcaatatgcataggtatgatttcaccattggaagctgttttgatctgttccagtgcattcataaaatcatcaatatttttcagcggaacctctaccccacactcttccagaacctctttgttatataccagtccccatttattctggtcaacaggaagaaccagaagatttccatcatcatctgaaatcagttctttaaaggtaggctctatagaatccgcccattccatatcatttaagggcagaagaaaatctacatatcttacatttgcccatccatgtgtacagaaaatatccggcatatcttttgaagccattttgactttcatgatattctcatagtcagctcccggtgcaaccacttcagattcaactcccggattttctttcataaattcttcatttaactctttgataatgtcggcctgtacccctacgcaatttgtataaatcgtcaggcttccttccagctgttctgattctccggcagatacattcactcccatagtcccgatcaaagtaacgactgctaaaatccccaataactttcgtttcatatctacttcctccttaagaaatacctgtatcattttcgtcttttctaaacctgcgcctgtttagcttatctttatgttaccgaaacttctatttttctacaatgtctttttctactcaataaagcgctcatttctacactgagcttttcttagttttttcaccgaaaaaaaacacccccgggacacattctgtatcccgaagatgttttgtggtttcagcttttctctttgtttttgccttgctttttcttcttatttcctatgtgcagcagaagcactgcagctacaagcacaagaagcaggctcatcaccgcagccagtacataattggtggccagggactttcttgtttccctgttttcagatggcagatccggcgtatattctgtacggactccccgtaccagaagcctttgggtattcactccataaggggtgcaggtcacaagcgtaacataatccttgtcctttactacctgaaggctttccgtttcttccggttctacaacttttatctggtctaccttgtaggccagtgtctcgccaagcacctggataaagaaaagatcgccctttctcaccagattcagatctgtaaacaaggctgctgagggaagtccccggtgggctgcgatcacacagtggctgcctttgccgcctaccggaagggaggaaccgatcagatgtcctgcacctttttgcagctcctcatcccttgtaccgtgaaacaccggcagctttacattaatacagggaatctccaggatggccattactccatcctggtccacattcaaaaggttttcatattctgcatcctcttttacttctccttctgcaaaggcatccggcacccggttatccttatgtgcttcattgtatacccttgcagcctccatttcctttgtaaggtcttgctgttccagctgctgtaccactgtttcataattgttcatcagctttttttccagctgctgattccagaaattactgatggaaggatagaacacggtaataaggcctacaaggaatatggcaaagatcagaatattgccccattttttcttcatttatcttctttgcgtccctttcttgaccggatgaacagcacaatggcaagaatcatcagcgcatcacctacgatggtgaagatcactgtacccatgccaccggttgccggcaggaacgggatctttgtatccttcagggtaactgcaacataagcggtcttagtctgatcgataccacaggtccatgcacctgcattgtccagtgctgtacccttttcatcctttgcagttacagactggatagcgccagtcagcttgccttcggtatttttctcaggagtgatggtaaatgctacagatccatgattacggaagtatccggaaggtgcttttgtctcttcaagaacatactcaacatttgcatccaagcctttgatattgaaggtaccctgatcattagttgtcagctgatcggtagccccctcagtgttctgatcctttgccagtgtataggtgccttttgcagttgcatcttcaataaatttcagctttgtagtaccactcttcacactgaatactgcgttggaaagaacatcgttatcactattctttttagtcaggttcagaccatatgtatataccttctgctttccatctcctgggatttcttcatcactgtctgtgtaaggatccgttccgtaaatcagtgccggtttattggtgtttcccgttgctatacttgcagattccataagaactgcatcataagttatttttactgttgcatatggatacgttccatttgcgcagaacagtgtctgatattttgaagacatatcaacagtaagtacacctttgttatccagctcaggaacaaactgacctgtaagttcggtttctgttccatctgctttcacaccatacaccttcactgtattttgcttaatctccagattcgtaggagtatcctttactttaaatgtggtatgggttgcatttgccggataatgtggcacatcagcagtaactgtgtaagagagagtatcaccgatggccgcagttgtttcatcaataggtgcctgtgcagtgcctttctttcctgtgatctttttatcaacgcttaacgggttgcctttcagcacagcaccctttccttccagtgtccagccgtttggatctgtagtattggcctttgcattcacacttaccaacatgttcaggaatgtcatatctgtacaagatgccactaccagataagatccaataggcaggtttgctgttgccgttgtcttgtcactgcttacagtccaagttgcgctgtatgcagttttggaagctgctgccagctgattaacaatgttatcctgctctgtggcgcttgtaccagttgtattcagtttactgatctctttaattacgtcatcttctgtcttgcctccagttgcaaggacagcctttgcccagtctgtcagctgataggtcagttcattggcagctgtatcaaacttggttttgatcacctgataggttgcaaatgtaaccgtcttgtctgctggcagacctgtgatagtcacattagtgctattggtattttccccactgctcagggcaactgcctgcacacttgtgcccagccccagggtcattaccagggccaggatgatcgtcattacctttttccacatctttttcatattaaattcctcctttttttgctatacagatacactgctgtaagcatcattcctgttccaaaaagcatttcccaccagatgccccgtccgcctgtcttaggcagcgaataaatgcaggaatctgtaagttcaaaggaaatactatatttcaaaggtacctcaggtaccagtgaatccgggtctttttcactgtcatctaccgtgcacgaaatggacattttatccagatcagcagccggatccagtggatctcctgttatttcgtctgtgatcctctccagagaaatggtgggatcataatattttgtcttgtctttataagcaatggtcagcttcaggattcctttattcaggaaatatccgctgggggcttttgtttcttttacataatacacagcccctgtgcctgcctccagacctgtgacagtgctatttccctgctggtccgtcttcatagtgatgccggcaggcaccctgcagtccttatctttatacaaggtaaatactgcattggaaagaagttccccttcactgcctttcttgcccagacagatttcataattgatctgagtgttccatacagcaaactttctggtctgatcctctgctgtactatctgatctacgggtcattacaaagcctggaagagaattgccttccccgtcctttgcagtctctttaaagtcataacggatcaccccatttgctccttctgcctgcatcggctggttctggatcagccagcgcatggtcttgtttcctttatcctgggatgctgccaccgttgtaggaatctgcgatggtgctccttctgtcttgctgtaaggccttgccattccctctgcctttgcggttaccctgccggaagcaatcttcgcagtgtaggtggcagccgggtaacttactgcatcttccccggttccggtggagcctgttatttcaaacagaacggatgcctgatccgggatgctggtagtctgtgcccagttcttttctaaggaatggtccagataatacaaaccgcagtcccaatgattggtcacatactcccaggataccatgttggtaagtccaggaagggtaatgccactgccattattagcgatcactgtacgcttcatggctgctgccccctgatccgcagtatctgtgtcctggtattccggaagggctttgtctgtatcccttcccggctgggtcagggtattctttgtatcctctctttcaggtgtgatgctcagtctttcaaagggaagaaccctggttcctcctgtaacagcataatcatcaccctcgtcctgaagcactatgtagtaactgccttcagccagattctcaaaggcatatgccccatcgcttccggtaactaccttatccagaaggttgcccatcacatccacagccggatataagatcttgccatccacagtggttgcactcatagtccgtgttttgccgccaatcacctgactgaagcttccatccggattcttggtgatcttggaagaaaatggctcgctttcctgataaagatatacatccaccttggaaagcagccggtctgtggtactgtagccattgatggcaggacggtaattcccgttctgatcctgatccagccatacaagccctgcaatcttacgttttgcaatacgggttccttctactgaactggaaacggtaggcgcctggctggtaaggccgccgcttctgtagaaaaagctgttgttatatacatcgccgccctgctgggttatatttctgcttttcagcagtgttgcattgtcctttgtaaacggcgtaaagaccagtcccatctggaaatttcctttttcacttacttgaggaacaaatccataaatcgcatcaattgtaccattgccatctgcataatggatcagttcttcccctttggcccatcgtccgtttgcatctgccctgcaggtcagtctgtacattgtcacaccattttctgtatattcagatgattcataagaagaagccagatcaaaccacttaccgttgttaatggtattcagtatcaaagttctttcatcttgggtaagatcctttgcactgatcccgcccttcctgtacttcagctgtcctgcactgccatccaggaatgcctgcctgtccgcttccctggtaaaatccagatagatttcttttacccggtatccaccatggaagctgctgttccttccgtctccattggcaggaagaatatcgcatagctggatgggattcaggttttctgtatggttgctgtaattcaggtaatagatcaggtcatccccgatctctatcaggtcccggtccgtttccttgtagatcgcatcatcgtttgtccttgttgcaatgatggtctgctctgcactattggcctgtccggtaatacggtggatctcttcataggtggtatggatctgtacctttgtagtaagctgctggttgtcctttacatcctcattctcatctgcccctttctttccgatagtgcagttataccggatgtagggaagtcctttgttgatatcacttaccgttgaacagagggtcaatgtggtagtcccatccgggttatccgtctgctttacatcccatgccagatcgccggctttgtatttacactggtttccaggagccgaatagtcgaactgcaggctgcccttattataatgaagatcttttggaatggtcatggtgatcacaacatccgttgcctgactgccgtttgctaccagttcatgatcctttgtagcactggagatctgcagccttggcattaccatgaagtttgctgtacgttcaccgtcggacacattataataggtcttttcccggttggagcctttgatcaggtctgtattcttaacgccgatctcactgaccagcgtatacagaagcagcgtatttcctgccatccaccccatcacatgggttccgtttttcttaacaccgttttggtattctgttttcttatatccgttaaaagtaaagtcacatctttgttttgtatatttcattaccgagtcctggctttccatcagggtatttacatacccatccggaagtggaccgcctgtatctccatttccgtaggcaacgataccatctgccgtgccatactttctgcttcgccaggttgcggaaaacaggatggcatcccgtttcccatcattatagtatcgcttatatgttggacgatatgtggtccatcctcttacatcgttggtggtacagtaggttccgcctgtcttggcaaagtcctttgtcatctgcatcctgcttctgatatacagacttctgcctgtacggatacaacagtccctcacctcgtataaaagtgccacacatctgccgtccaggttccctttggctgcaaagtaggccttcagttcatccagtgaagtaaagtagatcagctcctcctctgtgtaagcatccatctcttcttccccaccggtaagaccatctgctgtttctgttttatcccagttggtcccgtccggcttcgcaccgtatagtacggtcagcttaaagctttttgttttcaggtttcctgatggtgaccaggtggttgccgactccgaagtgcctaccagaaaagcattggtgctgttggtccctgcacttttccctacccagttccagctatttcctgctccctggttcacctgtctgtcaatgatcttttccccacaggcaggtgtataggcatctgaatcaaacttctggagaagattcactccggtaagataattgtattccagcagattgtccacctgtgggtcaaacttatccggcggtatgtaatgtggatcctttacatcatctgtataatactctttactggaaaaagacacatctgcatcaatgtatacctggcttcccagtggggtggagcctgtgccttccgaagtactgatcagatccgtgcccgtttccttgctgaaataattcgtcttcgacagatggtcgccatttccgccttcaccatatatataaaggcctgtgctgtggttcagataattgtccatataattcatctcatggactgcatggttcttatagttttctccaaagaagctttccattgcatccaggccattttccgttgtctcaggagtaagccctgttacgctgctgatctccagatcagaagcagcacactccatattgacctccagataaccgctttgtcctgcagccactttcttgtcaaaaggatacagtacctgcacatatcctgcagagaaggagttcacatatccgcttcgtcctacctgattattccaggaaccattggctgtagccgaaggagtggaggatgacaccgagtaattgctgactgtaaaatgaagggtgagacgcttatcgccggtttcatttctctgctttaatgctcccttccagaagccgccgctgtagcagccggtagcgctgttccctgtattatagggagccgcatcccagccataagtggtagtcttgttgtaatcatcctcatcattccagtctacattgactgtcttttgtgcatctgtaaagctgtttcctgttgctccgttttcattgaccttataagcccatgcataaggtgccagattctctccaagcgaggagccattcatcaccagttcgccgccaaagcttatgtcaaactggatgtccccggcaggtatctgaagcccccgtattcccttgttggtcttattattgtacatctgcagggtaatgccgtatccaagcatggtaccatagacgatgtgggaggtatccttgccttcatcatgaagcttctttacttcttcctctgttgtttcctcaccgctttccatatcaaagtagctggtataggcaagctgggagtttcgcttaagaagcacattatatcttggtgcagcagatactgtcagtgttttggagctgcaggattttggattctgttcatcttcctcatttccacctacccatgcggtaaaggaaggcttaagcaggtctccgttgttcatgcccttcacactgatggccagggtacggtaaaccgttcctcctttattttcttccagctcccagtagcctcttaaatactgggcatagctgccatctgcctgcttctgctcataaatatgatggtatttcatattcatttcagagaatgaagcaaggctgctgtccactggaagcttcatttccacccacagctgtaaggtgtcatctgttacagagggagttccttcctgattcccttcatcttcttcgtctttcccggcatcctccaaagtaaaacgaagattatattttacagtatcaaagcttctcacgatcccattggtataagagctgtcatttcccggactccacataactgcctgatccctctcataccacttgccgtcatggcagatcatcttcagaatatcgccattatacagatagtgatgacgctgagccatctgctcctgggtttcaccctctgtgatttcctcctgggattcataggtctggctgtccccttcatccagaagctgctgggctgtcttttcatctcctgcacattctgtgtcaaaaacaccgccgccgtcagaagtaccgtcttcattcttggtgttctttaccccaatagacttaacctgtaccgtactatccgggccttttacttctgcttccttatatgtaacagccgtcagcttcaggttattgctctgatccacaccgccggtaatatagtaaccattggttacatctgtaccttccagctgatttccctggtaggtatcatttctccacgcattatactttgtgacattgccgttgtcctctgtcatggctgctgcctggatcaatgtgacagacggcttctggtttacacttacattttcgtagtttccggttccctcataaagggaaaaaatatcatttccggttccatcaactgtggatttgttttcacacagcagtcctcctgacagaacaaagctgcctgcatttcctacctggggattctgtgcaaggccgccgcccttctccgcctgattgccggtgacggagccgcctgccattttaatggttcccctggtctgataaatagcgccgccatacactgcctggtttccggtgatcttggtgccatctaaaatatgcagctggccttcattataaatggcaccaccattgactgtagcctgattgttggaaatctgagtattactcatccaaacactggcagcacctcctatataaaatccgccgccgtatcttgcctgatttccggtgatctctccgccttccaatacgcattttccactggtcaggtaaatagttccccagtcgcctacaacattgtctgcgatccttcctccgctgatccgcacagtaccgcctgtactgtaaataataccacttccggaattgtatataacttttgctgcattgttgcagatggttccgcctctcatttcaaaaagactgcttcctgtccctacaaaaaccgcagctccaaaggcagcaacacattcattgatagaagctgtgttgtccaggataaaagtaccgccactgacagccacgcctgcaccgccacgatcgctttgtcttgtaggtgctgagcacatgctgatctgtccgctctccatagtcacacagccgccggacaataccagaataccaccgccaattttgtctgtgcttcctgaaatggttcctgtctcttctcctggatccagtccttctgtcttttcatccaggatccgtagatcaccggaacaggtgatagcagtatctgtgccctgcagcttgtgtccgttcaggttcagcactgcacttacgccacctggaacctgaatactttcattaatatccttgatcaggaaaatctcaggtgccacatccttgtactttcctgcttttacagcatttacagcttgctgaagagatgtgtatgcatcataggtaccagcttcattctttatctttgccacaggcacctttgaagtatactgaagggtgagataacagggtgttgttaccggatcataatcaataggatctgttatggatgtgttttttgtttcattgtaccaacagctgccatctttgtcctcatcagccccaaacatatgggctgctgcaaacagctggactttagaattcttataggctttatcataatttccgcaaacgtctctgccgtaaccggcctggttcccatacagcttggctgtgcttccggcttcttctggcttctttagtataaatcctcccttcactgccgaaacccatacaccgccaccgtaggttgccttgttattacagatcctgcctccgtccatggtaacaaccgtgttttcagaacatccaacaccgccgccattcaatgcctggttattgatgatctgcacatctccagtgatctgtacctgatgtgtcccccaggttctgtgaccatccagatagacaccaccacctaaattagaagccttattatctgcgatcacaccaccggacaggatcatctgtgacagccgagtgccaataccaccgccactgctggctgtattgcccaggatccttgcaggatcctccagataaaccttggacggattcccatcattcaggtaaatgcctccgccactgccagtggctttgttgttctgtacagtcacatctgcaaagtgaatttcagaagagttactggctactctgatcccaccgccggtggatgcactgttattttcaatcagcccatttacagtaagctttcctactgagtcaatccgcaagcctccgccttcggttgccttattatcatggatccatacattcttcccgatcacagcctgaccaccggcatctgtgctaacactcatgccgccaccattgtaggctccattagaataaaattctccttttttgatctccagctttttggtgctgttaaagcttgcacctccactgtagctgtagccaccatatggtcttgtactgttatgatggatcttgcagtcctttaccagcagctctcctgcacttaaggacagacctccgccgctttttgcctgattatgatgggcgtcaatattctctacggttaattctgttacccggacagcacggatccctcctccggacccagcccctttattataggaaacttccagatctggtccgatcacaactgttttgcaattttgtatataaacaccggctccatccgtagccgctgtattatgatggatctttcctccggaaatcaggatctgggaggctgtatttgatccttgtgtaaagtcagcgcttacgccgccgccatggccacctgccgtattctcacagatctcaccacctgatatctggatctggttggcaaggttaaagggccttcccatatacactccgccaccatccttttcagactgattattccagatctttccgccagtcatggtaaaggaagacggggtgttggaacggatactgtaacatgctatacctccgccataaacagcctggtttcctgtgatctctcccccgctgatggtaacggaagtatcctgatctgcataaatgccgccgccatattttacgccggaaaagcctgtgatcatgccgccctttaaggtaaaggctcctccttctcttacaaagacgcctctgttgccggtaacgccttctgccggctggatcctgccttcctgatccggattggtatgcatattcgctgtagtactgtctacttccagttttcctcttatatcaagtacattttcctgtgaagagcataatgtatatccgtttaggtccaggatcacattcttgtcctttccgatctggacactttcatcacaatccttaagaagataaatcctttgtccatctgcagctgcttgaacagcctcctgaacagatgggaaattctgctcctggccgctttcatccaggatctgagctacatcacttgaggtcaactcctccttgtaccatgcataaaggttgcaaggctgttcctggctggcagctcctatctctgctgtatatacctgatcgttttcacaatcataccaacaattgtaagcttccggcttcataactgaagcagacaacagggtaagattaacccctttcgttgcatacagatcactttttccaaatgtccattggttgccgtatatggtcccgccggttactgagacagtgcttccttcgtctgcacggataccgccccccaggccgcttgtggtattgtctgtgatggctcctcctgcgacatataagctggcccatgacacagcaattccaccgccgccccagcttgaactggcattagtagttgtattgccggatatttcgccgccggagatatgacagactgcatgatcccgtatacggatacctccgccgcaagcggatgtattcccggtgatctttcctccctcaatatggatgctggcactgccccaggcatagataccgcctccatggtcagcactgttcccggtgatctctcctccggtcatcctaactgatccttgccaaacagaaacggcagatgctttattcttcgtaatcctgcctccactcatcacaaaggagctgtccttgtactttacataaatgccaccgccgccggcacttggcccaacggtgccgccattcataaccagactgccgtgctccagataaaagcagccgcctcttccatccgcagctgacgtgccgccgataatgtatcctgtctggtcttcactactgtcttccagtgtcatttctccctttaccgtaaacacaggagtattcgtcttcccgcttccccggatagtatttccattcagatcaaaacagatgttggttcccttggggatctgtacagactcctgatcatcttttaaaagggtgatcctatgaagctgtccatctccagcagcatcaacagcagcctgaacagtagtatactcctgggaatcatccagacgggctactgtctttacttccggatcagaataaaggaaggtatactgatatatttttgtccgattagttgtatccagctgaaggcctgttgtattccttgtatcgtcaacctcatcgtaccaggcgatcccagaggtaccaatgacagaagtcatctgatcggctgagggcaggctgaccacaggggtataataaacaggattgctgccattattcaccgtcagggtggctgccacatacagatcctgcccgccaggagcagtaccggtacctgatgcctggttatcagaaatcaccgcttccttctctattgtgatcgtcggatttaaagcattggatgtccatacataaacaccgccgccaagccgatttgcctgattctcactgatcacaccgccactgatctggacagtacctcctaccaggctaactgcgcctccatggacagcacgatttttatggatctgtacatctcctgtgatggtcagatttctgccattttcagcaagatatgcacatcctcctgtactggctgactggttgttggtgatctctccactggagagagtaccggcaccatataaagcacctccgccgccatcagcagtattgtctttgatcactcccccattcatgtacagagtgcctcgtacaccgccgcctactccagtcgaataattaccagaaatctctccttcatttaaggttactgttccggcagcaccgccgcctccattccagccactgactgtatttccacagacgaatcctccgttcataacaagagtaccattaacacctccaccgtaaccggatgtattcccttgaatcctagcctggtctgacatggtaacacttccaaagataccgccgccatgtccacctgtcttattatcagcaaccgttacatctccggaaaggatcaccgttgaaataaaaccgccgccgccatatgactcggcataattcctgcagatgctgccgccactggcgatcagcttgcctgcatttaagaaaaagccgccaccctgtggcaatgttccacctgttgcctgattatcagaaatctcaccaccggtcatctcaacatttgcgtagacaccataaataccgccgccatgataccaggatttattgccatgaaccagggttccctcccggatctgcacctgacaataatttcccatagctataccaccaccggtaccaacggtttcattgtccaggatctgtactccagcaagaactacatttgcataattgctgatccacataccgccgcccaggtgagatcctgagtcataataattaaaaacatcatcggccagtgtattcccctgaatagtaccgccggtaagactgacctgggctagtttcttatccgtactgttcaggtacagaccaccgccatgagtcactgcctgattataagatacctctccggataccatagtgaaatggaccggatcctgaacctgaataccaccgccgctgacaccggctgtattttgggaaatagtcaggccgtcaaagatcaattcatttcccacatccgatacactgtggatataaagaccgcccccgttgcggtccgcatgattctctgtgacggcaataccactgccccaggtgatggtctcactgtcatccttctggatgtacacaccgccaccatttagtgcagccttattcccggtaatggtgccattttcataggaaagattgcttgtgcgatagatccatacaccgccaccgctgataccggaacagttgtcatagatcctgccgccattcatagataagccggcgccatcacttacatacaaaccaccgcctcggcctgatgcagaatagccggtgatctgtgacccttctccaaggatcaaacggccgccatagcatacaaatacacctcttgtattctcgttgccagcagaagatgcactgccggataagctgccgtttttcagggtaagctgcccatatactgtaatattattggtatccttgccagcctctgccgaagacttatccacagtcagggtatgaccattcagatccagtacaatatccatcccccgggggatcagaagattctcttctactgtagctggaaaatcctccccaaggcttatggtaagtgttgtagagcctgccttccttgcttcctcgatcagatactgaatggtgccttcctttacatctgcaggagcatccagaagagtggtatctgctatctcttcattgttatcaataggtacaccttctccgtctgtaaaagcgtcttcgatctgagacgtattcccttcactgtcctgtgctgaactgtcttccacctgggaagcagcttcctcgctgtccgatgtagaaacgtcttccacctgggccggatcttcctcgctgtccggtatagaaatatcttccaccttggaagtgtcctccacgtcactacctgatgcagaactatcttccacctgggtggtatctccctcgccgtccgatgcaggaatctgctgagtctgggacgtgtccacgtcactgcttacagacacctggtaatcttgcccgtaatccagcgtagctgcagacaacccagtgccctggcttcctattgcgattgcaaacgtcaaaaaccaggacatcccttttttaaaagatctccaatggttatttttcatgctcttatgctcctttttaatatcatccctcacctgtttcccccatgaaacaggcctgattcttacctttctttctcagttttatacgttaattttactattttgaaaaattattgtcaattaagattcaccattccgaaactgcaaaggccaaatatcgtgattataatcaatttttataacatcaaatccaacaaaatagcgaaaacattataacgaataaagaatcaagtccactattacagaacataaaaaaccggcaggaaatcattcccaccggcttttcacctgatcgcagatattgccccattgacagtccccgcatatctctgttctttttccaggtgcaaggatcttttcctgcaccttttccacaaactccctgaagggaagctgctgtccttcttcaaatccgcagtaagcaagcacgctacgatcaaatctttgcactttcctgcctgcttcgcagccttgtaccagattatttggacatgcactgcagatctcatcctcctgcagggtcagctgtacactggcacctgcaagaaatttctcaagcatttcttccatatgtatggtaaagccatcactgtagccttttcccacaaaataggcaagacacatcccatgatggggacgcaatgccacaggcttttccttactgctgcattggcacatatttccgaacctttctggaaagaacaaatgccaatgcgatcttaaccagatccggaacaataaacggaatcacgcaccagctaagaacggttcccagtcctacggcaccggttgtccgcgcatataccaccataaaccagatggttcccagtgcatagcataccagcagtccgatcaccatggaaatgatctgtacaacaggtttttttccgaatactttttcaatgccccacattaccagtgctgaaaaaaggaatccaacgatataaccgccggtagtgtttaacaggaccccgataccgcctgaaaatcctgcaaataccggtacacctactacgcctagtaaaatgtatacaagaacagcgagggttcctcttttgcctcccagaaccccaactgccataaatacgccaaaggtctgcagggtaaatggtacagtcattggtatggaaatccaggaacatactgccattactactgcaaaaatagcaatataagccagatcgtaagtttttgttttggtagctgcaactgagctcataaaaaaatcctcctgatgaatgaatagattttggtaactgttcaaagcccttacgggatgctatctgctgagcagttacaaattttgtacattgaaaatctatcacacaccaagaggaatgtcaaccaaatttttatacaaggtttacaattgtgttcgtattcagtttacaatcagattgcttttaggttgacagtgaacatcacttaatttaattgatacacatctgcatgctgcaagccaaagcttaatgcttcagaatggcttccaaagaaaatgtccacatgtccataaggagttcccagatcctccactgtatacacattgccattgatcagaagctgtgttccaaaaggcacacctgccatggccactgtacgccctgctgaaggaactgtaccgctggcagtcagattgcctgctgtgccgcaacactgtgcacagttgcaatatgcagtcaatgtaaagttaccaagataggttccctgtccggaaccggaggactctacgcttccgctctcatcattgtaagaatcaccagatcctgaagaggagctttccgtatatgtatcctcttcctgagactggctctgctggtcttctgtctgctgggtttcttcctgctgaacttcttcctgctgagcttcttcctgctgagctgcttcctgctgggctgctgcctgctgtgtcagactgtaaatactgttctcagcactggaaatctgtgcggaaagagcagctgcctctgcctggctggcactgatctggctgatataggatgcaatgctgtcattggtgctggatactaaagcctgaacctcctgcttcttagatgcgctttctgcaagaagctgattcacagaagatgcttccttctcaaggttctcctcctgctcctggatacttgcctgaagatcctcatatttcttcaacatatcccgatcatacttggacaactgggaaatattctctgcacggttcatgaactgggtaagatcactggaagataataaaagctccagcatggtagtcccaccattctcatacatatatacgatacgtttcttcatagcttcatactgctgctgtgactgctgctgagctgccgccagctccagcttcatattctgaagctcatcttccttctgggcagcctgaatgcttagctgtgaaacgctgtctgttaattcttcatactggctgttcagctgtgccagatagctttccagttcctgacgcttgctctcaaggctgctgatatttccctgtgcctgggcaagtccagcctgtgcctgtgccttctgggactgcatgtctgcaatctgttcgtcaatatctgctgcataaacacctgtgcctgttgtcaaagtaaggatccctgcaagaagcaccggaataagctttttatttctcatatactaccacctcgtaatcaatcgtagcatcagtataacatattttattacaaaatcaatagttttattttatttctgtaacaattgtgtaatatttccagtatgctgctgccagcgcaaagaaaaaaaaacggatgccatatacctttatgatatatggcatccggcctgtaatccatcagtaatctgttataaaatcattttatgagtttggtgtcaaaacgccaaaatcatgattacagaataaagtaagcagatccccttaggcttccatagcctcctctggctctgcagccattacttcatcatacttgtccaggatgattctctggatacggtcgcgggttgcagaattaataggatgtgcaatgtccctgtattctccgtctgtagctttccgacttggcattgcgataaacagccccttctcaccttcgatcaccttgatatcatgaactacgaattcatcatcaatggtaatcgatacaactgctttcatcttgccctcttttgctacttttctcacgcgtacatctgtaatgttcatttttgctgcccctttcgttttcccatacaatatatatgatctgtactctgactgttgcataaccgtccagcctcccacagctatgataaagcatatggcctgtcagacagttacacatttatatcccatggatataagattctttcaggatttacagcacatatctctcatttttttctacaacgatcttaacttcgccttctccgcaatagtaagaatttgcccgaatggtatccctgctctcaacaatgcagttctcaatgtgcgtattatcccccagatacacatcattcaagatcactgaattcttgatcacacaattgttccctacgaatacatctttaaacagaacggaattctccacaacaccgttgatgatacatccgctggctatcagactgttcttcacgctggctcccggattgtatttggcaggcggcagatcatcgatctttgtcttaacagacggctcctgcttaaagaaataattacgaatctccggcttgaggaaatccatgttggtcttgtaataagactccacagtggaaatattgctccagtatgtatcgatcttatatccgtagatccttttcagattcttgtagcggatcaggatatcctgtacaaaatcattcctgccttcctgtgcagccttctcgatcagttcgatcagctgccttctgcggatcacataaataccggtagaaaccgtattataagaagataccattggcttctcttcaaattcttcgatcctgcagtcttcattcatacggagcacaccaaaacgctccacctctgacggatccggacatgtagtacatacaaccgtgatatccgctctctttgcaatatggtattccaggaccttgttgtaatccagcttgtaaataccatcgccggatgcgatcaccacatatggctcatggctgttcttcaggaaggtaagattctggtagatagcatctgctgtgccctggtaccagaagctgttgtccttggtgatcgtgggtgtaaatacgtaaagtcctccctgcttcctgccaaagtcccaccacttggaagagcttaaatgctcattcagggaacgtgcattgtactgtgtcagtatagctaccttctgtatatgggaattggccatattactaagtgcaaaatctatgctgcgatagctgcctgcaatgggcattgctgcgatcgccctcttgtcagataattccctcatgcggttgttattgccgccagctaaaataataccgattgctctcatgccttgtcaccatcctttgctgcgatcacctgtccactttccaggatgcctcctggataatcctttgctgtagtaataccggaaacagctgtgttcttcccgatctttacatcaggcgggatcacactgcgctctcctatggtagcaatgccaaatgcatatacagccggcttcaatacattctcagcctcttcaccacaaccaagggtcacatggtctccaatggtaacatcctcggcaacaatggacttatccatcactaccccttctccgatcacggtattcctcatgataatagagttacggatcacagaacccttgccaatcactacattgggaccgatcactgaattatggacttctccatagatctcagctccctcaccgatcagacaccggtcaagaacagcgtctccggaaatatatgccggtgggataatatcccctttggtataaatcttccagaactcttcgtaaagattaaactccggaataatgtcgatcagctccatattggcttcccaataggaacccagtgtacccacatccttccagtagccattatattcatatgcgaaaagccgctctcccttttctttacaatagggaaggatatgctttccaaaatcacagctctgctgatccttaagtgtataaagagcttccttaagggcctgccagctgaatatgtaaatacccatagatgccagattgctgcttggatgctctggcttctcctcaaactctgtaatacggcttgtctcatcagtgaccatgatcccaaatctgcttgcctcttccataggtaccggcatacatgcaatggtaacatctgccttattagccttatggaaatccagcatcacctcataatccatcttgtaaatgtgatctccggaaaggatcagaacatagtcaggattgtactgctccatataatccatattctgaaagattgcattggctgtacctgtgtaccactcgctgctgctgctccgctcgtaaggaggaaggactgtcacaccgccttcattacgatccagatcccagggaataccaatcccgatatgtgtattaagacgcagcggctgatactgggtcagcacgccaactgtatcaatccctgaattaatacagttgctcaatgggaaatctatgatacggtacttcccgccgaaagacacggccggtttggcaactttctccgtcagaactccaagtctgcttccttgacctccggccaggagcatggcaatcatttctttcttaatcatgtaatcacctcttgctgtaagtttatggttttcttattatatcatactttatccatttcgtgaacatattttacaatttttttgtccaattattttattttttatatctattgtatactattttttttctttttttctctgttttttgtgtattttgtctattttttatatatttcgaccttattttacattttcatggattgcattttaaaaaaacgcctgattttatcccaaaaacctgttattcaaagaaatacttttcattttttcttaaaagaggtatactatagcaaatttatatttttcattaaggagatttttattatgtatcagatagacttccacaaaccgcttcatatccactttatcgggattggcggtatcagtatgagtggattggctcagatcctgcttcaggaagatttcattgtttccggctctgatgccaaagaaagccctcttaccgatgcccttacccaaaagggagcacgtatcttttacggacagcgtgcctccaacatccaggatgatgtagagattgtggtatatacagcagcgatccacccggataatcctgaatttgcagcagcaaaggcaaaggggctccctatgcttacccgtgcccagcttttggggcagatcatgcgcaattaccagacacccatcgctatttccggtactcatggcaagaccacaaccacttccatgatttcccagatccttctggaaggagcctgcgaccctaccatcagcgtaggcggtattcttccttccatcggaggcaatatccgtgtgggacagtctgagacctttgtgaccgaggcctgcgaatataccaacagctttctcagcttttttccaaaaatcagcgtgatcctgaatatggatgccgatcatctggactttttcaaagatattgaggacatccgtcattctttccgacgctttgcacagcttctccctgcagatggcaccttgatcatcaatgtagacacacctcattatgaagacatcatcaaaaaccttccatgtaatgtgatcacctatggcgttcagaatacggctgattaccaggccactgatattacctatgacaaatatggacatgcctcctttaccgttttaagaaatggtaaaaaggcaggcagcttttacctgaaggttccggggatccacaatgtatccaatgcactggcagctattgtactggctcagctgctccagatccctgatgataccattgtcaaaggactgggaagcttcaccggtacagaccgccgtttccaatttaagggagaagtgggcgggatccacattgtagatgattatgctcatcatcctacagagatccgtgccacccttacagcagcagctaattatcctcacaagaaaatctggtgtgtattccagccacatacatatacccgtactaaagcactgcttcctgagtttgcacaggctttgaccttggctgatcatgtgatcctggctgatatttacgcagcaagagagaccaacaccatcggcatctcttctgctgatcttcaggaaaggatccaggcacttggaactccatgtgaatacttcccatcttttgacgagattgagaattacattctttcccactgtgcttctggcgatctgctgatcaccatgggagccggagatgtagtacgtatcggcgaacagctacttggtaaataattatgtctttcagaacatttatatatcagctgggagttatctcccagctgatatagcctccggcaggattgcagaggtgcgcaggagaagtatgtcatgcaattgcatgacg

SEQ ID NO: 67 - DNA, 13759 bp, Unknown
  gut microbiota DNA sequence
taaatgttctttttttatttatacacatttcgtcccctgttttccacataaagaaaaagttatccacaattaaaaacctcagtatttctgctgtttttccgtgcttatccacattatccacagaattatgcacattttttctcccataaaggtgtggattcttatgtgtataatctgcttgacataattcgacaacagtttctcctataaaatgccttgttccaacattttctaaccttttccggtttcccataatcttattggcaaccttctttccacactatccacattatccacatttaaatgtggatgattactggtgtttaaccccggtattctcttttaaaaaaagttgtgttataataaatccactttcagaaaaggagtgtaacagtccatgaacaccatccatctccgggctctttcatcctcacaagtgacggtactttccaatatatttattgatcagtatatgccgggagccggcggcgaatttgtaaaagtttatatttacctgctgcggcttcttgccgatccttccgcttctgtttgtctgcctcttctggcagatcgtctgaactgtacagagggggatatcagccgtgccctgaagtactggagtaatgaaggacttttgatccttgaaactgatccttccggagagctgacaggtattaccttgacagagccttccccggatacacagatggagctgacagctaccgtctctgttccacagtctgcactggcagccactgctcctatttcgcagacggtatctgcagccactgtctctgttccacagtctgcactggcagccactgctcctatttcgcagacagtatctgcagccactgtctccacgccacagccggatactgcaccgtccagatctgcctctgctctcaccccagcccgaatcaaggagcttaaggagaacgaggatgtagcacagctgatctacatatgtgagcaataccttggcaagactcttacccccaccgatacccgtaagatccttttcttctacgatgaactgaagatgtccgtggatcttattgatttcctgatccagtattgtgtaggccgcggccataagagcatgcgttacattgagacagttgccatggcctggtctaaggaagggatcactaccgtggagatggccaaggattccacctcccgctatggcagagactatttcaccatcctgaaagctatggggatcaccaatcgtaaccctgtggattcagagatcgttatgatggatacatggctgaaggattacggattttccatggacatgattcaggaagcctgcagccgcaccattatgcagaccggacagcccagcttccagtacgcacacaagatccttaccggatggttcaaaaagggtgcccttaccccagaggcagtacatgccctggatgtccagcaccagaagcgcagccaggacaacagccggagccgttcccagacacctaagtcccctaatcgcttcaataacttccaacaacggaattatgatttcaaagaacttgagaagcagcttctggagcgccagaatccctacttccaacagcctcactaacagaggagattgatcgtttatgcctttacagaattttcaatatgataccattatgagagaatacagccgcaagcaggctgagaaccgccgtctgctggaggagcacaggcaggaagcttatgaccggattcccaggcttcgtgagattgacagcgaagtagcttccttaagtgcagccaaagcccgctccatgatcagcggtctggatcgcagcctggaggatctgaaggctgccatatccctgcttgcccaggagcgtgaagctttgcttgccctgaatggctacccttccgactatcttgagatgcattacacctgttctcattgtcaggataccggctatatcggcagcaagaaatgctcctgtttccacagggcggagatacagcttttgtatactcagtccaatttaaatgaaattctcaaaaaagaaaactttgaccacttttcttttgactattattctgctacaatagatgcgtccactggattgtccgcactggaagccgcacagcgtgcataccagactgccagggatttcgtttcatcctttgaccaggatccccgcagcctgctgatctatggcaacacaggcgttgggaagacttttctttcccactgtatcgcccatgatcttcttgaaagctcccacagcgttttatatttttctgcatttgacctgtttgatatgctggcacggaataccttttccggcgatagcacaggcaaagacaacgatctggtgtacgactgcgatctgctgatcattgatgacctgggaacagagcttaccaacagttttgtgtcttcccagttgtttttgtgcgtcaatgagcgtattatgagacacagatccaccatcatctccaccaatctggagttaggtgaaatacagaatgtttactctgaacggaccttttcccgtatctgcaataactatattatcctgaagcttacaggagaagacatccggatgaagaaaaactatttaggaggaaaatagaacatggcacaaagatccacaaaggaattatcaaccgttccggttggaaggcttggactgatccccacagacagctgtcgccccttaggcgagaaagtagacgaatggcttgttaagtggcgtaatgagcgtacacacccggagatagattcattttcttttgaaggataccagagagattcctatacgatccaggtccagacacccagatttggttctggtgaaggcaaatgcgtgatctcggaatctgtccgtggtgatgatgtttatattttagtagatgtatgtaattacagcatgagctaccctatcggcaattacaccaacctgatgtccccagacgatcatttccaggatctgaagcgtgtgatcggcgccatcggcggcaaggcacgaagagtgaatgtgatcatgccttatctttatgaaggccgtcagagcaagcgtataggcagagagtcccttgactgcgccagcgcacttcacgagctgatcagtatgggggtagagaatatcatcacttttgatgctcatgatgcacgtatccagaatgccacaccgcttcacggctttgagacagtgcagccttcttatcagttcattaaggctcttcttcacaacgaagaaggacttcaccttgataacgatcactttgccattatcagccctgacgaaggcagcatgagccgtgccatttaccttgccaatatcctgggtgttgatatgggtatgtactacaagcgtctggattattccaaatttgtagatggacgtcatccggtagctgcttatgaattccttggtcctaagctggaaggtaaggatatgatcctgatcgatgatatgatctcctcaggtgatacagtgcttaagatcgcatcccttctcaaagaaagaggagctggcaagatctacatttgttctaccttcggattatttacagatggccttgacaaatttgatgaagcccaccaggcaggtgtatttgacaaacttctcactacaaacctggtatatcagcctgcaaagcttcttgagaagccatattatatcacctgtgacatgagcaaatatattgcattgatcattgatacattgaaccatgatctttctgtaagccaccttctgaacccagtagacaggatcaagcgctgcgtagacaactacatggcacaatacaagtaatatttaatttaagtatcaaaatacacatatcattattaaaaatgatcttaactcaaaaagatctccacagcatccttcctggatgcgggagatcttttttaatgattatttattccatttcattctttatcagatcaggaattttccgtctttgtagatcacgtttccatctatttcaacggttccaccgtttctcatatcttttatgatgtcccagtgtatagaagaataatatgcattgtcataaggtcttccaagggccatatgtacagtaccaaagattttttcatcaatcaaaatatctgtggtacaaacattcacgtatgggtttgttccaaacgcaaattctccaatcctgttagaaccttcatctgatgcaataatactcttaacgaaatctacattatcatctgcttttacatctgatacaatcccatggtcaaacgtaagttccagattatggattactttgcctccaatggttgccgggaaatcaaatagaaccacaccattcaccgtatcccagattggtgacacatttatctctccgtctggaatattagtcttattgtctgatacgatccatttctttccaccataatcaaatgaaaaatctgttccttttgatttcaagtgcaaatgattccctttatccagaatatcagcaattctttgccactgtacaacatgagccggccagtctatagagcacgcatcaaagaacatatccatcatatactcgtaacttacatttgcctgctgggcgaatctctcattcggaacacgtaccaaagcccacctggtttccttccatctcaggcccgaaataatccccatcgctttctgatattttgctactttgtctgccggaatatcgaagcactcattgagattaaatgcacctctcaaagcaaggtaacaatctgcccactccatgccatatttttcaatttcaggtacccatgaaatctgatcctcgtttccatatttcagcactgcatgtttcaacgcttcactcataaactggatctgcgggtatcctcctgcccttatgcatgcttcgtatgcagccagtgccaacggataagattctgtttcatacattgcaatcatcaacttctctccgggtttgatttccagcgaataattaatcaaagattctcctaatgctttccatcttttatcagtattcattaatgtgcccccttaagcaactggcttacttacgaaaatcttttacaatatccatgaattcttttacacggctctcatctgtcaggttttcaaattttccatcaattttaaaagtcgttcctaccactgctccatctgcagtctgaaggatttccctaatcgtatttacgcgacatccggtatttgcaaaaacaggtgtctccggaactgaagcttttgcgcgtttcagtatttccggattggtcgcagatccagcggtagctcctgacacacacaggatatctggacggcagttaaatactgttgtctttgctatagattcaatacttctgtctgtaagatatttagcagcctctggcacgatattgaacatcagccgtacattttcagcaccgatttctctttgatgacgcactacttcaccacaatttgtatcccacaggccaaaatcgcttgcatatacgccggtaaaaatttcacgtacaaactttgcatcagtggctacagcaagatcaagagaagcaatcggatcccataaacagttcacgccatatggaatttcaatctcatctttcagttcaccaataatacgagccatacatgcaactgtttcagtcttaactttagtcaaatacggaagactgaattcgttgctgaacataactgcatctactccacctttctggagtgcaagcagatcatgccttgctttatccagtacgtccttcatgcccttgcctttgtcataatacggatctcctggcatcgcctgcaaatgacacatcgcaacaattggtttctccgttccaaatacttctttaatccaattcatagtgtgttcctccattctttttttatgaccataactggtgcatcatagttttattattttcatatagttttgcaaacatttctttatatttctgatattctttgtgtctctccatgtcaggttttataacatgttttacctttatcagattcttaatagctgcaggactttcaatagtacccagtgcaagcccagccatcagggcatctccataagaagcgcctactacaacctccggcaccaactgtgtgattccacagatatcactcaccacctgtaaccaaagtaatgactttgtacctccgcctacagcagtaacacagctaatcggtattcctgcatctgcgaacaactgaagattctgagcaatcccatacccaattccttcaaatgctgcatgaacgatatgtcctcttgtgtgctgcagatttaatccgaaaaatacgccttttgccattggatcctgaagtggcattctttccccctgaaaatacggaagtataataagtccgtcacttccgactgggatattttctgcctctctgaaaagtacggtataagcattttcccctccggcttcttcctgcgcaacaaactcttttgccatctcgtcccgtatccattttgtgagagagcctgtggttgccattcctccagtacaacagtactgattatctatggtatacggattactccacatctttgttccgcttactctctcccttgtcactccaatataaaaagctgtagaaccatacatcagcatagtatcttccggctggactactcctacacttactgcctctgcgcctgcatctgtggtcccacagataacagttatgccttctgcaagtccggtttccttggctgcttttgcagtaactgtacccacgatcgaatatgtgctttccgcaataattggaagcatttctttcggacatataagatcacagaactcatcatcccactgctgtgtttttatgttcagcattggcagtgcactgctggcagaatacttatctacgtaataattacctgtaagacgggcagtcaggaatcctgaagcaaatgtgatatgttttgtccttgcaaaaatctccggttcattttcttttacccacaagatttttgctccaaaatgctccactgtgcataaagttccaaattcccgttgcatcctctcaaatcctattttctggttaatttcctcagcctgagccatacaacgtgtatcaatgccatacaaaattgcatttcgcaatggttcacagttttcatctacaaaagtcaccgctgccatgatcgtactgattcctatcgcagctatctcttctgcccgaccatttacctgatcaagcagactgcggattatacttttcagatccctcatccagtcgccaataggatcatgctctgcatagccaggatgaggtgaaataattccatgtttcacagaagcagtagccaatatatgaccctcaagatccgtcagactccctttggattcagatgttcctacatcaaatcccattaaatactttttctgcatatctgcctccttcattacgctttgtgctgtccccgtttctgacggaaataagaagtaaagaaattgatactcaaaacaataataagtaacagtccccatgtaaattccttaaaataactgtcaaaatgcatcatattaaaacccgaagacaggaattgtaaggacaaaagtgccagaatcatacatgatatttttgctgtgccaccattgggattcgttgcgccaagcacactgcacagaattgcctgcataacataggtaaaagcataatcagcttttgcagtattggttctcatcaggatagcaaggccacatactgaactgataatacctgaatacagatatgtttttatgtatacttttttgacgtttatccctgtaaaatgactggcttttggatttgcccccaccatttttacttcaaaaccaaacctggttctgtacagcagaatccctgttattataaaaacaataataagcagccacattgtgtatggaatccctataagggtagccgaaccaaactgcacatactcttttggagccccggaaacacttttcccctgcgtgattatgatggatattcccttaataaaagtctgtgtggccattgtagacaacattggtgccagattcaggtttgcaattacaaatccattaaagaatccgaaaaaggcaccaactgccaacgctgccaacattcctaagacaataaacccaatcagagttccacctgtcattcctttatctactgcctgtttcataattgttgccgcacatatggcagacaggttgcctatagataccacagacaggtcaatgccattggaaagcattgccatcatcattgccagagaataaagtcccagttccggtaactgaaaacacatggacgttaaattcatagggttcagaaatttaccgtttatagtaaccattattgcaaaaataagaagggtaatgactgtcatcttcgcaacatctacgtccattttgaaccgaagttttctttccttcattacgccatcgcctccttcttttctttctttttgctatttccgtttctttgtcttgactgagaaacaagtcccagaaaaacaataactcccgttacaaaatcctgatagtaagaaggcacacctatcatgatcagattgtttgatatgaactgcaggagtaaaacaccaagaaatgtccctactacagttcctttagcccgcatagaagctcccctgccaagaactactgccgccatgccattcagttcctgccctacaagatctgtgggcattggaagtgagcatcttccaagacagttgtgtattactcctcccgtaccacagatgattcccacaataataaatgcaaaaaacctggtacgtgaaacagcaatccctgcccgtttcgccgcatctgcgtctccgcctattgcatataatttacgtccgaaattcgtatactccagcacgatgtgaagaatcacatacatcgcaagcgtcaggagaatcgcacttggcagctgactttctacaccgcttccatacttggctgttgctatataagtagatccaaatttaaccgctgaattcggaagtgtataaatataggatgaacttacaaatgccagcactgcgccttttaggaaagtctgggtaccaagtgtcgcaatgaaagatttcattttcagccgatcgatcagaacccagttaagtaattgcagcaccacgccaatagcaatcgacattacaagtatcagtataagaggaacatccatatagcccctggttgtcaggaaatacatagttgcataagaagcaaatgccccgatcatgcaaaaagacatatctagctcgcctaaaatcattaccagcataatggcaagtgcaaaaatcgcaggaactgcacaggtccttgccagcgcaaataagcttgccgctgataaaatatccggatttatgattccaaatattataactgtagctatcagcagaaggaacagagcaaactggctgttttttagtatttttttcatattctgccctcctttcaatctgcagcaactaattcttcaagttcatccattgatgtatccttaatatcaatctcttgcgatatttttccgtctttcatgatgagtacgcggttacatatctgcataacttcgtacatatcacttgaaacgaccagaactgccatgccttgttctcttgccaaatctcgtattatcttgtggatatcacttttggcgcccacatccacccctaccgtcggactgttcaagataagaatatccggattcgatgcaagccatttgatcagaacaattttctgctgattaccgcctgacagagaattaaccggatttgtcggaaccattccggccacattcatagaaccaagactttctttctgtttctttctcagagctttcattttcaaaagtccacagtgccctgtatagtttcgcacaatacgtgcaatcgcattatcctcaatactttgatccagatgaagtccttcggtaagtctatcttccggcacatatgcaattttgttgttcaaagcatcatctacactttcaaaaatgcccacattttttccagcgacttcaacgctgccacctgttgcttttctgattccaaacaacgtttccacaagttcaccattgccgcagccaagaagtcccgtaatacctaatacttcgcctttgtataaagaaaaatcaatattttcaaatgctccatctaaagtcagactgtttaattttaatgccggaatcggactttgttcaatgtacacatgtctttcactggaaaacttcttacctgtcatgtagtacaccatatcctctttggacagttttccttctcctgcttctgactgaaacacattttttccgtttctcatgatcgtataactgtcacagatttccgcaatctcatctaatttatgacttacaaataaaactgagacgccttcctctttcagttttctgacaatttcaaacagtcgctcgacctctctggttgtcaatgccgttgttggctcatccatgatcagcagccgtgcattctgtacaattgctctgcaaattgctaccatctgtttttgtgctacattcagatcagccacatacatatccggatctatatcaaactgaacttttttcaggatgtcttctgctttttttcttatttctttccagtgaatcacagcgttaccttttgctactgtagaatacatcatgatattttctgcaattgtcatattcgggaacagtgaaaagtcctgataaataacctgtataccttccgcaattgattctgaaggggaaattttcttatatggcttatcatttatatacatatcgccactgtcaaaaggatgaaatccggaaatcactttaatcattgtagacttcccacaaccattttctccgatcagactgcgaatttctccttcattcatattgaaattcattccatttagtgccatcgcaccgtaaaaagatttgtacatattttcaatcttaacaatacttttcaaattatcaccacccagtatgtagacaatcaaggggctgtatagcacagcccctattccattgtccaatatttaaagtttatgtagcggtttagtatcctcacagttacgtaacaaaacgtatttctgatatacctttcacgatggcatttcatcttgtatatttcaaaattttgtcaaaaaccatgtcaaaatttcatgagagatactatctgctgaacagatgcaggtttatcaaaaatcataatcgctcatattatctgtggtcacatccacccaggcagcaccgaatactgtattatcttttactgtacagttctcgtatcctgttactcccaaatcgacaccatcttcaatagtttcacccttgagaaccatttctgccaatgaacacattgcttcacctgcatctgctggatcccagaatgtgaatgttttaattgttccactgttgagataatcttttgcctgagatacaaggcatgtaccagtcacagcaatatctccagcttttcctgcttcttcaactgccattgcaattcctggtgggtcattagtatcacaacctataaatccgccgatttccggataagttgcaattacttctttagcagcactgtaagccgcttcctgactggaaccttcaacgggatcacatacctgatacatatccgggtatttttcttcctgacgtttaatagcgccctctgtccactgctgatgtgatgcagctgtcagagtacccatcataataacatatccgcctttgcctcccatttcctcagcaagcaaatccatcatgtgcgcaccatattcctggtttacaaatgcttccatatcgtaatctacattttcaagtccttctgcttcatgagaaattacaacgatcccgttatcacgtgccttcgctaaagttgtctcaaccgccgacggatctgatggaatgactgtgatcgcatcaacgcctgatgcaattgcatcttcaatgctggaaatctgtactgctgtgtcagcatcaccagtaggacctgactgatatacttcattgcctgatgcttccgcatacctcttgttacccacttccattctgtcccaccaggaaatgccgatacatttcggagtattcgcaattgtgtatgcatcagccaataccggaactgctgtactcaccagcatagcagttgcagcagaaatcgcagtgatcatcatgcccctttttttcatttacattacctcctttttctgtttgttttgttttcttttcttttgtttctttactgtttttttatgtccttttgttctgatatttgtattatatccttttaatttttatatgtcaatgtatttttatgtattttttctttcttttgtgtatttttcttttctttaattgtgtaaataattaaatatatatattattatcatcacatttggtcatttataacaaattgttcaattatcttgtttcttttatttatttttatgttgtttacctctttttctttttttctttttatgataaaatgaaatcagattaaaattaataataatgggaaggatacatatacaactatttcacagtagtgcgtatctttatgtatcctcaggaggaaatcactatgtttcaaattgaacgtcaggaacagattcttgagtacatcaatcaggctcaaaaggccaatactactgagcttgcccggaaattcaatgtatctaaagtaacgatccggcgcgatatcgaagccctggctgcctccggtctgattgtcaagacgcatggaggcgcagtagcaacaaacaccagtcttattcatgagataccttactcttacaaggcagagcgtaatcaatctgccaaaaaaagtattggaatagcagcttcaagatacatcaatgatggagatatcatcattctcgactcaggttccactactctggaaattgccaaaaacatcacccagaaaaatattactgtcgtaactgatgatataaaaatcgctatggaattatccggcaaatctaatgtaacagtcattgtatgcggaggaactctcagcgatccagtttatactctcaccggaaatgtggctgtagatttcttttcacgtctgcatgtgaacaaagtcttccttggctgtgatgctgtagatttggattttggtatttcaaaccgtacatatggagaagtttatatcaaaaccgccatgatagaagcagctggcgagattattatggtaactgacaatagtaagttagatcgtaaagttttctgtcatttatgtgacatctcagtcatcgacaaacttatcatcaaccaaattgacgaaaggaaccgccggggctttcttgaaaaaggagttgaaataataaccaccgaccctattccagtagaataggatcaaaaaggggctgtcgcactaacgtgcggcagctcattttatatatccaacacaaaacgccgagcttcgaaaagcccggcgttcgtggtataatcagtttatgcgactaaacaaaataatacagagggattatacctcattttcgctgtattatcaaatcaaacttccgctggatttagagatttctattccatctgatgatccagttcgtctggtaagtgcctttgtggaggaaatggacctttctgaactatataaaacttatggcaggatcagaaaaaatcaggcaacgccgcgtcagatgctgaaactcgttatctatgcagcaatgaatcgaatctactcaagtcgagatatccgaaaagcatgtaaacgggatatcaactttatgtatctccttgaaggaatgcctgctcctgatcatgcaacgattgcgcgttttatctccctacatttttct

SEQ ID NO: 68 - DNA, 2560 bp, Unknown
  gut microbiota DNA sequence
gtgcctgtatcgatataatctgcattaattccttctgcatacagcatcttggtaataagatcacctgtcaggatcataccgtatggatatgtcttccctccgtcattggatactgctaccgcttctgcagtgatcttgataacaaccagtgattcttccagagtcggtttgtcgtgcaggtaagtgatcacgcttttgtcttccagttccacccgtgtctcatacataccactggcattggcagctgcatcctgaagtttttgcacagctgtttctctcgctgatctctctctgctcaccagatcagctgctttgatatctgccctggtttccccgttactgtactgactggcaagcctcagtccggattctgcactgttcttcatggttgtaaacccaaagaaattgaaatttacatctgtcaggaaagtattgtattcatttcctttccagtcagaaattttcgccatatccataaattcagcgattggatacccgaagccgtctccttcaaatttacggaaagatatatttttaaaaactgcataaatccatgagatcaaagttccctcattgcctgtaacaaggggatttacaaccgtcagtacataccccttcgttcctacaagtactgtttcttttacttcctgttcttttacttcctgttcctttccttcaattgtccgctttactgtgcgctccatctgtatgcctgtgacagttatatcactggtatcaacggtcagatttgaccactcagtaagcttatgggcattcgtccaatcaaatctgtacgtcataatctgcaggtgaccggtccggtctatccttgcgtttccgcaggcgatcattgcaatatagccaatgatctgccggtaagtgtatttatcagatggcttatcctggatgacataatcgctatgcagaaagcttgtactccctaaagtaatcccacagatcgtacaggcatctgccagcacgtttgcagccgttgccggaaaaggaagcgctgttgtatatgctttatccgccttatacatatcatcaactgctgtcaccagcacagttgtcccataagtttccggtgtaatcactgtatacgtgccgtattcaattttctctgtagtttcggacagttcaaaggtaaggtacagccggatctttgctccgtagaagtcatactctttcagatgatcgtcatcattcaaaagttctatctggatattccggcagatcgcacagcccaggggaatagaatttgcccctgcgctgtctaccacaccgttgtttgacatggagaaatcatcttcagacagattcagcgtacttccatccgcaaatgtaatctgcgcattctccttgaagtctgtcctggtcttcatcagctctttaaattcattggttacattgatcataacggttttaccccctgcatgttaaatgtcagactgtttattgttttctgatcctctgataaaattccaatggataagtttccctttccaacataaaaaagtgcattcctccacgctccgtaataaggactgaatgcatgcagggtaaatgattttccctttcctataatctgcaggatctttgtgacttctgcaacgggaacattggatgctgtataagcaaactgctccaccgtaaacataggcgtaaaatgcccagtcccaccttgggaccgggtactgtcttttgtatatgtggtttccagggaataccccagatctttgtcaggctgccatatggtctgaccattaagcgtaaacctttcttttgccgccatgtgtacctccttcctaaagatcaaatgggttgctgccactgttcatctggcgcagttttgcttcgctgatcatttcatcaaataacgtcctgcggttgatctgggctgtaaaatgcatattaccgccgccctggttcccaccagattcctcccgaatgattttacggagcaatccttccggtgcctcaatattgtttccctgcttctgatcacccagaaccgcaagaaactctgaccttggcggaataactgcaccggtagcaaggtatgggatcgtgctgattcttggcagattcagccaggacctgtacctctggctctgttttgttaccgggttttcatagttgtaggtgaacgtaaaagcattttctacacctgctagtgcacggttgatgttcccaactgtgccattgatccggtcaaccacaccgttcaattctcgggcgatccggtcagctgctgtccctgcagcctctgccatgtcctccagatgatctgtaacctttttggcaatcctatcccaataggttccggtattcctggatatatcgccccagcttctctggacggtggactttacgctttccatttcccttttggtgtcggaagacatggaacccacattgtcagatacggacttatacgctccaccccacttttcagaggaagtcgtttccacatccgcaaatgcgtcatctgtatctttcttgatattctcagcagaggtaccgattgtttcagctgcctcttctgttttctttgccgctg

SEQ ID NO: 69 - DNA, 1352 bp, Unknown
  gut microbiota DNA sequence
atctcctaacttacgctgttcccaatcgtttgagccccaaaactactaattcaaacactctcgctgaaaatcagtaatcgcattattttattaaatttccgcctggataatgtgtccaaaattcatttcatctttaaataaatcgtacacgtattcagggctttccaaatacaatcccgtttccttatccagaagctttacaaagacttcagaattataaaatttattcatagcctcatcatattctatattttgatcgatgctaatcatgtcaacaatatcctgtacagcatattccaccaactgatcctttttagacaactttactcgccacctttcgcaaaaatgccacacttctttccgtatgaaaagaatactgagaagaagttcttttataaatcattccctttaacagtgtttcaaaatcaataatttcattttcatattgccgaaacaataatgccatattatcgtctgcaacagggcctataacaatatcatacttattatctttgttacacaaaatatcttttacatctatgaagtccctgcttctgttattcattacaaaccttgcccattcttctgttgtctgtataccgaaatctttgatcttgagattatctaaagctttaaaatcatcatctatctcataaacatttataatcggcgtttttccataaattctggctactcttgccgccattttttttgcttgttcttcaatatctgtcaaataaaatccctgtccaaaatccttatatggtctacacattgccagatttatattatcaatcgctatattactcccatggtacaatctcataatgtacctccgtttttcctacataaaatccctaaatcttctaatattgtttcaaaatccaaagtatgctccacatcatagttttccttaataaaagctatacctttaaattgaaaaaggtattgaaatgcctcttgaatactcaaatcatgcttattggcaaattcatttacacatgcaactgtaaatccaattttccttttctgctcactcattcaaaatctcctcattatgctgaacttctgtaatcataaaacactgtaagtacatattggtaacataataatgataaatttttagtctaatagcattcctgcttcatatgagcattttatataatccggattgctataatacacatttgaattaaaattaaatatctcatcactaataaacgagccaaaaacttttttttattgcttcaattacattttcgtataatcccataacatccaaaattaatgtttggtatacacgtcctatggaaattacagttggaacgctatatctgcaagctgcaacatta

SEQ ID NO: 70 - DNA, 35763 bp, Unknown
  gut microbiota DNA sequence
taacttctggtatattttgattgtagcaataatgtttgcgccatctatatttatattttataactcaagtgcatgggtttatgtagttggatatgctgttattgcattattgggaaatttaatagcattgccattaggaaaaagataacttcaagtttgtatgcgacaaacatttgaacactttttgaacaccgcaaccgtgatgaagtcttcaaagcccctttctatcagtatttgagattaagaaaaacggttcgattccggtctgcggcattaattaaagcccttgattttcaagggtttttttatgttgtagaagatgacattgataaaaagtattcatttggctataataaaaaagaaaatacagaacgtgttataggagaaacgattatgtgtacagcagctatttataaaacaaaagacttttattttggaagaacgctggattatgaattttcttatggtgatcaggttactattacacctcgaagcttcccatttcattttcgacatgtaagagaactgaagaaccattatgcgattatcgggatggctcatgttgcgggaaactatccactgtactatgatgccatcaatgaaaaaggactcggtatggcaggtcttaattttgtgggaaatgcttcttattcagatgtacagagcgaagtggataatattgcacagtttgaatttataccttggattttaagccagtgctcctctgtaacagaggcccgggaattgcttcatcgtattaatatagtgaatacgcctttcagtgaacaactgcctctggcacagctgcattggcttattgctgatgaaaaggagtgtattacagtagaatctatgtctgatggattgcatgtttatgacaaccaggtaggagtcctcacaaacaacccaccttttccacaacagatgtttcagctgaataactatatgcatctttctcccaaacagccagtgaacacattttcaagtgatttgaatcttaatgcttatagccggggaatgggaggtctgggtcttcctggggatttatcttctgcttctcgctttgtccgtgtggcatttacaaaagtaaattcattttccggtgaatccgagatggaaagcgtcagccagtttttccatattttaggatcagtagatcagcagcgcggttgctgccaggtctctgatggaaagtatgagattacgctgtatacttcctgctgtaatgctacaaagggaatctattattataatacctatgagaatcaccagatcagtgcggtggatatgcacagtgaaaatctggatagtgataaactggtttgttatccgttaattcagggagaacagattaaatatcaaaatagataacattcttcaatagtattagatgcattttcagatttatatctttgcatctacaggaatgagagatatgtgtagtatctgtactgagttaagaatatggctatttcctttatgccgggaagtagtcatattttttttgatgaatttttggcaaaatacctggcaggatgttacctggaacagttactgtcagaagtgctagtgtaaatattgaagtgtttacgtataatgaagatgaacgaaaaacacacgagtataacaagaaaggagatatttttatgaacaaaaaaatgaaattatgggtggctggatctgttggagttataatggcaggtatgatgagcgtgagtgtttatgcacttgaagaaaaggacgttattggaacctggtatgtaaatgagctttctatgggcggaaacatgacgttccatccggaatcaatgggaatggaagtaaccgttgacattaaagaaggcggacagatagagataaccacatctaatagtggagaggagccagaggtagatcaggcagagtggaaaatagaagatgataaattactgataaccaatgatggtgaatctaaagaatgtgagtatgctgatggcaagttaactatagatgcagacggaatgacaatgatcatgagccaggaaaaagaagaatatgagccatatgtacctggtgaaccggtagaaaatcctgcaatagaggattttgaaggagaatggatgtgtactttgatggaagcatttggaatgcagatgccggtcgatgctgaactgactggattcgagatgatgctgacagttcaaggggatacggcggagctttctttaatagagagcggagaagagagcaaagtagagctttcaggtgaggtggaaggaaataacctgatcttgaaggctgtatccgaagatgaggcagggactatgttcttcagttgtgatcttatgaagttcactttgctggatgatggaaagctttgttttgaagcagacgctgatgacagtgaagaatcagaagattctgaaacagatggggaagatttctctgtaaagacatattttgacaaaataactgttactgaatagagtaaaacactgccgtaccggagatatcttattccagtgcggcagtataggattgccaagatgtgtagaaaaatatgtgatgcgttgcatgacgcacatcttccggcaagaataccaaggcatttttgaaattcttcttgactgaaataaaaagggaggtaaggcatgggattatttgataaaaaaatttgtgatatctgtggagaaaaaataggtttacttggaaatagaaaattagacgacggaaatttgtgtaaggattgtgcaaaaaaattatcaccatggtttgaagagcggcggcacagcacagtagaggatatcaaacgtcaattggaatatcgtgaaaagaataaaaaggcggtaatggatttttgcgttacccgtcagatcaataccagaaattacactgtttttattgatgatcataaggggaattttacagttgcacgaaaactggatgtgaatgaaaacccagatatcgttcctttatcagctattgtgcagtgcagagtagaggtagagcaacagcagcttgaagaaacatatacaaaggatggaaagacagtaagctatcagccaccagtatataactatgaatatgattatacgatgcgtattaaggttaatactccctggtttgatgatatggattttcgtttgaatacattttctataagtagtgaaaagagaaacgaattgatggaagtagagcagacgggatatcagattgttgccgcactgacaccaaatgcagccggaatgcagccgggaatgtccgggatgaacatgaacggagggatgcaaccaggaatgtctgggatgaacatgaacggaatgcagccaggaatgtctggaatgaatatgaacggagggatgcagccagagggtaattcctggaaatgtcagtgtggcgcagagaatacaggaagattttgcgaatactgtggtctgccgagaccgttttaaaaatataaacaaaaggttatgatagaccgtcctgtgactcccaatgagatgaacttgctgttactcaccacctgaaagaggtgggagtcttctcgactgagataaaaagattttgtggaagtttctaatgattgccagcctatccggtgtgaacagataaccaatttctctaaaaactatatgccagtacatgggctttatagtatacttagtacaagagagtattaatgagagaggaattttcatgacatacaataaaaaaaagatgctgtcgtgtggagtgattttgataagcgtgttactggcttatatctgcaggctggcacgaccggaaaatgtttttatgagaaacattgcagaccagtgccgtaactgtatttatctgggtatttactgtgcctgggtgatttacctggaaaagcacgtagtacataagaaaatgcgcagatgcctcactgcaattggctgtctgatggtattctggttttttgtaaggacagtgaaatttcatattcttcatgacccccttggagaacacgtttgttggtatctgtattatattccaatgattttaatcccggttttgggtttggcagcagctatgttttttggtgaaaaggatgaagagaaaacagtcagaagaatcaaaatcctgttgactgtggcggtggtattgatcgtaagtgtttttacaaacgatttacatcagatggtatttcattttgcaaaacagcctccattttcagataatgattacagttatggcattctttttatggtgatacagggatggatgttgatttgcctgacagggatggaaatcatactgatcagaaaaagcagaatcccgggaaagaagcagttctggctgccaattattccgggaatcctgctcctgggatggaacataggaaatatattccgactgccttttatccaaacctttgcaggggatatgactgcagtatgttgtcttttaatggcagcaatttatcagggctgtatcttatgcggactgatacagacgaacaatcgttattttgaattatttcagacttccggaggattggatgcagagatcacagattattcttttcagcgttattatcattccggtgattttccgcagctttcgcctgaattgcgttcaatgatcgttaacagatcatttgtacaagaacaggggattcggatcaaccacattcccataagaggagggcatctgttttggtcggaagatatttcggtattgctggatcaatatcaggatattcgggaacagcaggaagaactgactgctagaaacaggctgttgaaaaaaacctatcagaaagaagcagagcggagaaaagctgaagaacaaaatcggctgttaaatatgatacagagtcagaccgcaggccagctggaattgctgtcacagctgatggatgaactggaaaagacagagtccagggaacgatataattggattcttggtaaaattgtagttgttggtacgtatttgaagcggagaaagaatctggtattgacacagtacacatcagatggaaatctgcttacaatggaagatcttagacaaagcattgcagaatcctgtgatagcttaaaactatgcaagattcgtgctgcttattacgttgaaagcggagatgtgcagctgaatgcagatgatatactaaaatgctatgatacttttgaatggcttgtggaacagttatctgatgttatgcattctatattttaccgtgtatcgcagattgatgaggatcttcgaatttccgttcatattgtgtcagaagcggatctgcgtgacttagtgtcggaaagaccggaattaaaagtacagcaggaagatgaaaatgaatggtttgttgggtgtatcgtactcagaaaaggaggcagcagatgaccagttttggggaatgcagcatggtaatgcagaattttctgatgattctccttgagatatgcctgattctggaattgatccttctgatggcaagaatcaccggtctgtccgggaaaaagaaaatcataacggcaatgactgtttttgtagtttcttttattcttatgggttttcttatgaatgaccacaggtattgcctgggagaaagcgcatatcagcctatgcttaggtatccggtcagcattttaattgcagtggtgattgtattgactttgtatctttgctgggcgatctggagggagaaacgcagatatcagcattctttatcatactggtctgtgaatgaagcggtggatgatgttccctgcggggtgtgcttttcagatcctctgggaaggattgttctatgtaataccaagatgcaggaattgtgcagaatgatgacaggttcctatctgcaggattatgaaaccttgcgaaaagtaatgaatgacgagcctgcttccgaaggttttttcaggttgagcagcgacagcaatgtattttattttccggatgcttctgtttggatgtttcaggaatatcatctgcaggaaccggattgggaaggatacctgcagacagtagctgttaatgtgtcagaaatatactacaatagtgaaaagatccgggcaaacaatgaagaattggcgattctgaaccgtaagctggaggaaatgtacgaaaaaatcggagataagatcagagaacaggaaactcttgctttgaaaatgcaggttcacgataattttggacgaagcttactgtcaatacgcagaatattggaaagaaaagaaaaacaggataaaatggataaacagttgtccacattgaagcaccaggtttatattcttactggttcaacagttgaaaatatggaagagctgtatgaggacacagtgaaacatgcggaagagcttggaatctccgttcagatcattggaagctttccgcagcatcctgcatataggctgttagcagacagagcaattcgtgaatgtgtgacaaactgcgccagacatgcccatggcagtatcgtttttgtgaagatagataaatgcgcagatgaatacaacattcagatcaccaatgatggagatgcgcctgaacaaaatgcagaagaaggcggtggcttgtcagcacttagaaaagcggttgaatcagagaaatgtatgatgcagatttcttttgcccctgagttttgcctggtattgaaaatgcctatgacagaaaggatgagattcgatggtacgggtactgatagtagaagatcagaagatcatgcagaagtattttgaatatatgcttatgcaggattcggaattacgacatgtccagacgatttcggatgcccgtgaagctgtaaagatctgtggttattcggcaatagatcttgtgcttatggatgtgcagacatttcataatcatgatggattaagtgccggcaaaacgatcagggaaaaatatccacatacaaaggttttgattgttacttccctgattgatcccaaagtgctggaaagagccaaaagcggatgtgcagacagcctctggtataaggatcatggtgaagaggaaatacggaatgtgatttacagaactttaaatggtgagcgtgtatttccggatgtaacgccgaaggtggaacttaactggatcacaagtggagatatcagccccagacagctggagatgctgcgcctgtatattcatggaatgtcatattcagagattgccaagaaaatggaatgttccacctctggagtaagatggaattttcaggaaatgattgccaaggcaggatatagctgcaaggaagacctgatagcagctgcactggaaagtaaattgattgtgactacactaaaatagaaaatccgtaactgtgaggatacagaacagttatgaaaacacacagaatgtagaaacatattctgacaggaaggagatacgggcatgaaaaaattttctgttgttgtatgtgtttgtgtggcactgctttcttttggtatttatgggaaatgtgtgagagaagtgtctgcccaaatacctggggaagaagagaatctggcaattttaagggatatcatcagggaaaatgaatgtcaggtgggaatggcatttcttggatatacctatgaaactgcagaaacgtcagatatacttgaatatactaaaatggaagaagtggcagcggcttatcctttcttacaggaggggacagttgttgatgcaggaggatacgaaatttatgctattgttccgggatgcgattgtaagatcagtgtttatccgactcagattacggaagacggggaatatctggatgatctgaacgctccatattatatagggcaggaggacgaaatcattatactgcgatgcaatatgagtgagatccattccaatgtgatggtttcagtgcagaagcagaatatgagtgtgcaataccatcctatggtatcactaaaggatgggcatcttgccacagaagcttactgttatgatttttccatatatcatgattgggaggagtatcactcggaggatgattcatcattggatataaatattgcccgggaagtgctttcacaaactgacgaggtgcgttactatctggggcttggtatgtcattgtggtatacaggtacagaggaatacattgaaggaagaaattgtccgatatttgtacttggaacagatcatgaggatcattttacaaaagaaaattattatgcagtaggagacaatgtggtttattactatgatgcgacaggcgacgcatggcttctgctgggagcaggctgataaaggtatttcgcagggacagacagaagattcaccaatatatcattgcatttgattaatcagagaaagaggaaacagacatgagtgattttttgacggaaaaaaataaaaaagcaggagttctggggaaaataaaatgggttctttgtggcttctgtatacttttgtccctgggtgctattggcgcctcagaaaagtatattggtgaaagacgattgggaatggcagcaacagagatcttactgggattgttgtttctgtatcctactttcagggaaagtcagaaaatacgaaagaagaaacaagccagtgaaattgcctgctggtttgaatcttatgcgcagagtacgctctcatttgaaaagtatgagaaggagatgggaaaaggtgcagtaaaaaaactggaaaaatatattgccagaggatatattcggaatatccagatagacagagaaggggattatatattgattactgcaccaaaccgacgtgtgaatgagaagatttatattacagttacctgttccagctgcggcgcgaagaatcaggtcataaaaggccgtctgagcaattgtgaatactgcggacagcgcctcaccccatgacataaggtttgaaaagggagtaaaagactgtgtagcttacagacatatcacctgccggcgacatcatttagtacagctatttgcagaatgctgtactatgaaagatttggaaaggagaatagatgtgaaaagcttaaaaagaataatgcttacggctgtatttttgtgtatgtttcttttgtgtgcatgtggagagaaggaatccaaagaagaggctgcgcccacagaggtacctgcacccacagagacaccagcaccgacaaaagcaccggaaccgacagtgacgccagaaccaacggccacaccagcaccgacagcgacacctacaccgattccagagtataaagagtatgattatgcagaaggaaatcttacgattactctgccctatgaagcggaagaaccaatagagcaggaaggccaactggaatttacagatccaaatgggaaatggacgatgacaattgagcctataacagcagggcagatttctaattgtatttcgagtatagaatctgcacagaaataccgggaagaaggcgcaaagcaggtcaaaaccgaagaaaccaagatctgcggtatgaatgcaattgtatttagttccaatctggatgaatctaaaaacggaccagatcagaccgcaatatatctgggcacaggagagtatgctgcgattctcaaatatgaggatcattatataggaccatgggatggcctgcagattgaggtaaaaaccacggaacgctttgatgacatatatacagtgatggaagatgaactgatacagacggtactgaatggaatcaaattccaggaaggaatccagtatgaagaagtaacttccaaaggaattacagtgaaaatgccgactcgatggcagggcagagaattagacgatttctttgtaggtggaaagatccattgtgcttatgagggcctcctgaatattcagactatttcagctccagacgcaaaggcacaggcagaatcaagagcagacggagccataaaagaaatagacgtaggtgacagtcattattatgtggcatgcaataagcaggattcgcacataaccctgcataagaacctgactgaccggaagagtttggtgatacttgtgagtattcctgactgctctgaagaagagctttggaaattcctggacagagaagaaatgaaaacattgttggaaagtctggagatcgatcaggagctgcttgaaaatcctgaaaagggacagaagagtggtacagggtatgaaaagaataatgggatgaaggtaagcggttatacgggagaagaaacagatcttgtcttaccttccagtattgatggtactgacatgaagggtgttgcggcagtggcatttaaggacaatacaaagattacttccgttgaatgtccggctggaatgctctcgattgatgactctgctttcgaggggtgtaccagtctgaagaaagtaatacttccggattctctgacatggatcggtccgtatgctttttcgggctgtaccagtctggaaacagtggtttttggaaatcgtgttatgcaacttcagaactctgcatttagaaactgcacagccttgagagatgtggatctgtcattaaagaatcattttcttgcagattcagtttttgatggcgcaggtgccggaggatatattcacataggaaagggttcaaaaataggaagctgctgctttaacagttcaggatttgaggaagcggtatttggagaagaatgtgtttttgaaggttacggaacgttttccggttcaaaaattaaaaagatcacattgggtgagggtataacggaattaccatccatgtttgcttctttctgtgagaatctggagcaggtagatatgccggaaagtctgacgaaaataccggacgactgttttgatgccagtccaaagatggaaaaagaagaataaaaagaacagtaaaaagaacagtaaaaagaacagtaagttgatcattgaactgatggggttcatcaaaaacagcgacagggctctgtcgctgtttttgtgatttatttcatgatcattaacttatgaatattttatgattttaccattttttaaattaaaaacaattttgtgtgtgttatcagataaatgatcatcagaactgcattcatacagaatggttatcttattgcgggaaacggttattttataaggccagtaattaccggttttggatatgtttgttttccagagaatcttgccctttttagatactttgtaaacagattgatcatagtagccggttacatacaggttgccatttttgtcaaatttgcaaagatgtcctgccggactgactttttttgcagtccataattttttaccgtctttttttctaaggacaacgattttggaattatcaaaaatataaactttatccttgcggacgatacatttggttttaggaagctctgtagccgtatatttttttgtaacgtatttccagacagcttgcctatttgcatccagacctcttacgatcatgcgttctttggaatttgtataggaggttttgaacttaacagttgtagcttccggggcggcagcctgaactggaacagatatgatcagtatggagaaaaaaaacaatagtgacattaaaaggattggttggattttctttttcatatacacatgctcctttctgataaatgagtggtttaggattgggcataatattataagctcatccttgtaatcgctgcacctcttttgatattattatcataccatattgagaatgaaaatgtaagcagttcagttacggaagattgcttcctgtcttgagttttcataggatttttggtattttattctacagaatgagtaatggaatacagaaaggaatttgaaaatgaaattaatgatcgtgcggcatggagagccggattactccatagattcactgacaccgaagggatggcgagaagcagaattgcttgcaaagagactgagcaagctggatataaaggatttttatgtttcaccactgggaagggcacaggatacggcgtcttttacattaaagaaaatggggcggcaggcaaaagtgctgccatggctgcatgaatttgatgctcctatgcgtaaaccgaattatccggaaaaagatacagtgacctgggactggctgcctcaggactggatggctgacgaacgttttttccattatgaccaatggcttgaaaatgaatatatgcagaaatatggggtaaaggagaaatatgaccaggtcatccaggaatttgaccagtttatggaaggatatgggtacaaaagagaaggtcatttttaccgggtggtaaaagcaaatcacgacctggtagtccttttctgtcattttggattggaatgtgtccttttaagccatttgttgggagtatcacctatgattctgtggcacaacacctgcgtgttgccttcagctgtaacgcttttgatttctgaagagcgtaaaaagggaatcggtgctttccgtatgaactatatgggggatatttcccacctgtatgccggtaatgaagaaccgtcttttgctgtccgcttttgtgaaacttttgaagatgatacacggcactgataagtggaacagtcattcgatgttaaagattataaggattttatcttttttataaatttattagaaataggacaaagttttctcacatttgtattgtatgatatatacatcttaagagaaagaactcttaagacaaactctttcctttccctagaaaaatgtaaaacaaaaacataaaccaccaccttatatacaagaacagttatagggtggtggttttgtatatgctgattcaagaatgcctctgcaatcctgccagctgatgtaacagtttgtacgaaactcagggtctgcggcagcggttaaagcaggagtagatttcctggatcctggggatggcatagccacaagaggtatagccgtcaaagaagaacgtaagtccttctttttccagatgggaagcaagaaaagcaataatctcatcaattgtccgtttaccatctatcaaatgttctgctgcatattttagaagcagaccaagagaggcggtttgctcactgtcgatcagctgttcaatataacgcaggtcgatttcctgtttgccaagggaaaatccgtcacatccgtgatttttgactttcagccgttcaggctgatttctggtgtttccataataatctttgtgtgtttttgcagtgggggttttcgtcataatccgatgattctgtggcagtacaaaggctggtgtgtccaaagcaggaagagggaaatcccggcaaagctttttgactttggcggtgatatccaccggaatatagttgtccatctggataactgtatctgcaatgtggaaaaaagcaccggagcttcctgcaacaagaatagtggaaatcccagctttggtataaaggtccacagcacgttccaaaaacggggtgattggctccttttctctaaggatcactttttgcataaaagcatctcgaaccataaaattggtagcagaagtatcttcatccagaaggaataagcggctgccagattgtataccctcaataatggcagcagcctgggaggtgctgccactggcatcctcagtatagaaattgcgggtgtcttttttattgggaagatcattgatgaacatggaaatatccacatcttttataaaacgaccgtcttcggaacggagtttttgtgcggagatatctgtgatcacatattcacggccgtcccctggaatatgattatagactcctagctccagcgcatttagaagcgtggatttgccatggtatccaccgcccacgatcagggtaatgccccagggaatacccatgcctgtgatggttccgtgatgaggaagatccatggtaatgcgaagactttccggagaagcaaaaggtacacaattcttcattggttttgatgaaattccactttctcggggaagaatggcattgtcagcaacaaaagcacataagtggcggactggaagttgctggcggatatattcctgatcttgggctgtatggatatgtttttccagttctttgctgttaaggtttctgtaaaaaaaggatttctgaacgcataccggcaggaattcaaagagtattttttcaagctctgctgaattgattgtacggccgtttgccggaaagccaatgaaaaaacgaaccacaatctcctgatctgtaatctgacaggcagtgcgggaaagtacctcctgtccacagtgcgtaacaaggatcaggccgcttttcccggagccttttgcacggaaggtatattggctgacctggcgatcaaactgtctggtaaggaagtctgcaagagtaattttggtaagggtatcctgataatattctgcaggaatccggctgtctgtgtggcggatccggatgcttacgtgagagggagaggcgaatggatcgccttgtacatggtcgatggacaggatatagtttttaaattgataagttccttttgttgatttataagcaggatagctttttctgttaatggaacgaagaagttcctggagctgagccgctgattgcataacatttcctccttttgatcctgggttcttatgattactgtatcacaactgtattaaataaaaaaggatttgttcagagagaggtgttttatcatactgacataattcagtggaaaaaaaacggatattggtttataataaataaagatttgtatggtaaaaaaagaaaggcggaacaaaaatatggaacgtagaaatgcatggcttgcttatacagaagcagaagaaaaagaactggaggaaacagcagcgaaatatcgttatttcctggatcaaggcaagaccgagagagaatgtgttacacagatcatccgtgaagctgaggcagcaggatatgagtctcttgagaaaaaactggcagagggaggatctgtaaaagcaggggacaaagtatacacagttggcatgaaaaagatcattgccctttatcatatcggccaggagcctttggaaaaaggtatgaatatcctttgcgcacatattgattctccaaggctggatatcaaacagaatcctttgtatgaggacacagacctggcttatcttgacacacattattatggcggagtaaagaaataccagtgggtagccctgcctttggcaatgcatggtgtagttgtaagaaaagacggtacagttgttgacgtaaagattggtgaggatgagtcagatcctgtgctttatattacagatctgctgatccacctttccgcaaagcagcttcagaagacagctgcagaagtgatcgaaggggagaatcttgatatcctgatcggcaccaaaccgttgaaggatctgccagatgacaagaagaaagaagctgtaaaagagaatgtgctgaagcttctcaatgaaaaatatgggattgatgaggaagattttctttcagcagaactggagatcgttccggcaggaaaagccagagaaggcggacttgatcgcagcatgatcattgcctacgggcaggatgacagagtttgtgcatatacttccctgctggcacagctggagcttgaggacacaccaatgcgtacccattgctgcctgctggtagacaaggaagagatcggaagtgtgggtgctacaggtatgcagtccagattctttgaaaacagtgtggcagagcttatggaagcacttggacagtacagcgagttaaaggtaagacgggcactttccagatccagcatgctttcttctgatgtaagtgcaggatatgatccggcatatgcagaggcttttgaaaaaaagaattctgcatatctgggaagaggaatcgtattgaacaaatttacaggagcaagaggaaagtccggttctaatgatgcaaacgcagaatatgtggcaagagtgcgcaagatttttgatgaccacaacgttgcattccagacagcagagcttggaaaagtagattttggtggcggtggaaccatcgcttatattgcagctctttatgagatggaagtaattgacagcggagtggctgtattgagcatgcatgctccatgggaagctacaagtaaggcagatgtatatgaggctaagaaagcatataaagcttttctgcttgatgcataaagcttgggagagctggctatgaggaatttatttgtaaccggcaggaagactgcacctggtgaattgatgctgaagatcattggaatggtgcttctgcttttgggcgttatgatggccttcggaggcatcggtgccatttccctggtaacaaaggggagcagcaacgattcggtggtggcttatctgcaggagaaccatatgacttatggacagatgcttggaggtacggtgatttcctgcgtgtccggcatcgtgtatattatttctggcgctcttggcgtgttgaatggcggcaatatatataaagcagaccagtgtctggtaatggtggtgatcatggttgcagaggtactgggagagacgtgttttaattggtatgtagggcagtttcagccaatcggagtggtgaatatgctgattcttccggctttatatttagtgggagccttgagaaataaaagtgcggtaaagcagtgttaaaaaagtgctgtaaagcaatgtgaaaaagtgcggtaaagcagtgttaaaaagtgctgtaaagcaatgtaaaaaaatgcgataaaaaaatataaaaaaggcttgacaaatatgtccgtatacgctaatatattcagtgttgcgaaacaagttcgcaaaagatgtgcgtttagctcagctggatagagcgtttggctacggaccaaaaggccgggggttcgaatcctctaacgcacgctaacaaaagaaagggacagagcacggagctctgttcttttttttattattggagccattgctatcggaaacaatttacattttacataattcaatttcgtgaaaaaacttgacttcaaacatacttttggtatgctattcactagagaatatgatcaccatgtggaagatatgggatgtttgtgtgatcatatgtctggaatattcttttcaggaggtttgtatattatggaaaaatcaactgtttattttacggattttcgttgcaaagtgggaaccagccagctggataagctgagaaagctttgcattgcagcaggaattaaagacattgacatggatgggaaatttgtggcaatcaaaatgcattttggagaactgggcaatatggcctttcttcgtccaaactacgcaaaggtagtggcagatctgtgtaaggagcagggaggaatgccattccttacagactgcaacacgctttatccgggaagcaggaaaaatgcactggaacatctggactgtgctaatattaatggatttaatcccattactaccggatgtcagatcctgatcggagatggcttaagaggtacggatgaaatcgaagtacctgtggtaaacggagaatattgcaagaccgcaagaatcggacgtgctattatggatgcagatatttttatcagtcttacccattttaagggacatgaagctaccggttttggtggaaccatgaagaatatcggaatgggctgtggaagccgtgcaggaaagatgcagcagcatgccagcgggaagccggccatcaacgcagaagcctgtcgtggctgcaaacgctgttcaaaggagtgcggaagcgatgccattacatatgttaataaaaaggctgtgatcgattatgataaatgcaaaggctgtggccgctgtattggagcctgcagctatgatgcagtatacaatccgaatagctgtgcaaatgaacttctggatcgtaaaatggcagagtatgcacaggcggtctgtcatggacgtccttgttttcacgtttcgctggtacaggatatcagtcccaactgtgattgccatggggagaatgacgctccaatccttccagatgtaggaatgtttgcaagctttgaccctgtagccctggatcaggcatgtgcagatgcatgtctgaaagaaacacctatcaggaacagtcagctgggagagcatctggcagagccgggctggcattgtcatcatgatcatttcaaagattccaatcccaatattgagtggaaggcaacattagatcaggctgagaaggtgggactgggtaccagacaatatgaattgaaagttgtgaaataatgggcgattatattacaacttttaccgggaaacatttctatcctacagatccggatccttcggcaatctgtatggaagatattgcccatgcgctgcctatgatatgccggggaaatggtcatgtacattccttttggtcagtggcagagcacagcatatgttgtgcaaaggaagcacgtgccagaggattttcaaataagatcatactggcatgtcttttacatgatgcaagcgaatgctatatgtctgatgtaccacggccctttaagaaagaactggaagcatatcaggagcaggaagataagcttttaagcatgatttttaagaaatttcttaattctgatctgacagaaacagagtgggaagcagtgaagacaattgataatgctatgctctggtatgatctggaagaactgctgaatgaaaaacaacctggggatccgccggaaatccatattaagctggattatactgtgcggccgtttgaagaggtggaagaagaatacagacgattgttttatctcagccgagaagactcccgtttttataaagggtgagagataagaatcctgttgctatataggccgtatcataataagttccacatgtatttgaccggaaattcctgaaagtgataagattgtatgaatgataataagtttgtaatatgtgttgaaaaaggcggtcagcgtgaccaggcagagtcgtttgccagaaagactggtagcagcattgccagtcatcctggaaacggtttgaccgtgttgtttcatgcaaaaggcgtttcccttacaggatatggacttgtatatcagggggattttgaaaacatgcttcaccgtgtgaccaacggaaggcttcagcatgaaatgctggtgcgcgcagcaaaatctgacaaagaggggcgaaaagccattgatgcaacagctggtatgggtgaggatgcattccttctggcggcacagggatatgaagtgactttgtatgagcagaatcctgtgattgccatacttctaaaagacgcacttcgtcgtgcacgaaagcatcctgtattgaaggagattgctgccaggatgaagctggtagagggcaacagtgtggaatgcatgagaaaattgctggatcctgtagatgtgatctatctggatcctatgttcccagccaggcagaaatcaagcctgatcaataaaaagcttcaactgatccagaaactggaacctccatgctcagcagaaacggatctttttgatgcagcgattcaggcagacccggagaagatcattgtaaaaagaccgctgaaaagtgaatttcttgcaggcaggaaaccttcgtatacattgaatggaaaagcaattcggtatgattgttatacccaatgagaaagaccaacttacatttatatagtctccagtactcagtttacaaaaagagagataaattcacatttgatatagtctccggtattttagagttcaaaaaaggctgtgagctgcctgagaggtggcagttcacagcctttttgcgggtctgactactcaatttcgtcgatatccagggagtacccgagaacttctccaacatcggtgcattgtcctttcagggtaatagtatcgccttttttcatagtggaaatagcattgcgctgtgcatcatctgaaatataacattgcacaccgtaaatggaaaagtcagaatttacagggtcaagattaatatacttaccggaagaatcaatattggacagcttccctgtgatttccagataagtgtccttgtaatgatccgatgcattcagtgcgttgtcttccagttcagctaccatatcatctacggatacagataagtaagtgataggtgtcactgatgttttttcaccagaggagcctgctgatcttgaacctttggaagactcctttttacctccggaagcagcacctacaatcataaggatcacaagcagcagaaagatccatttcagctttccacccttcacctttttacgacactgcggacagattctggcatcagtaggaatttctgatttacaatatttgcatttcttggttttttcattgttcatatgtatttccccctcgttttgcataaaagtatagcatattattagggttatgattctccctctaggggtgggaaattacgaaaaaactgtactgtgaaagtgctgaacatttatgaaaaagtatgaaaaattataagtatgttctatacagattcactttgcatgccactggatttaagtggttcaaactggtagcggcaaagctgttcattaacctgaatgatactgccgggacgatcattaaaacagatcatcagcagtgcatcccgtggaattttggcgtaaagctgcggcatttcatattttttcaaagcctgttgtgtctgagcaagcgtaagctttccggcgtagcagatccgcaggatcacatctctttgccgggtctttttttcgccggataacagtttatatccatatccttcagggatctgtgcctggagaaacgtctgctgctgagtgatatgattatttttcagacattttttcagataaacaccaaaaggattgagggaagaaagcagactgttctcataggtgcggcagtactggtcatatgttccggtatgggtgttttctaaaatctcctctagttctctggtattttttgtgcacatagaaacctccttgtgataaaatcatagtacgttgtaagaagaaaaggaatgataagcttatgaatctggaaaatcagctagctctttcttattatcaggaaattgcagttttgaatgaagagcatcatatttcagttgttcagcatcgtgaaacgaagaagatatatgtaaaaaagcttctgaccgtttacaacggtgaagtttaccgacgtttgcagcagcttgatctggaagggattccaagaatcagggagtttttggaaggggaaggacaggcggtccttattgaggaatatatttcaggagatacccttcaggaaaaaatagatgcctgcagattaacggagaaggatatccgccgatatacaggagaactgtgcaggatcctgaacagtctgcatcagcaggagcctccgatgatccatagagatataaagccttctaacatcattataacaccagaagacagggtagtgctgattgattttaatgctgcgaaaagttatactccgggaaaagcagaggacaccatgctgatcgggacaaaaggctttgcggctccggaacagtatggttttggaagctcatccccgcttacggatatttacgggatgggggtgttgatccgggaactgacaggacggatccgtgtatatgaaaaggttccggagatttacgaaaaggtgatccagcggtgtacccagatgaacccagaggatcgttatcaatccgtacaggaactggctgctgctttggggaacactaagaatttcgcttgcagtagtggcgaaagccaggaacagaaggaaactcagtggagaaaatattgcccgccgggatttcggacacctgtattgtggaagaattttctggcatttgcaagttattttgtgctgattaatgtatctatggggattactgtggaaaagacttatggggcggcactttggatcaatcggatttgctttctgctttgtgctcttgtattggtttttgtaggcggaaattaccttggaatccagaagctgatgcccctatgcggcagtaaaaagaggagcgttcattaccttgggattgttcttctggatacgtgtctgatctttttattgttactactgttggagatggtcctcaggtatttttgagtaatcattttgtgttttacaagcaattcggaaagtgctatgatatcttcagaaaagaataaaggaggaattttgaggatgactcttgaaggtttaagaaaagatatggttgcagccatgaaagcaaaagataaaacaacaaaggatgcggtatcatctctggtttccgctgttaaaaaagctgctattgatgcaggatgcagagaggatgttccggagagtatggtagaccaggtgattcttaaggaattaaaaacagtaaaagaacagctggatacctgtccggaaagcagagaagacctgcatgcagagtatcaggcaagatatgatgtgatcgccaaatacgcaccacagcagatgggagcagaggagatccgtgcatatctggaagagaaattcgctgatcttcttgcaacaaagaataaaggccagatcatgaaaactgtaatgggtgatctgaaaggaaaagcagacggcaagctgatcaaccaggtggtggctgatatctgcaaataaaaccagacaaaacaacgaggccacgatttgcggcctcgttatattatttcaacaaataagagcgaatcacagctctttttttaattgccggaaatccccaagagctttccagccaattttcacaatctttttaatgttgatggaattagtaccgccttgtcttggtttaaaggaaatttcaataaatttcacatgttttttgtagtatacaaaataagtggtaagcatgatattgggaagattgaaatcagcaggcatctttttgatgaattctgcggtctggtttgctttcataagacgaaaaggagcattggcatcagaaacacggataccaaagatcatccgaagaagtaaacaaacaatattttccacaaatttcctggatttgccgtcgcctcgtacactgcgctggccgatcactgcatcatagctgttacgagctgcccaaaactgatggaattccttcgggttggtctggccgtcagaatctgtctggaagataaaatcagccccatttttgatggcgtaatcatatccgtaaagcaaagtaggaccatgtccgccgttaggcttggtaagaggggtgagaagcgggcgtgtcttggcgcaatcacacaggatctggtaggtattgtctttactgccgtcattgatgatcaccagtctggactgtccatcgccgttatatttttctacaatcggataccattcatcaatggtacgccgaatgttggtttcttcattataagccgggattactataaataatttatccatgaaattctccgtgtaatgtgtggcgaagctgccacctgttttgatgcttataggatactattttcatggccgtttgtaaatactggtgaactatgtagcctgcagatgatatgttacactctgcacagagtagattatgaataagagacggggactcttttttgtacttcatctgtgagccatccgatcagcaggcctgtgatcacaccagacaccagaagtgcgggtgcataatacaaaaggctggtattttccacaatgaccatggctacaagcagctgtcccacattgtgggtgacgcctcctgctacgctgatgactggaatggaaaaatctgagaattttttcataagtgtcatgacgataagactgagggctgcaccggccaggctataaagaatgctgaacatattgccaaaaagaaagccgatcaccaggatccgcactgcagataccaaggctgcttcttttaatgagtatctttccagaataaaaagaacacttaaattggccagaccaagcttaatgcccgggatcccggcgaaaaccgggatcagtgtttctacgtagccaaagataatggctacagctgtaaaaagccccagataggctgttttttgtttcatagattgcttcctttcatacaaagagaatcataacatggtccaaaagaaaatgcaatgaaaagttagaatactaaaatataaattagacatatataacaaaagttatggacatataaaatgaaagatgatacaattcacaagttggaaacataacaggtaaatagcaaaaggagcaaacagatttatgaaaaatcaaaatttctatatgcgggttctttgcctggtggtgatcattggtgcagtccttttttataattcaagaacccaggaaaaggaatatcagacacagaatgaggaactgaccaagcggatagatgcactggaaaagcagcagcaggaaatccttacagcacttcaggaaaactttgatgcacaggagaaggcaaaggcagaaagcgaaaagcagaaaacagaaacgacaaaaagcgaagaaaatgcagacagtacagaaaatgcagatggcacagaaaatacagacagtacagacaatatagaaaagccagatagtgcagacagcacagacacagcagatcaggtatataaggatggaacctgtacaggagatggtcagggatttggcggcaatatccaggtacagattaccattgcggatgataccttaaccgatattcaggtagtcagtgcagagaaagaagacagtgcgtatctttcgcagggaaaagcagtgattgcccgcatcctggaagcccagagcacagatgtagatactgtatccggtgctactttcagctctaccggtattttgatggcagtagaggatgccctgggaaaggcggaaaatcaatgaaaaagcgaataagaaaaattcggctgatcaggactgggatacagcttttgttctttatcctggcaccttctcttttttctactgcatttgcaggagtcagatccatcttcgattccgtttcgcagggaacaccggtagaatggaattcttttcttgatatcacagggatcctggtgcttgtaacgattttattcgggcgtcatttctgtggttatgcctgtgcttttggaagtcttggggatgctttatatgagaccttttcctggttctggatcaaagtcctgcacaggaaaaagaaaccggcttatccggaaaaagcggtttattttatgcagaagatcaaatatgtgatcctggcagctattttgctggcctgtgccaccggaacatacggaaagcttcagggtaccagtccctgggatgtattttccatgcttcgtgcaggaagactgccgggagcgtcctataaggttggaatcattcttcttgttctgatcatgataggaatgtgtacccaggaacggttcttctgccagttcttttgtcctatgggagctgtttttgccattcttcccattgtgcccggagcacttctgaaaagggacagggagaactgtccccagaaatgtggagcctgtaaaaaaagatgtcctgcgcatctggatattgacggtgatacgtccagatcaggggaatgcatctgctgtcatgcctgccaggctatttgtcccaagcagaacatccatacaggcgatgcataagggatgttaatatttgtaaaatactatgatgacatggaactaaagcatgagtcgagggtaattctatgtctgatggttagaaaaaacttacgaacgttctaaatgataaaaaaagttagataagactgattgaaaagaattgacatttttttctatacaatattatactaactaagcacggttagatgatactaatagatagatcagaaacaaatgagaaagaaatacatgagaaagagacaaataaaaaaagaaataaataaaaaagaaataaaccgaaaagcaaatccatatgggaaattcttgcttgcggcagtatgtgcagccgggacaatcgccctctgtcaggctgtatatgccgcagagcctgaattacatacagcaacagatctggccatggatacggtagttacagaaagcatttacaccaccggggaagatgtgaccggagagattggcaccctgcttcggaagatagaaagcgattggctttcctggactcaggaagattctatgatcgccaggatcaacgcaagtgaagggcagaccatggaagtaccggttcagctggcttcttatctggagaaagtaatgcagttaagtgagaacagtaacggtgcattggatcctactcttggaaaggtgatccgtttgtgggatattggcggcgaaaatcctcacattccggatgaaaatgaactgaaaaagcttctggcattaaccggttatgagaaagttcatctggaaggaaataagatcactttggatgaaggctgtactctggatcttggggcagtgggaaaaggaatcggctgtgcagagattacagattatctgcagaagcagcaaaagatcacggccggacttgtgaatcttggaggaagcagcgtgctgacttacggtacaaagccagatgggagtaaatggcagatcgctatcacagatccgagggatacagaaggggattatctgggagcagttgcccttgacggtggagaatttctttccacatccggagattatgaaaagtattttatggaagacggggtcagataccaccacattctggatcctgaaacaggatatcctgcaaataacggtgtgtgttctgtaaccgttgtgtgtgatgatgcagtggcagcagacggcctttccacagcctgttttatactgggcatggaaaagtcacagtcacttctggaaaaatacaatgcagaagcactttttgtagatgaagaccatcatgtgactatgaccgatgggatgaaagaacggtttcgtcttttaaaggacagctacacagtaaaagaattacagaccgattaaagaaatgatagatgattcccaaaacatttttggacgggatatctatagatgaaaaattataaactcagagaggagagaggttatgcataagtggaatgtattgaaaaaaacagcaccggttttcttaagcctggcagtggcagcaaccagcatgccaaccacaatcctggcagcagatgcatttggtgatggtaccgttgtagaaacagaggatgtttccgcagaagaagtgtcagaggatgatttggcagaagaagcatcaacggatgccagcgtagaagaggtgccggaggacactgcagatgtgcctgaagaggtaactgaggatgcagcttctgaggaggattttttgtttacatctgaagaagagactgtagaaaccgatactttagaggcagaggatgttgctgatggaggtgaggttcaggttgccggttatacctatccatggacaaaggttgcagatggctccgctgctcccacaggatacaaaaagattggtgattcaaacgtttactataaagtagatgaaagcaacactttattttcatggcgtgtttattatggtaagacaactttaagctatacagatttttataaaacagggtcctttgattccacagtttatgattcagtaacttcggctacaacgaaaaagaatcagctttttgtaaatgcagatgcaaccacacctgatgaaaatggatataagatcaatggtgtaaaaaatgtaagtgttaaggttggggataaggactatgtagaggcaaagattcttgaagcagcaggggaacttccctctgacggtgtatatgcaaaagcggcagggattgtattgaatgaaagcccttcagatgaagtggttcaatataaagcattaagctccagcggcacatacggaaaatggcagatagcagatgcagcgcagacaaaggtaacggatgcaacagcaacactaaaaacctcttcacgccggggagattatgtgatcaaggtcaatgagacaagcacaaaatatctccgcaattccaaagagggagattttgcggtagctgccaacgtacagggtgtgattctgaaaacaaagagtggtaagacagtaggccttcgccatttgcaggaaatctgggtaaagccatatgaactggcattttccaaagatgcaggtcttcagggagaaacgattacagagattacctatattattccggaaggtagatacgtatactcttttgccgatggcatctatgtaaagaaacaggctacagatgctatgaaagaagctgttacagcaacttttgaaaataagaacactgtaaaagtaacaggtctggataaattcaaaaatccaatggtttctgtttactatgtaacaggctccggaaaaaattccaagactacctacatggcagaggaaacagcagttacagtcggtgaggacggatcagcggcagtaacatttgcagatgagaaggtggcacaggctggcaaagagtacaccgtaaaagtgaccagtgatgattatgctgaccttaccactacagctataaggtctgaatcagatgaatggagttacatgtatgtaggccttacctggtctgagtactgggcaaacgaaggcgtatacatggcaggaagtacggagacaaatgctgagactgatgataaggatgaacatgacaaaggtgcatttgatacagttacaagagctactgtgaatcacggacttcacagaggaagtttccagtgtactacagttatttatacaacagacggaaaaaccttcccggttcaaagctggagtgcagacggcggcaccatgatccttacagacggaagcacggctgcttataaaagaggtgttattaccgatgctgaaggttcacatatcctgaaagagtatgatgtatatggtctgaaatatgtgcctgtaaaagtcaacaatgaggatctggaagcttttaaagcggcttacggaagcaagatcgtagagaatggcgcatccatgagcggcggctacggagaaatgaagctgagtgcttacaaagcaactgcaactgttacagagaatacaaatggattaaagacagctgttttacaggaaaatggaagctttgcattcagtgcaagaaacaatgcaggtacagagtccgggcttcaggatcaggcgttaaagacagcggatggactggtcgtaactgtaaaaccggcagatggaagctacggagaatttttaagagttgatcttaccggcaattatggtgatcttggtgcacatatgcaggcagtacgctgggattactatggcacaggtgaaacggttctcacatcttatggaacaaaattcgcagcagataactggatgcacaaaacaaacggaatccagcttggactgacaaattctcttcgctgccagcttccggaaggaacagacggaaccggaaaatgggtgattaccgtttatgcacttggatatgcagatacacaggttactgttaatgcagcagaggaaaatatagttaaggctatggccaatgctacagaagaggaaattgcatccgcaacatctgcagtaaatgcagcagaagcactgaaagaaagtgactataccccagagtcctgggctgctatgcagacagaattaggcgaactgaaagatgcacttaaaaaagcaaaacctaaggcaccagtattaaatgaagggatccagcacttaaatgcagcgatcgcagcacttgtaaaggcacctgtccctactgcagtgccggcacagccaactgccacaccaacgccttctgcagaaccaaccgtaacgccaataccttccgtagagccaacaaagacaccagcaccggaagtgaaaccttctcttactgttaagaaagctgtacttaacctgaagaccagaaagtccgcagctatcgtaccggtacttaccggaatcagcggaaatataacttataaatcaagcaacaaaaaggttgctgctgttaattccaagggtaaagttacagcgaagaaaacaggtaaagctgtgattactgtgaaatgcggaaattacaaaacaagggttactgtttacgtaaatgagaagctgaagctaaagaagtcttctgcagtgatcaaggtaaaaggaaaaacttctatcaaagcaactacaaatatttccggtaagatcacatacacttccagcaataagaagatcgcaaccgttacatccaagggtgttgtaaagggcgtaaaaaaaggaaaagcaaccattacagtaaaatgcaatggtgtatctaagaaatttaaggtgacagtaaaataacatgagtaaaaaatacagccattggggaaagcttgcaccagcggcggttgtaatagcagccattcttgtatccggaaagggcgatgaagtcctttccggtcaggaaactgcacagacacagatcgtgaaggcttcccagttggcaatctggaaaacggaacccgtttctgaaacggaaaatacaaagagccagacaggtacaaaaagtcagacaggcacaaaaagccggtctgacaaaacaagtaataagaggaatagtattaagaaggccagtcatacaagaccggcctcttcctcttccggggcagcggttggaggcggaatgggaactacccatacgcctaccacagcagttccgtcagacggttatcgggacggtacctatacaggaagcggcaccggctttggaggacagatttccgtacaggttatagttacaggaggaaagatcacagctgtgaatattgtaagtgcatccggagagacaggaagctatctttccaaagcgcagggcgtgatcagtaagattctttctgctcagaatccaaatgtggatgcagtaagcggagctacttattcttccaacgggatcatttctgctgttcagaatgccctttccaaagcagggaaaagcagctccagtacagatgatgccgcacaggaagaagaacatctaagtgaaaaggaaatgaaaaagaacctgtcacagatgctgtccgggcttgatgagggagcatcagacggttatgaagacggaacatatcagggaagctctcagggctttaacgggatcgttacggtaacggttaccatttcagatggcaggatcacccagatcatttccaaccacaaggatactccaagattcttccagaaggcatgggagggtatccagcccaagatcctggcaaatcagtctctggagggagtggatgcagtaagcggagccacctattcttccgcagggatcatgggcgcagtaaatgaagctcttagtaaagcaaggaaaagcgtggagattccctcacagccgataacagtaccggaggacgttccacttacccagccggatcaggatgatccggaacccacagctgtaccagcgcctacagccacaccaataccgtcagaaacaccgatgccaacgcctgccccggagccagaaaatccggaggttacaccaggagcggaagcaacgcctacaccttctgttctctataaggatggtatctatacaggacagtcctatggatacagcggtattgtcacagtaacggtaacggtttctggaggcaggatcacagctataaaccagactaacagtgattccatagaatattttggtgatgcatgggaaagcatttacccacagatcctggcaaaacaggaagcggaaggaatcgatacagtcagtggggcaactttttcatcagaaggtattctggatgctgttaagacagctcttgtccaggcaaaataaaataaagaggacttttgcccctcccaacatctttttataactgttttttcaccttgattattcggacaaaagtatttacaattaattcggatatactttttggggaaaaggagttgttacaatgagagtcactgtaaacatgaagaagacagcactgtggcttctggctgcagcgtctgtgtgggcatctgccggtctaccagtgcaggcacaggttcaggaaggaactgttcagaatgaggcggatgcagcaccggtcttagttcggaaaaaacagggcctggtccgggaaggcaggaattattgctattatgtaaaaggccagaaggtacgacgggtatggaagaagatccatggtcggaaatattactttggaaataatggcaatgcagcaaccggatctgtacagatcaagggtacctactatattttcaacgaaaagggccggcttctggcgccaaggcgtaatgccattatgaaggtaaagaacgcatactattatgtgaagccttcaggaacccctgttaccggctggaatgtggtaaagggaaagctgtattattcctacaggaatggtaaatgtgcagccggcaggactgttggggagattcgcttcaccaggaacggatatgccagggacgatattaataccaggctgaagatcaaatgtatggaagtaattgacaaagtgaccacaccatctgcttcgaccaatacaaagctgaggcagtgctggtattatctgaatacgatccgtttccagtcaaataaatttcctgttacaagtcagaagaactggccaaaatattgtgcctacgatcttctggataccatgtgcggcaactgttatgggtttgccaatgcatttgcagcacttgcaaaggaactgggatataagccttatgtgatcgagctgcccatgactcattgctgggttctgatcaatggcggatactgggataatatggggaataagatgggggtacctaattctccaaaccgttatacttccaatcagatttataaattttaaagaaaaatggcactaattgagaaaaataactcaattggtgccatttccttttggggcgaaaagcagtagaataattggagttagataatactaacaaaaaaggaggaaggagattcccaaagggaagaaaaagaagttatgtttttggaaatacataatctgaaaaaaagctatggagatggagagagcaggacagaggttcttcgcggaattgatttttctgttgcaaaaggggaaatctgtgtgttgcttgggccatccggatcaggaaagtcaacactgttgaatatcatcggtggaatcgatgatgcagatgaggggtatatttctattgaaggcgaaaagactgcagatatgaatgaaaagacccttacaaaatacagaagaaagcatctgggttatgtgtttcagatgtacaatctgatcccgaacctgaatgtaaaggaaaatgtggaggtaggggcctacttaagtgataaggcactggatatcgatgatcttctgaaaacactggggctttatgaacacagacacaagctgcccaatcagctttccggtggacagcagcaaaggactgctattggaagagctattgtaaaaaatccggatatcctgctttgtgacgagcccaccggtgccctggattataatacgtctaaggagatcctgaagctgatccaggaggtgaaccggaaatatggcaatacggtgatcatggtaacacataacgatgccatcaagaatatggcagaccgtgtgatcaagctcagggacggccagatccggaaaaactatgtgaatgaaaccaagatctctgcggaagatcttgactggtaaggcggtgaaacgatgaaaaatccattattgaaacgtcttccaaaagaattaaaggcagatctggggaaatacctggtgatctttctttttatgacactgaccattggatttgtgtcaggatttctggtagccggctccagtatgtcagctgcctacgatgaaagctttgaaaaatataatatagaagatggaaattttacactgtcttcaaaggcttcccaggcacaactggaaaggttggaaaaggaaggcgtcaggattgaagaaagcttctttgtagaagaagatgcggatgcagattctgatgggaaggcagatggaacgatgcggatctacaagaaccggacaggcatgaatctcatctgtgtaatgaagggagagcttccggaggcagagaatgagatcgccattgatcgtatgtatgcagataataaccatctgtctgtaggggattccataaagatcgccgataaggatataaagatcacgggactggtggctttgtccgattacagctgccttttttctgataacagcgatatgatgtttgatgctgtaaagttcggggttgctattatgacagattccggctttgacagcctgggaaccactcatctttcttatcggtattcctggcagtatgataaggcaccgaagaacgaaacagaagaaaaaaatatgtctgaggattttatgaaggcccttgccagaaatgtttctcttacagattatatcccgcagtattctaatcaggcgatccattttgcaggggatgatattggcggtgaccagactatgatggaggttctgctttatatcctgatcgtaatcatggcctttgtatttgctgtcactactaataatacgatcacgaaagaggcttctgtgatcggtactttaagagcctcaggatataccagaggagaactgctgaagcactatattgcgttgccgatccttgtaacactggcagctgctgtgatcggaaatatattaggctatacttatttaaaagatatctgtgcagatgtgtattacggaagctacagccttcctacctatgtgacacggtggaatggaaaggcatttgtgctcaccacagtagtgcctattgtgctgatgctggtgatcaatattatgctgatctaccgaaagctgactctctccccgcttaaatttctccgcagggatttaagcagatccaaaaagaaaaaggcagtacgcctgccggcattcagttttatgaaccggtttcgtatccgcattatcttacagaataaatcaggctatattaccttatttatcggaattctgtttgccaatattctgcttctgtttggtatgatgatgactccgcttctgtcaaattatcagaaggagatcatggataacatgatcgcaaagtatcagtacatgttaaatgtaccggaggacgaagaggatgaagaagcggacgcagattcagaagaaaataagcttacattgatgggcgttctgcagaaaatcctgactccgtccctggaaacaaagacagaaggggctgagaaattctgtgcttattccctgaaaaacatgccgaagaatcgtgatggagagagcattaccgtatacggtatacaggacggcagccagtatgtagaccttgattttaaggatgaaggggtatatctgtctgacggattggctgaaaaatacaatatccatatcggggatgaattaacattaaaagagccctatgcagacgatacctatacatttcaggtagcaggaacctatgattatccagctgcactggcagtgttcatgcctattcaggagtacaggggaaattttgataaatcagaagattatttcaatggatatttctcagatgaagagatcaaagatattgacgaacggtatattgccacaaccattacagaggatgatctgactaaggtatccagacagctgactgtgtccatgggaagtatgttctacctggtcaatatatttgctgttatactttttgcaatcttgatctatctgttgacaaaactgatcatagagaaaaacagtgcatccatatccatggtcaaaattctgggctatgagaataaagagattatcagcctgtatcttacgtcaactacctgggtggttatattttccataattctcagtctggcagctgcttcctggatcatgactgccatttacaaggtgatcatgatggatttcagcggctggctgacattgtatctggatcctgtgatctatccggaaatggtagcaatggggcttggtgtttatggttttgtagctgccatgcaatacaggaaaataaagaagatccctatggaccaggcattaaagaatgtggaataagcaggattacgg

SEQ ID NO: 71 - DNA, 48716 bp, Unknown
  gut microbiota DNA sequence
cttacgtcaaaaaggagccattacaacagggttgccaatgagcttcttatgatgtttcgttccagaaaaaaattctccagggaagtttctctttatgaaccaatcggaatggataaggaaggaaacgagatcagccttttagatgtgattgaaagtcctcttacagatgtggtagaagattattccatacgtgaagatttaaagcttctttttcagtccatagataaggttttaaacactcgggaataccaggtgatttgctgccgtttcggtcttttcggccagcaggaactgacacagaaggaggttgccagacagatgggcatcagccgttcttatgtttcccgcattgaaaaaaatgccctgaccaagcttcggaaattgttcccagccgggcaaaggcatttttcataaacggcaactgctggacattcacagttgtcgtaaatatgtctattattcttcttctcttcgcagaatatcatactcctggatatctgccccaagatcgatccacagcttctgctgggcatgaggtgcactttccattgatgtgccatcacagtcatagatcccacggacagttacatccagattccgtccatccggcttcatgatctgtatggtttcacctacagaaaacttatttctctgagtgatctggatacgaccactttcatcaacagcctctgcaaagcccagataagtaaaattcttctcataggtattatctgtataaatctgggtattgctgtctggcttcccataaaaaaacccggttgtaaactgacgataagtacaattggaaatctgctcctggtaccaaggcatatttgcctgatacttctcaggtgattccatataatcatcaatggctttccgataggtgcgggcaaccgtggctacatacaaagccgttttcatcctgccttcgatcttcagactgtcaatgccgctggtcatgatatcatccatatgctctaccatgcaaagatccttggaattaaaaatataagtgcctctttcattttcataaacaggcatatactcgcctgggcgtttctcctctacaatggaatatttccatctgcagggatgagtgcaggctccccggttggcatctcttcccaccatataattgctgagaaggcagcgtccggaataagagatacacattgccccatggacaaaggtttcaatctccagatcttccgggatatgtgcccggatctgacgaatctcttccagagacagctcccttgctgtaactacacgctttgctccaagcctgtgccagaaaaggaaggtttcataattggtattattggcctgggtactgatatggcattcaatctcagggcagatctccctggcataagtaaatatacctggatctgcaatgatcaatccgtccggtttcaattcttttaattcttttaaatattcccgcactccttccaggtcataattatgtgccaggatattcaccgtaacatatacttttaccccgtgctcatgggcaaaagcaatcccctgaaacatatcttcatgagaaaagttctttgcttttgcacgaagtccgaaagcttctccaccgatatatactgcatcagccccgaaaataaccgcaatcttcaacacctccagactgctggctggaacaagcagttcaggtctttttaatggttctcccattctatttcctccttcttcacacttacagtcactccgtctcccaggggaagaatggatgtttccagtaatggatcatgtttcagctggtacagatattcccgcattcttttgtagatcgtccggtcacgcctttccacaatgtaatgggactctataagatttccatcctgcagcacattgtcagacaagagaacccctcctttcttaagcaggcgaatcacatccggaagccagtggatgtactgtccctttgcagcatccataaagatcaggtcataagaaccagaaagaccggccagtatctttgttgcgtccccttccagaagggtgatctttgactcctgcccggcttttctgaaattctcctttgccaggggaattcttttttcgtaattttctatagtagtaatctgtacatctgcaggaccatattcacacataagaagtgtggagaagccaatggctgtccccacctcaagaatgcgcttcggtctttgcagtgccagaagcatctttatgaagctttgcatttccctgcggatcaccggaaccctttcctgcaaagcatactgctccaattcttcaagaaatggtgtattcccggtatccagggaattaataaaggtccgcattctctcttctacgatcacgaattgcttaccccttcctgctctgtatctcctgcaaggatccccatgatcctggtaggtgtatatgctgtactgagcaaatatgtaccggctttcagctttcctttgtaattggataatttctcctgtacatagaacaccttggcttccttgatcagtcctttggcttccagaatctctccgatctgatattcagaagatccttctgggatcacaacagttacttcctgtccatccccagggctcattgcctgttggttaaatatgtcatatccaaactgataggtagtctttcctgcccagaatataaacactgcaacacatacgtacaatgcgatccggaacactccgcctgcaaaaaccagtccggcttttcctatcttgtctctggtatttcccattacaacctcctttacataggctttcctgtggccatctgtcagaactccggaatctgtatatggattccttctgtcacacggatacagatcttctgcatcagcctgcataaggcaagctctgcatccaggtatgcattcacctgcggattcctgcgaagctctttggactcccttgacagctgttctgccacctggaacagatcatcccttccggtctcattctgcatccgaaaattattactgcggaattgaaaaacccttgccttcaaatccggatcctgatccagaagttcttcctgttttttgtattcctcatattccctgctgtttttaacagcatccagcagggaatcgatcttttcttcaattactttcgtatccatttatttcttttgtacctccctggaggctacgcctccataataatgggcaggatcataggacttctctttgtcctcttccaaacataatcgcttaatgcatctttcacatttgtcttgatcttgctccagtctgtgatattcttctccagacattcatccagcgcattctccactgtctctctggcatgatccatcaagtcctcagattccctcacataaacaaatcctcttgaaacaatatccggtcctgcaagtactacattgctgtgacgctcaagtgtcataacaacgatcatgatcccgtcttctgcaagatgctgacggtcacggagcacaatattccctacatcacctacaccaagtccatccacaaggatcgcaccagtatgcaccttgccagttacttctgcatcctgaccatccatctcaagcacacagccggatgaaagaatgaatatattctcatcagaatatcccagttcttctgcaacatgcttctgtgcagtcaaatggcggtactcaccatgtacaggaatggcatactttggacgaacaagggaataaagaagcttgatctcttcctggcaggcatgtccggaaacatgggcatcctggaaaataacctttgcccccttcatagaaagctcattgattactttggatacagctttctcattgccagggatagggtttgagctgaaaataatcgtatcattaggctttatagtgatcttcttatggatattggctgccatacgggaaagcgctgccatagactctccctgacttccagtagtgataagtgctacctgctcatccggataattctttacctgatcgatctcgatcaaggtctgatccggtacccgaagatatcccagttctgcagcagtggtgataacatttaccatgctgcgtccttcaactgccactttcctgccaaaccggtatgcagtattaataatctgctgtacacgatctacgttggacgcaaaagtggcaataatgatcctggaagatttatgctcattaaacaaattgtcaaaaacatgacccactgtccgctcagacatggtaaatcccggacgctctgcattggtactgtcgcacatcagtgccagtactccctttctgccaatttcggcaaaacgctgcaggtcaatggcatctccgaatacaggtgtataatccaccttaaagtctccggtgtggacaacaatgcctaccggtgagtagatagccagagctgatgcatcctggatactgtggtttgttttaataaattcaatagaaaaatcgccaagattgataacctgtccatgctttacttcttttaatttagttgtcctggtaagattgtgctctttcagcttgttggcgatcagtgccagggtcagctttgtggaatagatcggcacatttacatcccggagtacataaggcaatgccccgatatgatcctcatgcccatgggtgatcacaaatcctttaaccttggaaatattatccttcaaataagtcacatccgggatcaccaggtcgatacccagcatatcatcctcagggaaagcaagaccgcagtccactactacaatgctgtcatcatattcaaaagctgtaatattcataccgatctgctcaagtcctcccagcgggatgatctttagcttcttacctgtataaccggactttctgcctcttttcgccacaccctttacaggattcttgggtagctgcctggatggcttttctgccagcttttctgccgactttagtgatggctttacaactgcctttgcttctggtttcacagcagcttttacagccggcttgcctgtacttttcgaattctgcctgttatatcctgattttgatttgtatttataattataatttttctgttttgtatttgtggactgttttttggttccccacatagcagccggtgactgcccgctgctgttcctattctcattgttttcgcttttcaatcgcttcgtcctccattttatgcttcaaggtccacgtcatctaacatttgggcaaagactctggatatagcttcaagctccgaatcatcctggatcatctcataacatgcttcctgactgtctttctcagagatatccttcaaaatataggcatttgcttcatcatcctgcgaatcagaaacaaggagataggtgatccctgcaattgtagtctgctcttcaacataaaattctacgattccgtcctcggactgaaatttgatcttttccatcagatattaacctctctcactgcatcttcccgtccgtatgcgtccaggtaactctgcaaaataaaaatagccgccaactcatccagatactgtttgcggttctcacgccttactcctgattccattaatgtacggttcgcttctactgtagtcagtctttcgtcccacataacaacaggcaggcctgtacgtctctccagcatttctttaaactccagagatttcaaagcccgctctcctactgtattattcatgttcttaggatatccaagtacaatccgttccacctggtaatcctccacaagtttctcgatctgggcaagtgtctggcgaagcttgttctcctgcttgcgccagatcgtactcacaccctgtgctgttatgcctaacggatcactcactgcaactcccacagtcttagaaccgtaatctaatcccagaattctcataatcagccttcccaggatctgttcttaatatactcggtaagaagctcttctaccagttcgtcacgttccactttcatgatcatgcttctggctcccttatgactggtgatataagtgggatcaccagacataatataaccaacgatctgattcacaggattgtatcccttttcttccatcgcattgtacaccagatccagaatctccttaacttccagatcctggtccggttttgaacggaaatactgtgtacttcccagattgttctctgccattgtctctcacgtccttaaaattatttctattttataataatataattctcagtaaaatacaatcaaaactttccaaggagcatatgcctgtccaaaaagtcctctgcctgaagtgtgataatatcatttatgccataccctttggatttctccactgccacctttacatactccttactgtgtcccagataatattctctgccatttacctgaatttcttcttccagaagcacttccagcttctgcccaagaagagatctttcatattcagccgcatgaatatgatgcatctgaagcatctgatcactgcgtcctgcttttactggctccgggatctgtccttccatagctgctgccttagtgccctgacgcatggaatatttaaaaatatgggtttcataaaaatggatgctgtccacaaaattctttgactgtaaaaactcttcttctgtctccattggaaaacctacgatcacatctgtggtcagcgcaggattggaaaaatactcccgcaaaagcttacacttctgcctgtattcatcacttctgtatctccggttcatacgctgaagcgttgcatcacagccgctttgtaaggaaagatgaaaatggggacaaattttcgaaaggccagataaagtctgtgcaaactcccttgttacgatcccaggctccagggatcccaggcggatccgtcggatcccgtcgatctggtgcactttcagtatcaaagacagaagggtttctttttcttcttcctgaaaatccacaccataggaagataaatggatcccggtaagcaccacttccttgtatcctgcatccgccagtgcctgcacttccttcaacacatgctctgctttcctgctgcggactctgcctcttgcataaggaatgatacaataggtacagaactgattgcatccatcctgtactttgatataagcacgcacatgctcagctgttttctggatattcaattcttcgtattcttttgtctggttgattttgatcacatgggcagccttttctctgacttcctggtattcctccagtgcctgtacaatgttctttttctggttatttccaaggatcagatccacagccggatccttatccagctttccctgatcagtctgcacataacacccggtagccactaccactgcttctggattcattttttttgctttgtgaagcatctgtcttgatttacggtctgcaatattggtaacagtgcatgtattgatcacataaacatctgccccaggttcaaaaggtacgatttcatacccggcctgttccaaaagctgctgcatggcctctacctcataggcatttaccttgcatcccaggttatgcaatgctgcttttttcttcatattttccgattcctactttcctttcatgaatgctcacaggcattcttactgcaagatgtgcatcatacaacgtatatcttgcttctgcagcgtttttattttttatacaatttcactaattctttcgattttttttatctcttttcaccttgacttttagaatatgcacaggtaagatgaaatctgtaagataacgtaacaattcagccggcagcatcctgtcagttactgaaccgttacaaataacaattatcccaagggaggttattaaaatgaaaacagtaaaaatctcacttaactctattgacaaggtgaaagcattcgttaatgaaatcagcaaatttgactgtgactttgatttagtatccggcagatatgttattgacgccaagtcaatcatgggtatcttcagccttgacttatccaagcctatcgacctgaacatccacgctgacggatccgcacttgacggtgtaatggatattatccagaaatatactgtagaataattttcatcatcaccagccatctgaggaggaactgtacacagttcctctttttttatttttatcttatctcaatcacctctgtggttcttaatgcctcatccatcaactcctggatcttctcagaaagcttctcctctgaacggctgatcaccttcagatttggctttgttaccggatgctttgccacaaaaatggtacagcagtcttcataaggaaggacagaagtatcgtatgtaccgatctcccaggctctttccacgatctcctgcttgtcaaatccaatcacaggtctgtatacaggcagtgtacacacctcattggtggcagcaagactctgcagggtctgactggctacctgaccgatgctctctcctgtgatcaatcccagacaattgtccttcttagcaaaatgctctgcgatcctcatcatataccggcgcatgataatggtcagctcatcatgtggacactgatcataaatatataattggatatctgtaaagtttactacatggaggcggataggaccgctgtattttgccaccaactttgccagatccacaaccttctgctttgcacgctcactggtgtatggcggagcatggaaatagacagcctcaatctttactccacgctttgcgatcatatatcctgctaccggactgtcaataccgccggaaagcagaagcattgccttgccattggttccaaccggcataccgcccggtcccttgatagcctgggaataaacatagatcttctcacggatctccacggaaagtgtaagcgcaggctcatgtacatccacccttgcctctggaaaagcatccagaatactgccgccaagctttgcacttacctccatagatggaataggataagatttctttgcccttcttgtatagaccttaaaagtgcctgcatatcctggatggcaggcctgcatataagaaaccacatcctttgccatctggtcaaagccctgatcttcataaatcacaacagggcagatatatacgatgccaaatacccttttcaaagctgccactgtatcttcataatcatattcttccgggcagaatacataaatgcgtccctgctccttaacaacactaaaatccccttctactgcagaaagggcaatgttcatctgctttacaagggcatcctcaaacaggtatctgttctttcccttgatggcaatctctgcatacttgatcaaaaatgcatgatatatcattaattctcctcctaatgcctggaatatctgcgaagtacaggaaccacttcccgaaggacttccagacagtaatcaatttcttcaaatgtattttcttctgaaaagctgaaccgaagtgtactctctttctgggagaccggcattcccatagcagccaaagtacctgctgctttacgtttatggcttgagcaggcgcttcctgctgaaacatagattccccggtcttccagtgtatgaagcagtacttcgcttctaataccaagaaagctggcacttaagatctgtggtgccccttcccgtaatcccataccattcaggcatacatcatccagctttaaaagcccctctgccaagtattccttcagctggtaaagatgctccctgttttcctccaaatggtcataaaccatctgtgcagctacaccaagacctgcgatccccggtacattgtctgtaccggaacgcatcccatcctgctgtccgccgccaaggatctggggctgtatcttcgctttctcgttgatatacaaaaaaccaacccccttgggtccgtgcagcttatgactgcttacagacaacagatcaatccctgtctttttaggatggatggtatattttccaaatgcctggatagcatccacatggtacaaagccttagggcttttttcatggacaagtgctccgatcttttccacaggcatcactgcacccacttcattattcacatacatggtagaaacaaggatcgtatccggacgaagtgcttcttccaaggctttcatatctaccacacctgtacgatctacaggaaggactgtaacttcatagcccatttgcgccagcctttccattggctgccctactgctgcatgctccactgctgtagtgatcacgtgttttccacttcttgcattagcctgggctgccccaaacaaggcaagattattgctttctgtcccaccggatgtaaaaaagatctctttttcctttactttcaggatccttgcaaggatctcctttgtatcgcggatgtatttttctgcttccacacccttctgatgcatggctgaagggttgccaaaatcctctgtcattgtttttaccacgatctgtgctacctgaggatagcatctggttgtggctgaattatcaaaatatgcttccatcttatctttcctccaactggaacatcagtactgacaggatcgccattcctgctgtctctgtacgcaggatcctgtgccccagtgtgatctgtcttgctccatgttccatggcaagctggacctcttctttttcaagaccgccttcaggaccaatgaatatccctacgctcatccctggctttacttgagacagaatctgtcgtgtttcttccattcccttagcattctcatacggaataagacaaagatccatctgcccggcaaaatccaaagcttctttgaaggacattaccggctctacctttggaacgatcatccttctcgactgctttgcaccaccttctgcgatctgctgccatctttgctgtttcttctgggctttcttggcatcaagccgtaccacacaccgtttcatctctaccgggataatggaataagccccaagctccactgctttctgcacgatcagatccatcttatctcctttgggaatcccctggaaaagatacagccgggttggaagttcataatccggtctggaaatataataaatcttaagttctatctgttccggtgaaagggattggatgctgcaataatattccttttcgccccctgcactgatccaaagttcttcaccttcccgcatacggagaacattccggatatggttcacatcatccccacagatcaggatctgtcctgcagcttcatctacctgtccaggctctacaaaaaatctctgcatgcttattcctttcttgctgtcacacatacccactcaccctgatgggtgatctcttccaccaaaagaccggcagctttcacagcctgtaccaccgtgttctctttcacatccagaatccctgatgttacataataagcgccctttttcatatggcttaccacttctggtgtcagagcaaccaatacatctgccaggatattggctgttacaagatcatacttctcgtagcctgcctgatcctggatcttcttatcatcaataatattaccgatcatcatatcaaaggcatcatccgggatcccattggcttctttattctctgcgactgcaggaactgcacagggatccagatccgtgccaactacatgggctgctcccagcttcaatcctacaatgccaagaataccgcttcctgttcctacatccagcatctgtgtatctttatggactaactttttcagctggcggatcaccagctgggtcgtctcatgcataccagtgccaaaagcagtgcccggatcgatatgaaggatcattttccctttatcctcttctttaacctcttcccaggaaggtacgatcagaatatcatctacataaaactgatggaagtattctttccagttattgatccagtctttatcctctgtctgggactgttcaatactgccctctccaatatccatataagagctgacctcatccagtacctggcgtacattttgcagtacttcttctatatcctcatcttcttcaagataaaaattcaggtatgcgatcccgtcatcctctggacaatcaggcataatatctacaaacatctgtgctttatcttcatctgtaagaggctgcttgtcctggatctccacaccctggattcccacatccgcaagagctgaaatgatcacatcctctgcctctgtttttgtcttaatggtaaaacgattccacttcatctaaatttccttctcctttccaaatcttgtgatttaacacctcaaaaaatcccatcagcttctggtaacgctgctttttactgtaaaatctccagaatatttccacaagtgccactcctaccacagcatccacaatataatgctgcttcaatacctgggtggaaacaatgatcagtgatgcaaatacaaaggaaaatctctgataccacacaggaatctccctggctcccttaagtccacgataacacatccagcttacataacaatggatggaagggaaaagattagatggatgcacacctccatccatagcatacacaatacccaggatcttttcagaaatagtgccatctgtcagctccggtcggatattggtagtagggattactaggaataaaataaagcatgtcagatgaatggtcaggtctgtagccacaaatctgtaaaatgtttttttcccccttcttgcagacagaagatatccaattgcccagaaaggaaatgccaggatataaaaccacacaaaaaatggaaccagaggcacagcccggtcaaatcccatggtaaagtcgaaatgatgcctgtttgcagtaagaagatcacttccccagtagatcaggcaattagctgccacgatagtcaaaagcgggagaaccgcccatctgggtacatatttatcaagaaattctttccattttgctttttctttcaaaaccgacgactccttttctatattaggtctaacccttaatatacaataagacacaaaaaaagaaaagaggtgaatccctcttttctcgtatttctcaccatcaaacctttgttttactcttcaaaagtctcttttaatttgtccatgaagctttttttcttcttttctgatccatcccctttggattcagcaggacggttgccgcaagcttcatcaaatctgcgaagggcttccttggcctcttcattcaggcctgtaggaacctgaaccaccagggtaacataatgatcaccacgtatgttcttattccgcagggaaggaactcctttgcctttcaggcggatcctggtgtctgtctgtgtgccgggcttcacagtatataccacatctccgtccacagtgctgatcttcacatctccgcccaatgctgcctgagcataagtaataggagctgtggaaaaaatattcatatcctgtctctggaaaataggatgacgagccacgttcacttcaacaagaagatctcctcttggtcctccgtttactcctggctcacccttctcacggatacggatgctctgtccattgtcaatacctgccggtacggacacctggatcttcttcctgctggaagtataaccggttccccgacaagcggaacacttttctttgatgatctttccagttccatggcagtccggacaggtctgtacattacgcaccatgccaaacatggactgctgggtatagacgatctgaccttccccgttacatcttggacaggtaaccggagatgtacccggtttggctcctgtgccgtggcaggtagtgcattcatcttttaatgtgatctccagctccttatcacatccgaaaacagcttcctcaaatgtaatattgactcttgcacggagattggctccctttgtaggcccgttattcggtcttctcctgcttccgcctccaaacagatcgccaaatatgtccccaaaaatatctcccatgtctgaacctgaaaaatcaaatccgccaaagccaccggctccaccgccgccattttcaaaggctgcatgcccgaactgatcatactgttttcgtttcgcaggatcacttaacacgctgtaggcttctgtggcttctttaaattttgcttcagcttctttgtctcccgggtttacatccggatgatacttcttggctaactgtcgatatgcttttttcagtgctgcatcatccgcattcctgtcaacaccaagaacctcgtagtaatctcttttatcagccatagtctcttttccctaatataattatttagaaccttaacatcggctgccacttctatttcaaagcagcagccgtcataacagtcactttatttatgctgccgtctgtgctattaaaaacagacagctgctattttacacctctttgtagtcagcgtcaactacatcatcaccatatccggcttcattgctgcctgtagctccgccctgggatgcgcctcccatatccgggcctgctcctgcagctccaccctgtggattctgtgactcatacatctttgcaaaaagcttctgagcactttccatcatcttctcctgtgcagctttgatatcagctacctgagaatctgtaacttcatcaggatttgtgcattttgcaaggatatctttcagggcattcagatcagactcgactgctgccttatcattggcatcgatcttatctcctgcttctttcagggcattctcaacttggaataccatggaatctgcattgttctttgtatcgattgcttctttacgtttcttatcctgtgcctcaaactcagcagcttctttcactgccttgtcgatatctgactcggacatattagatccagctgtaatggtaatgtgctgctctttgcctgtaccaagatcttttgcagatacatttacaataccattggcatcaatatcaaatgtaacctcgatctgcggaacaccacgacgtgctggcggaataccatccagacggaactgtccaagggatttgttgtcttttgcgaactgacgctcaccctgtactacgttaatgtctacggcagtctgattatctgctgctgtagagaagatctggctcttctttgtaggaatggttgtatttctctcgatcagtcttgtagcaataccacccattgtctcaatagaaagtgacagcggagtaacatccagaagaaggatatcacctgcgccagcctctcctgcaagcttaccaccctgtacagaagcaccaagtgcaacacactcatccgggttaagagatttgcttggctccttgccagtcagctgacgaaccttatcctgaacagcagggatacgtgtagatccaccaaccagaagtacctgaccaagctcagatgctgtaaggccagcatctgaaagtgcacggcgaaccggctctgcagtcttctcaaccagatcatgtgtcagttcatcgaatttagctcttgtaaggttcatatcgaaatgctttggaccttctgctgtagctgtaatgaacggcaggttgatattggttgttgttgcagaagaaagctctttctttgctttctcagctgcttctttcagtctctgaagtgccattttatcgttgcttaaatcaacaccctcgttcttcttgaactcggaaagcatataatctgtgattctctggtcgaagtcatcaccaccaagacggttattacctgctgtggaaagaacctcgataacaccatcgccgatctcaatgatagaaacatcaaatgtaccaccaccaaggtcatataccatgatcttctgctctttttcattatcaagaccataagcaagagctgctgctgtaggctcgttgataatacgttttacatcaagacctgcgatcttacctgcatccttggtagcctgacgctgtgcatcattgaaatatgctggaactgtgatcaccgcctctgttacaggctcacctaagtatccttctgcatcttttttcagcttctgaaggatcatagcggaaatctcctgtggagaatatttcttgccatcaatatttacacgataatctgtacccatctctctcttaatggaagagattgtcttttctgcatttgttacagcctgacgttttgcaggctcacctaccagacgctcacctgtctttgtaaatgcaacaacagacggtgttgttctggatccttctgtatttgcaataacggtaggttttccaccttccataactgctacacaactgtttgtagtacctaaatcaataccaataatcttactcatgataattccctcctgattaatttgcaactttaaccatactgtgtcttacaacaaaatctttataggtatatcccttctggaatacttctactacttcattagtacctgcattttcatcctctacatgcatcactgcattatggaggttcggatcaaactctttgcctttggcctcgatctccttaacacccatctcatcaagagcggtcatcaactgtttgtagatcatcttcatgccatctacaaaagcatctccctctggagcctgtgcaagtcctctttcaaaattatccacaacaggcaggatcttttcaacaatatctcttgctccgatcacatacatgctggccttttctttttccgttcttttacggaaattatcaaactcagccatgtttctctttaaacgatcggtaagctcttctacctgctgttcaaatttatcttttttcttttttccgaagaaagaagtctttgtcttttcttccggtttggcatcttttgtttctggctcttctgatgcttcagcctctggaacttctttttcctcttcttctttggaagattctttctctgtatcctcagcctcagctgctgtctcttcttcgctgccgtcagtcaccggaatctcaactgtttcttctgtagcttcggtttctttctttatatctgacacgctgtcaaccgcctttctatgttttcttatttactgcttcatcaagatgaaccttaagcttcttcaagctatccacaacattctcataatccatacgcttaggtccgatgataccgatggttccatgcatcccattgcccaactcataagaagcagtcacaacactgcaatccttcatggtctgaatgggaacctcatcaccgatgtacacctgaacacctgtgctttcctgatcacccatgctctcacgaaccatatctgccaattccttcttatcctcgaaagtggagatcagctcgcttgctctggacttgtcagccagctccggatatttaaaaatattggtggttcctgatgtatatacttccaaatcttcctcatccacctgaatggtggctgccactgcgtctaacacggtagctaccacaccgctgtgggttcctgcctgctccttcagtctggcgatcataccaagattgatatcctggataggaactccgttcaggttggtattcagaagaaggtttaatttcagaatagtctggtcatccatctcttcatccagatcaatgatctgattgcggatcacattgccttcacaaacaacaactgcgatcagctggtgatcactgactctggaaagctgaatgaatttcaatcggcttccgctgtactgtggaaccgtgatcatagtggcataattagtattggctgccaaaaccttggcaaccttctttaatactttatccatcttatccgtgttctctatcatcatctcacggatctctgcgatctctgattccttttccctggtcagttcatctacatagagacgatagcctttatcagatggaatccttcctgcagatgtatgaggctgtacgatatatcccatatcggtcaggtctgacatctcattccggatggttgctgaacttacattcagatctggatatttggaaattgtcctggaacctaccggctcacctgtttccatgtatgttttgatgattgctttcagtattttctttttgcgctcatctaatacgtcatccatgaatgtttgctcctttctccatctgtttctgttagcactcaacataatggagtgctaacatttatggtcttaagatacacctgttgtaaaagtttgtcaatattttttacaaaatatttgtgtgaaaatttggtgatgatttttcctgattgagaaatgattgtaaacggcttataatatagttactcaatataaaaaaaggaaaacactacaatggattataaaaaacatctgacctattttacaggactggctatcgggcttctgactcttttactggctttatttctttctcctgctgttccatgctcagccggcactgcttctgtcacttggcgcattacccagtacggcgatgaccatgccggaaagcagtccatgttctataccatcaagggcagtaacggcaaactgatcgtagtagatggtggctggacagatcaggaggcctttgtccgtaagaccatccaaagtctgggcagcaaagttgatctgtggatcatcactcacccgcatccggatcatgccggtgcttttatcaaaatcttttcttctccaggagatatccagattcgaaaagtgatcgctcctaagatcaatgacagtcgctaccgtaaatttaaacacagctgggatgaatatcctgtgtttcagcagtttatgaaattaatgtgcggcacctccaaaatccactggaaaggagcaggtgacagcttccgtttttccggactgaaatttcagtttttcaacggttacagcaacacccttaccaataccaccaaagacatctgcaatggttcctccctggtatttaaagtatccggcaggaaaaccagcatgctgttcacaggagatattctcacaaaggtaggcagacggctgatcagtacatataagaagcagctaaaatccacctttctgcaggcgccgcaccacggcaataatacaggtcgttattccttctataaatatatcggtgctgatatcacttttgtggatgcccctgcttttctccggacttatcctgcagtagcccgtaatcttcaaaatataaaagcacttggcggacaggtatatacctataacagttccaggcgaagcgttatcattcactgaaaattgcaggaagatttgggatttcctgtaagatcacaaaatgaccggtcagatgtgtttacacctaccggtcattttcataagtttttttataagattttccacttctttcagattcagggagattaaatcccctggaatggtattccctgctgtaccgctgacatttccaaaacgcagctgccttcctcacataaaagcccatatagcacaccggatagcttaattccataaatctcaagagattcatccctccttacataggtttattatctattttatctgtggttttcctttcggtaaacgcagtctcttttgaatttctttcactctgatttgttttttctgataatcaaaactcttttttctaaaccatttttcacatatataaattacgcagaatccttcacagaatccttaaacaatctttgccctttatttccacacagggatatagtataatttggatgtaaaaagttgcattcaaaagaatgattactcatctgatacaagaaaggtataaatatgaaacagacacagatagtggctctttttatccttggggtattctatatcgcctattttaccaaaatgattttgcaacaccgaaatggtataaaaacagaccagattggtaaaggcagcaaaccccgaaagttacttgtgattgaaatactgatgaagattgcaacctactctgtagttgcagtagaaataatcagtattatatggaatttccgcatatggaaatcctcacctgtttggatagggataggcattgcgtttcttggtgttctcatctttataattgctatggcaacaatgggggacagctggagggccggcattccctcaaaggatgaaacccagcttgtaacaacaggcatataccgtatcagtaggaatcccgctttcctggcttttgatctgatgtatcttggtatgcttatcgcatttttcaattgtctgcatctgatttttgtgctttacgccgttataatgctccattttcagatattacaagaggaaaagtatctgacccatacttttggagaaaaatacacccaatataaaaaacgcacaggaagatattttatttttgacagaacgtactctaagaaaaagacacttattataattgtgtccatcattctctgtgtttctttggcggttggtgggttggcaatctatgcaggccatcagctgagtaaacttccggatcttacctttaaggaggctcttgcatatacaacccaaaataatcctgacgcagtaatatctgtaggtgtcattaaagacggagaaatgtcttacacggtatatggcaaaaatggcgaggaattacctgccgatctgcatacatacgaaatcggctctttgacaaagacttttaccgccgccttgatcaaccaggcaattaccctggaaaagatcaatcttgacaatacaataaacagctatttatctcttcctgatggcaaccaatacccaacaatagaagaacttctgacacatacttcaggatataagggttactactttgaaagcccgatgatatttaattttcttacaggtaaaaacgatttttacggtattacgaaggaaatgcttctcaataaagtaagtaaactgaatatgaataaagacagctacgattttaattattccaattttggatacgccgttttagggcttgttcttgaatcagtttacgatactgattatcccacgttagtaaaccatttcgcccaaaacaagcttggcctgaaaaacacaaagatttcccaaaagaacggtgatctggcaaactattgggattggaaaaacgaggacgcatatttgtctgcgggagctatcacatctgatatatctgatatgcttttatatgccaaaatgcaacttgaaaacaatccgtatttttcccggtgtcataaaagccttgcagtagtgaatgcaacttccgattcaaataaagcgatgaatggatccctgcaaccatattaggtataaagcttttgaatgaacttaataagtaactgtgacatcccctatactttcaaaagtatttctgctataatcgggaaacagagtacagcgcagacggtaacgtccacccataaatagattctgacaaagaggtgttttcatggatcatttcaaattacattccgaatacaaacctaccggcgatcagccgcaggccattgaggaactggtcaagggcttcaaagaaggtaaccagtttgaaaccctgctgggtgttaccggctcaggtaaaacctttaccatggccaatgtgatcacacagctgaataagcctacccttgtccttgcccacaataaaacactggcagcacaactgtatggtgagtttaaggagttcttccctgagaacgcagtggaatattttgtttcctattatgactattatcagccggaagcttatgttccctcctctgatacgtatattgccaaggattcagccatcaatgatgagatcgacaagcttcgtctttccgctactgctgccatgtccgaaaggcgtgatgtgatcattgtatcttctgtttcctgcatttacggtctgggttctcctcaggaattccatgatatgatgatctctcttcggcctggcatgaccaaagaccgggatgaagtgatccgggaactgatcgatatccagtacaccaggaatgaaatggattttcaccgcagtaccttccgggtacgtggagatactctggagatcttccctgccaactactctgacagtgcgatccgtgtagagtttttcggcgatgaaatcgaccggatcacagagattgatgtgcttaccggtgagatcaaatgtgaggtttcccatgcagggatttttccggcttctcattatgtagtaccaatggaacaaatccagcgtgcagccaaggcaatcgaagaagaactggaagaacgtgttacttactttaaaagcgaagacaagcttctggaagcccagcgtatttccgaacgaaccaattttgatatcgaaatgatgaaagaaaccggcttctgctctggcattgagaattattccaggcacctggcaggtcttgctcctggtcagcccccttacacccttctggattatttcggagatgattttcttctgatcatagatgagtcccataaaacggtgcctcagatcggtgccatgtatgccggtgatcaaaaccgtaagcagaccctggtggattacggtttccgtcttccctctgcaaaggacaaccggcctttaagctttgatgaatttgagcagaagctggatcaagttctgtttgtatctgctacccctggtgaatacgaagcagatcatgaacttcttcgtgcagaacagctcatccgtcctaccggtcttctggatccggaagtagaggtacgtcctgtagaaggccagatcgatgacctgatcggagaagtgaataaagaagtagaaaagaagcataagatcctgatcacaaccctgaccaaacggatggcagaggatcttacccaatatatgaaggatgtggggatccgtgtacgttaccttcactcggatattgatacactggagcgtgcacagatcatccgggatatgcgtcttgatatattcgatgtactgataggtatcaacctgcttcgagaaggccttgacatcccggagatcacccttgtagcaatcctggatgcagacaaggaaggcttcctccgttcggaaacctccctgatacagaccattggccgtgctgcacgtaacagtgaaggccatgtgatcatgtatgcagataccatgaccgattccatgcgtcaggccattgatgagaccagacggcgccgtcagttacaggatgcctataatcaggaacatggtattacgccaaccactatcaaaaaagccgtccgtgatctgatcgcagtatccaaggcagtagcagaaacagaagtgaagcttgccaaggatcctgaatcaatgaacaaaaaagagcttaccaaactgatctcccaggtagaaaaacagatgcgtgctgctgcagctgatcttaactttgaacaggccgcacagctacgcgataagatgatcgaattgaaaaaaagccttgccgagcttgaagggaattaacagcattcccggcccggcagggctcttttttctgttacattgtcttttcagcttctaatttaatctcatgataaagttctgaaaagctctttttatttttacgtgccagttctgccacgctatcactttccggatagcaataacattcaccttcccaggtgcagaatttcactttggctgtcccataagatgtactcacattcttaatctcccgaatcattttagagcgatttaccaggtaatatctgattcctatagctgtggtatggacaaagaccagtttttccatactttttcgatcttgtattttgcaaaggatactcagcttgtaggcgggacgattcttcttcatataaattggctgataccagacatccagtgctcctgcctgtaacagctcttccataacaaaaccaagtgtttctcctgtacagtcgtccagattactttccagtaccatcacctgatctctttctttatcatccggggcttctctggtttcgccagtttctcccagactctccggattcttattctcctcaggtacttggatccacatggcacgaagaatccctgcaatcccgtaatctcgcttaccaccgcccatacccattcttttgatgataaactgctccggcaaagtatccctggttctaatcgccgctgcaatcgccgcaccggtaggcgttaccagttctccctgcacatgagtaatatgaagtggcagctgatatgcctgagcaatagctgatgttgcaggaacaggaatgggaagaaggccatgctggcagcggatctgaccctgtccttcatttacaaccggaataaccacgtcccgtacctgaagatcatccagacatatcgctgctgctgcaatatcaataatagaatccactgcacccacttcatgaaaatgtacctgatccatcggctttccatgtacacttccttctgcctctgctaggatcctaaaaatcttaagtgctagttccagtgcataaggactcatatttccagcctgaagaatccgggtgatctcctgaagatttcgtccatgatgtccgtttttatggatactgtcatgatgaacatgctcttcatggctgtgtccgtgaagatactccatatcatgatcatgattatcatgctccaggatcacgttaaaatcgcagacccttaaaccggatttggtcacatttgaaatctctgctttccagccgttcaaaggcaggctttccagagtttttacaagatgctctggatcagccccaagatccagaagagctgctactgtcatatctccgctgattccactggaacaatccagataaatcatttttccctgtttctgcatatataaatactccctgttttctcttcatttgtaactgttatgtgttttccatcatttttttatccactctgccttattataaagcaaaaacctgcttctctcaacaaaaaaagaaaagccgttgctttataacaacagcttttccatacttttagtccctgatcggacttgttacgtttttaagccattcccgctcttcttccggcaaaaaggcttcaatcttctcatataccattttgtgatactgatccagccatttcttttcttcacaatccaggtattccatattcacagcggaaagatcaatcgggcaaagagtcaatgtttcaaaatgcaaaagtccatcctgggaatccttcacacacaaaatcagattctctatacgtatcccatggcttccttctacataaactcctggctcatcagaagtgatcatcccctcctgaaatactgttttcagatgatccggcaatctccagtgaataaaattaggcggctcatgtacattcagaagtgcgcctactccatgtccggtaccatgattaaagtcctgtccatgctcaagcagcggccctcttgccaggtaatccagcatctgcccatttgtaccctgatggaatctggcctttgccagatcgatcataccctttaatacaagcgtataatgaagcttctgttcctccgttacgttccccattacaaccgttcttgtaatatctgttgtaccggctctatactgcccacctgcgtctacaagataaaagccttctttttggatttctgtatctgtttctcttgtggaaatataatggcacatagctgcatttttaccataagcagaaatcgtttcaaagctgggctccagataacccttctgctctcttctaagcgtttccagatgatccgcagcctccatctccgttacatgtgctgttttcggaacgtgcttcagccagtacatatatctggtcattgccaccccatcccgcagatgagcacttcgtacctgttttatctcctgctgattcttcacagccttcatgagaaccgaaggatccgttgcttcttttttagtcacgtgttccggcagacaataatataattcatcacttaccttttccggatccattaatagcgtacatttcggaagcttttctaagacctggacaatatcatcataatcccttacaaagactctgtcattttccagtacatctctttgtgcctcattaagtacaccactttgtacaaacaaaactgcgccgtccatggtaataatggtataggcctgaattaccgggctgcaggctatatccattccacgaagattataaatccatgcaatatcatccagagaagtaaccagatgtacatccgctccctgtttcaccatttcttcccggacacgttccagcttatctgccctgctttctcctgcctcatccattgtaaggaaccaggccggtgttttttccattgccggccgattctcccacgcttcatccacaatatctctggagctgctgatattgatcttattttcttttaaaacagatcggagttttttcccttctgatgcactgagcaccctgccgtcaaatccggcagtttctccagattttaattcctgtgccaaaaactcctctaaaagcggcacattcggctgtccgcttttaaacaaatgaacctccgtacctgccagctgcttttcagcctgtacaaagtatcgtccatccacccatagccatgctcccttttgtgttactgtcacagtgccaacgcttcctgtaaaaccggtaaggtattttctgactttgaaatgttctccaatatattcagaaccatgaaaatcattggtaggtgcgatccatgcatctatcccatattttttcattacatttctgaaattttccaaccgttccctgattacctctgacattgttcttactctaatccgtactttgcagcagcctcatcaatggcttttctgcacttctggactccggccttgattccatccggatccttaaagattgcagaagaaaggatgatcacatctggattgcatgcgatcaacggatccatattatcatgacgaaggccgccatcaatagcaagctcacagcgtggattcttctcatcgatcagctttcttgccctctgaaccaaatctacagcagattttctccatccccagttatcctgtccatctgtgtcgtctacaccatgggttacgatctgaagacggtcaatatcattaatagactcatcaacaaagcaaagaggtgtatagcatcctacggtaagaccgatcttcatgccaaactcgcggcaataattgatcaggtaagcgagtggtgctccaataaaatgctcagctggtacgatcagcatcgtgcagccagcctttgccagcttttcaacaaacagacggtcacactcgatggtatagatatggcattcaatatgcttatctgttacttcccgaagtcctgaaatgatctgtgggcctcccataagctgcatatttttcaggtcatacatatctgctgcatctgaatggatataatcaactccgccgtcaatagcctccagaactctgtctgcgatccttgcgtaacttacatgtgccagtcctgctgcgattttaatgtgtttcataatgatttcctccttcttatcctaaataattatttttcatatacaaccctgccatcaatcaatgtgcagatgcatgctgcatcaagattctttacaggattcttatcaaacactgcaatatctccgtctttgcccggttcaatggatcctattctgtcctccaggccaatagcctgtgctgcgtgaagggtaactgctcttaaagccccttcctcactcatgccttttctgtggcagattcctgcacatacgatcagattctcctcatgcattcccggaagatctgtcataatagcaacctttactcctgcccgctccaggattcctgctgaagcttcatcctgatggatcgtttcgtttttgtgcggaaatccggtaaatggtccaagaatagcaattctgtttttggctgcaaactcttctgggatcaaatgcccctctgaacagtgctcaatggtcatcttaaggtcaaactcttctgcaatacgaatagcagtcatgatatcatctgccctgtgtgcatgagcctttaccagaagttctccctttatcacaggaacaagggcttccagcttcatattgaaagctggcattttatccggatccccagctgcccgttcctttttgtctgcatattcctttgccttaaaaagtgcttcccggatcagtgcggccacacccattcttgtggatggagtacgtttactgccatatatattttttggattttccccaaaagccattttcatggcaagaggctctttgatcaccatctgctccatggtgcgccccttggttttcattgcaaggaactgtccaccaattggattggcactgccagggcctgtagctacacaggtaactcctgcttcataggcttttttaaactccggatctagcggataaatcccatccaatccacgcatttcaggagtgattggatcattctcctcatttccatccacacctgcatcaccgatcccggatccaaaaacaccgatatggcaatgtgcatcaatgataccaggcataacaaaaccgccatgtgcatcaatcactttgcagttttctggctggtcaatcgtatgtcctacctttaggatcttcccatcttccagcagtatacagccattttcaatgattccttctgcagccatggtaacaatggtaccgttctttataagaactgtttcactcactgcttccacctccctgtattcttttagataactgctccatctgggcaatcgctttctctgacagtgttcggatcaccccgtcctcaaacggaacctgcagacctgctttgtgaagagtatctgtaaaaccatactttccactgtatctaaggatatccatgtaacagttccagcccttttccctgttttcttcacagaggaaatgcacctgcattgcacaggtctgtgccagtacataatcaatataataaaatggccatttataaatatgagtctgtctctgccagaacctgccttctgaaagaaaactctgattatcgtaatgtctgaaaggcatatattcctgttccagctttttccataaatcaagtctctgttttggtgtcatctccggatggtcatatacagtttcctggaattcatcaactgcacagccataaggtataaaggaaagagcccctttcagatgctgatatttatatctgtcgatctgtgcttccggcatggtttcattcaggtaaggccacacaagaaattccatactcatggaatggatctctgcaagatcactgctacagttctctgtaaacctaaatggctctccacgcttaagataagaatggaaaccatgtcctgtttcatgggcaaaggtttttaatgcaccaaacgtgctgttataggtttcaaaaataaatggcatattataccggcctaccaaattggaataagcgccattgatcttccctggacggactgcaagatcataaaactcccctcttgtcagatcgtcataaaatacagctgtttctttggacatagaaccataaatcttcttaaatgcctctaccacattgtctgttatgtcgtacttttcacctgggaaactgaaatcctcatcataatgataaagcgtttccacacccagtcgtttcctttgttcttcaaaaagctgtgtcactaccggaacaagctgctcttttactgcatttctaaaagccccaacttccttctttccatagctggttcttcccatggaacaatagccaatttgagtataactgtcttttccaagctttccggcaatctttgcacgaatcttgacaagaccgtcataaacctgatccagttcctgtgcaattcccatccagctttcttcccatattttataaaacttagatctttcttccctgttttcacttgatcccattttggcaagacttacaagcggcacttcaccttctgctgtttttgccttaagtgtagccgtaagttctgaatatctggcagacagtctgttttcttctcttagatcctccagaatctcttctgaaaaacactgctccttcagtcctgcttttttgaatgcttcttcgcctgtaaaataagaaagctgttctttaaaaggagtcttctccatagcacggctaaggcggctttccaatgcttcatattctggacggatcttatcacaccaggcagcttcttctttataaaaagcatctgttacatccatagtattacgaatctcaacgatggttgccattgtctggtatttcaccatcagtgtatcaagatccagcattgcatcataagcttcttccatagtttttgcattggaaaagcgttccagttcttcttcaaagtgtcgtttataggacactatatccaatctgtaaaatggaatatctttaaatttaatcataatttttctccatagctttcattcatgatctgaaggagtgtttccttcggtgcaaatggaagaacattaaatacaaaatttcctttcatttcctcaaactgctctttggtcactcccaaattggaaagtgtattgtaaagtccgatttctttcaaaaagccttcaatctgtgccggaaggtgggatgcagcctcctcatcagaaacctgtgcaagagcaggatcaaaaagccttgccacatctgcacatttttccggtgtttttgtgatctggaatctgataaatgcaggatacagacatgccagacactgtccatgtgcgattcttggtgttacccctccgataacctcacttaatggatgcggaatggttgcagaagcattgctcagggaaatcccggaaaatgcagctgctcttgacatagactccctgtattccatattggaagtatcctttaccagcttgggcagcacctgtataatagttcgcatagcttccttcccaagaagcatggtataaggagatgccagttctcttacatagctttcaaaagaatgagtaaatgcgtcaaatcctgtaatcgcagttggataaggcggcaatgtacgacaaagctctgggtcaatgatggcaacccgtgggaaaactgcctgatggtacacacattctttatcattgttttcctggtcagaaatgatcattgcctgggtaagttcgcttccggttcctgcagttgttggtacggcgatcaccggcagtacactttttcccggaagttcatatacagcagaagggctggaatattttgaaaatacttctttccagtggatttctcctgcatcatggaacaatgccacagatttagctgtatccatggaactgcctcctcctacagccagtattacctgcaatttttctttatttacaatctcaattgcctttgcaattccccgaatatccggatttggaacaacttcatcaaaatgtatgtaacggattcctgctttctccaggatcttttttaccctgtcatataaaggtctcaatacatcttccttatttgtggtagtgacaagcagacaactgttgccgtaggatgcaacgatctctcctgtcttttcaagctttcctgcaccaaaatcaattctggtgggctggtaaaacataaaatctgccatttaagtgttcctcctttaatatgattttcaataccattacagttatgatttaatccagattcactttctttccatccatataaagagctgtcagttcatctacataatcgatcttttccagtggattacctttcagacacacaaagcttgctttttttcctgcttccagagatccaagttctggaagatccagaagctctgccccgcctctggttgcagcatccaaagcagccttcggagtaaggcctgccataaccatcagcaccatttcatgggctgctgcttcatatggattaaagggacagcctgcatctgttcccattgcgatcttaactcctttttcccagcatcttttcagaacatctctgtgacgctgcagaacttctttgctcttcttgtggtcaggattatccggttcaaggcggattccctcatttactgcataatatggagcgcataaggtggggacaaggaaggttccctgtgcactcatcttatccataatatcctcagtcataaatacgccatgctcaatagagtctacgcctgcgtctacgcatctgcgaatagctgtatttccatgggcatgtactcccacttttctaccccagttatgagcagtttcaattcctgtttgaatctcttcccaggtaagctcacatggtcccggctcaggtcctggtgaattaacgcctccagataccatcagtttcaccacatcagcaccatccttgaccacctgccggactgctccacgcatctgatccggatcatctacttcataactgatctcataaccgtgtccgcctcttgcgcacactgcataaccacaggcaagtatcttaggcccaacgatcagtccacgattgatagcatcacgaatgcccagcacataacctttatatgaacccagatctctgcaggcaatcacacctgctttcagcagctgtttcgcatgggctgcgccctcacatactacattggcgatctcacggttttcatttgcataatctccgcctccgtggctggtgcttccaagaaaatgcacatggcagtcaataaatcctggaacaacatatgcatccttcagatcgatcacctgatctgcctctgtctggtctgtttcctctctttttttcacccagaggatctgctccccttcggtcagcattgcaaaatcttcaatcactgttcctgctgcatctgctgtgtacagccattttcctaagtataatattctcatttttcaccgcctccaaatccggtatttaatccatctgttccaggcagtacaaatctgcctttttcaataaaagcaaccttgctgccgtccttttttatacctcttaaatactccacctgatgatagggaagtgttatatctacatggttttcaaaatacacatcttcttttttgtcccgatcctttgtcacttcattttccctgcacaccatttctttatggtcatacatattgtaaatcggtgcatcctcagatcttgcaaagcacgggtctccgattgcaatgtgaggtcccattttctcgtagatcaggatcggcattctgcctcccagctgatatctatgggcaatagaatacgcctttgtgttgcttccgattgcaaattcgcccatagtcacctgctgataaggatacaaaagccggttcatcacatactcttttccttctttacaggtagcatccacaacccatccatccttaaaggtaagccgaagatcatgataaaagatacctttcagacagatctcctccacatgataaagtcccgttgtcccagtcagcctaggagttgtaaaaacctctccataaggaatattcagatctccgccgcaattcagaaattttgtctctttttccggatctttcacaggccaaaggctgatcttaatgtctgtttcatttccattacagcctttgatctccacagtctcacaggtatcaagcccatcgatcagtacctgctgaagaagttcaaaaggctcagatacttctgcattcatctggaaaaagtcatcaaaaatctgttcaaaccgttctcccaccagcatatttggaaaagccaccttgcagaaagaaatctcagaggggcggatccactgtgcttcaaaatcacgttttttctgtgaaagttttgtaagccactctttattttcttctgaaagaaaagtattttcattacctgtatctactactggctccataccaaactgatcaataccgatcattccgcaggtatccttaagctctttctcatataaatacatagcagctttataagcttcccactcagcatgaaatagttcttcgtccattacatccccatgctcaagcaaaagatctttctgcccctggcttgcatacaatatatgaggttctgtgatcacaggagtaaggcctttttcctttaatgcttttaccacttcctttgccagagcttcctgaccgatctgataaaagaaccttactctttttctgtcttttcgatccctgctctgactgataaagccatgaaggaatgcatttgcaacggtatttcccattgcctgcagtttttctttttcaaggccaaaccagaacttcatcatttgccggtcagtatctgtaaccggcagtccgtattcttccatccagtctgtactttcaggcgttgctttttccagaatcatttcgtaaggattttcttctccgatacgtatcaggctttttacaaaatcctgtgcacggcttacagcagtttccagaagtttacgtttccactgctctttttctgcaacctgtgctttaccttgttccttcatcatgccctccttggttacattccctgttttttcaatttctctttgtaatatttactgtgaagaaacagccatgtaaggatcacagaagccacccatccgctgggcactgccagccatacgcccatttctccccagaagcttttcagaatatatgcaagaggaagccttgctccccaatttccaacaagagtgatagccattggcactgccgtatttcctgttccctggataaaaccatgaagaactacccaataggaagccatgaaatatgcaatacttaaaacccggatatagctttctgccatttttgccactgcaagatcactacagaaaagtgacggtattgcttttcctgttccccagaataaaagcaccaggaacagactgtaaccataagcccacatcaaactgaagcgtttgccctttctcacacgatccggtttgtctgctcccagattctgacttgtaaaaatacataaggactgtccgatgcctgagataggtatatttgcaaatgaatcaatctttgaccctaccgtataagctgtaaccacctgcgttcccagtgaatttactgctatctgcagcacaatcataccgatgctgttggcgcattgctgcacagagcagggaattccgtatataaagccctgcttgatagcagtaaggcttattttcaaatgaaatggattatacctgatcattccttttttcgtatttgtataaataagacagcagataaaggctatggtctgagacaaaactgtggcaatcgctgcgcctttcacgcccatacccagtccccctacaaaagtcagatccagtccaatattcagtactgctgaaatcagtaaaagaatcagtggaacaattgcatttccactactgcggatcagtccgcttaatgtattgtagcctgcaacacccacaagcccaagaaaataatatttcagatagagaactgcttcatccaatatctctgccggtgtaccgatcagagaaagtaaaaatctggaaccaaaaaaaccgatcaacattgttataactgcaatcaccaaaattgttgtaagcatggaatccagagtgatcttctgtccctttgcatccttctcaccaacctttctggccaggatgatctcggttcctgccccaaggccgatcatcagtgcaactaaaagggtaatgattggtgtactggcacctactgctgccagagagttcccgcctgctacacgccctacgatcactgcatctgcagcactatacagctgctgcagaatgttacttacaagaatgggaagggtaaataatgccagtcttcttttaaccggcccttccgtcagcaaaccagtcattctttttcatcctttcccttataaaaacttacgggagggattgcaaaatcagcaatccctcccgcgggactaacttactttatggaatcctccatatatgcagaccctgcaatctttattttgtgattgaaacatatttgaaatcaaattcataaccataagtaaagatttcaagcccctgtacattgcctttgattgcccagtgattcagagcatatacctgtggaatgtagataaagttatcaagtaccattttctcaatatccatccatgtctggattctttcatcaccaacctgtgtatgagctttctcaactaatgctttgaactcatcattatcccacttgccctcatcatagatgaactgcatgaagccctgaggatcacgatagtcagaatcctggccaccgccgattacgcagtcaaatgttccctctgtaagcattggaaggattacgttgaaatcaagaacgcttacaggcatctcgataccaaggtttgttttccacatattctggatagcctgagcctgaactttgccgctttccagacactgaatggagaatccatcctgcatatcttctttggtcttgccgatttcttcaagaccctgatccagaagctgctgtgctctttcgatctcggactgatcagatgcatcttttacgattgggccggcctgctcacggaaatctccgccatcaagtccctttactccataaggaacaagaccataagctgccagatctgcattatgcattacctgctgtgcaaatactttacggttgaaagcgatggataatgcttcacggatgttcttgtttgcaagatattcatttgtgttcgggttgaactcaatgaatgtatttctcagaagcttgttgtcaacgatattctcgtctgcatactgatcaagaagctcgtcgctgactttcagaacactcagttcatcattctgatacataccctgaagagtattggcatcagatgtgattgtgatctcgatcttatcaagctttacattgtctgcatcccagtaattctcgttcttttccagtgtcatggaattctcatgtgtccagtctgttacaacaaacggtccgtctgcaacgatcttgtccacatctgttccataggtatctttatactcttctgctgctgccttctgaacaggcgcaaagcttgcagatgttaaaaggtcgataaagtaatcacatggttcacctgttgtgatctccagtgtgctgtcatctaccgcttttactccaagatcatcttctgttgcttccccattgtaatacttctcagcatctttgatgatgaagtatttgtaagcaatagctgatttcagttctggatcaagctcacgcaggaagctggcaacaacatcgtccattgttacatctgtaccgtcagcccattttacaccatcacgaagtgtaagggtatgtacggtatagtcatcattgtgctgataatccgtcatcagggctggttcccatccctgctcatcatttgtctttctcagcattggctcatgaacagctgccactaaattaccagctgcaccagagttatttacccacggatcaagtgttgcaggctcattgttaagggaaaaataaaatacctgctcatctgccagttcagcatcttctgcatacactgctgtagatgctccgatcgttcctacgccaagcattgcagccaacataagactcataccttttgatacacgtttgttcatttctttacctccttttaataaaacttacccgtttattaagtgacaggccactttatgacctggaccacactctttaagtaccggcggctgctcaaagcataccggctttgcatatgcacatcttgtacagaatttacatcccttaggtgaattgatagggcttggaatctccccttccagcttgatcctgcttctccctttttcaatcttgggattggccaccgggattgcggaaaacagtgccttagtataaggatgctgaggattctcatacaattccttattggttgcatattccataatgcttcccagatacataactgctacagtatcagaaatataacgtaccatagacaggtcatgggcaataaaaatataggataatcctttatcctgctgcagtttcagaagaagattcataacctgggcctgaatggaaacatccaaagcactgataggctcatcacaaatgatcagttccggtgacatagacaaggccctggcaattccgatacgctgtctctgccctcctgagaattcatgaggaaaacggtttgcatgttcttcatttagtcctaccgtttccagaagctcgatcactcggtctcttttctcctctgcactcatatgaatggcatgattcagaccccagccctcagaaatcagctgagaaactgtcatacgtggacttaagcaggcatatgggtcctggaagatcatctgaatgcttcttgccagatcctgccggaaccttttagtgctttttccgctgatatcctttccattcaaagtgatttttccttctgtaggctcataaatacgaatcaatgtccgtccaagagtggatttaccacatccggattcccctacaagtcctaatgtttttcccctctcaacttcaatgctgacgccatctacggcctttaccactttacgtccttttattttgaaatattttttcagatcttctgcttttaagattacatcactcatgcttcgctacctcccgttctgtaatgggattgactgtcctaactgctttcttatggtacagccagcaggaagcataatgtttttcaccctgctgcgaatatgccggaggatacatggttgaacataccttcatagcatacggacatctggctgcaaaaggacatccagctggaggattaaacagatccggcggtgtaccaaggatcggatgcagcggttccctgttgctggtatcttccggaggaatagactgaaggacaccccaggtatacggatgtgcaggatgctcgaaaatatcttctgcatgtccgtattccatgatctttcctgcatacataaccgcaatatcgtctgcaatattagcaacaactcccaggtcatgagtgatcatgatcacggaagtatcgtactgtttctggatatccttgatcagatccagaatctgcgcttgtatggtaacatccaatgcagtggtaggctcatccgcaatcagaagcttaggattcactgccattgccaatgcgatcatagcacgctgtctcataccacctgaaaactcatggggatactgcttgaatctctgctccggacttgggatcccagccattgccagagtatccagtgcgatcttctttgcttcttcttttgttttatttccgtatttcagaataccttccacgatctgttttccaatagtcatggtaggattcaagcttgtcataggatcctgaaaaatcatgcggatctcctgagctctgattttctgcatctctttttcttttagttttgccagatctttgccgtcaaaccaaatctctccctttttcagaagcccctttggctttgatggattcaggccaataatggatttggcagttacggatttaccgcatccggactctcctactataccaagacttttgcctctctcaagggaaaagctgacgcctcttacagcctgtacttctcctgcataggttttaaaagagaaggtaaggtctgttacatccaacaaggttttttcatttcggttccccatgtttgtttcctccttactgtctcattctcgggtcaagggcatctcgtaagccatcacccatcaggttaaagcaaagcattgtaatacagatcaaaagtgacgggaataaaagctggtatggatagctaagcagcttattggcaccatcgcttgcaagtacaccccagctggctgttggaagcggaacacccagtccgatatagctgaggaatgcctctgaaaagatagcacttggaataacattggccatactgataatgattggactcatagcatttggaagaagatgcttcataataatgtgaaggcttcctgcgcccatggtcctgctggccataacaaactctgattcttttaatgagaatacctgacctctgaaaagtctggccatgccgatccatcctgtcactgcaatcgccagaatgatagggaatacacctggcttcatgatcaggatcagaagtactacccacagcatctgcggaatcgatgcgatcaattcgcaaaaacgcatcataaggttatctgccacaccgccaaaatatcctgcaatacctccgtaaaggataccaatggttccattaagaatcgcaacgataaaagcgatcataaggctgactcttgcgccttcccagcaacgtacaaaaatatctctgcccagctcatctgtgccgaaccaatgctctgctgacggcccctgattgatagcaaaccaatcctgctggtcataggtatatttgctgaccataggctgaacaatcgccattccaatgatcagtatcagaaccacagcagataccatagcaactttatttcctttgaatcttctccatgcatcactccagtatgtaagggaaggtctggacatcttatccgcattcacatgagcggagtcatctttttcaaaaaggctgtcttccagattctgcagctccatttcttttgtttccatgtactcccctcctatcctgcgattctgatacgtgggtcaacaagaccatacacaatatctactatgaaataacagacaacagatataaaagaaaagatgatcgtcagacccatgatcatcgtgtaatctgagttctggatcgcagtgatcattgactgtccaatacctggtacgttgaaaatcttctcaattacaaagttacctgtaagcacacctgcacacattggtccaagagatgttacaagcggcaggaatgagttacgaagcatatgctttcttacaatctcattctgatttaagcccttgctcttagctgtgtagatgtaatcctgtcccatagtatccagcatactggttctcagcattctggcataataagcaatgttggtaaaagctgctgccccaatgggaaggactgcgtattgccatcctttccacccctgtatagggaacatcttccattctactgcaaaatatctctggatcagggatccaaaaacaaagttgggaatggaaactcccaggattgcaagtatgataacaaaataatcaacaaaacctttattctttaatgcagccacagcaccaagcacggaaccgatcagacatccgatcagtacaccgccaaatccgatgatggcagaaaccggcataccggatgtaacattacccacaacagtctggctcttatatttcatggatacaccaaaatctccgtgaagaagattcttcatatagatcagatactgttcaaacaacggtttattcaatccatactgttcataaagagcttcctttacactgtctggtgtctccctggtaatctcaaagggctgtccaggtactgcatgcatcagaaagaatgttactgttgctaccagaaacagcgtaatgagcattgacacaaaacgctttgccacatattttgccatttgcatcccctccataaaaaagatatgtaataatatattctcaaccgctcgggtagagttgaacaatttgtatactctttttagacaatttaaaatatattttgtagattatgcatagagtataaccgacttctattctcttgtcaataaaaattgttcaaaaatatattcttttattgtgttgacattattttctcattatgataatatttttttatcaaatatttgcaagattcttatttctattgcaaataccaatgttttccattataattttacaaggagggtcctattttatgaagtacatgaccgcagaaccatttcgtattaaaatggtagagccaattaccagatccaccaaagcccagcgccagcaatggcttcaggaagccggatacaatgcattccgcctgaaatctgaacaggtttatatcgactgtatcactgacagcggtacaagtgcaatgagccaggcgcagtggtcagctatgatgatgggggacgaagcctatgcaggatgccgcagcttttaccgtctggaagcttccgtacaggatatctttggcatgccttacgtacagcctacccatcagggacgtgcagccgactacatcatgactcagatctactgtcgtccaggtgcttatgccattggcaatatgcactttgacacattcagaggcaatgctgaaatgatgggatgcctgcctgtagattatgctattgctgaaggtatggacactgcttctgctcctcatcctttcaaaggaaatatcgaccttaacaagatgcagagcctgatcgatgagaagggtgcagagaatatctgcgtatgtatcattactattacctgcaataataacggcggacaacctgtatccatgcagaatatccgtgaagtcagcgctctctgcaagaaatacaatatcccggttgttctcgacagtgcacgtttggctgagaatgcttactttatcaaaacaagagagccaggctatgagaacaagagcatcaaagagatcaccaatgaaatgttcagttactgtgagacagccaccatgtccagtaaaaaggatggtcttgtaaatatcggcggtctttttgttacaagaaataagagtgtttatgagcaggcaaaccagcttgcaattgtacacgaaggtttcattacatacggcggtatgtccggccgtgatatggaagcacttgctgtaggccttcaggaagcatgcgactttgattaccttgactaccgcatcaaacaggtggcttatcttggcgaaaagttaaaagaaagaggagttccgatcatcgagcctaccggcggtcacggtgtatatgttgatggtcgccgcttcttcccacagatccctcagagcgaattcccaagccagcgtcttgtatgtgcactttacgaagaagcaggtgtacgtgctgttgagattggtgcatgtgctttcggttccattgacaagatcacaggcgagcctgtttatccggctatcgaggctatgcgtattgccatcaaccgccgtgtttataccaacaatcatatggatgtgattgccaatgcacttggtgacatctatgaaaacagagatcagtatcgaggcatgaagatcgttcatcaaggttctatccagtccctgcgccacttcacagccggatttgaacttttataaataccactaatagtaactgttcagctccatgacaattaactgaatagttaccaataatcttcctcaaaggagaacctactatgctgaatgttgatttttacagacctattgttgaattccttgccctttatatgggttccaatacggaagtgattctttgtgacactgagaatattcttctgattgagaattccatggatgaagagcgcttcgaaggtgctcctatcggagaaatgcaacaggctctgattcaaaatccagagtgtaggaatattccctacaatatcaattaccggaccctgtccaaaacgggggaaaaggtccgttcagcaacgctattcatccgtgatgccaatggtactcttgaggggttgcttacggtcaaccagtgtgttggtgagcttgtacgcctgcgcaatatgatggatatgctgatcagcggagaacaggatcataatgttctccgtaaatccaagcatggcagttccccaaaacaatcttatgaagcacttaccctgtctgtgacagagatcatagacagggttctggaggaagctaccatccgtttcggagctcctcctaacagactgactgccaacgaaaagatttctactatccgtgaaatggacagcagaggtgttttcctggcaaaaggctccgtcaacgaagtggctgataaacttggcagttccaaagccacgatttatcgatatcttcatcaactggagacaaaacaataaataaaaaggacaaatatttaatatggcacagagtattgatgtggaaaaagccagaaaggcccttacagaatgcggatatactgtggatgctatcagccagatcaacgagggaagcaaccactatgtatttgatgtaactctggcaggtggcaaaccagctatttgtaaattcgccagagtcagagaaacagaagaagggctttcacaggaaaataaagacactttgtttggcggtacactttcccttggaagggaagcatatcttttccgtatgatccgtcagcaagcaaatgttcctacaccggaagtgtacggagtacatgactctccttacgggaagtttatcctccttgaaagaatgagtggtatctcccagaaagagtgtatggtacaaagcggttactccaaaaaggtatttcttgacagtatgaaatatcttggccgtgattttgcacgcattcagaatattacctttccctcctttgggaatattatggaagactctgtgatcgagccttctgatatgactaatttttcagaccgttttcttcaggttgtggacatgcggcttctccgctgtcagcaaaaagaggtctttaccccttcagaacagacagttgtaaccagatttttccatgaaaagctggaagccttacgtccttattttgataaagacaaaatgcctcctgtattagtttttacagacatgcatgctgagaatttcttcacagatgcacagggcgttcctaccggatattttgacctggaatctgcacaggcagcacctgctgcccttgagttctatggtttccggttcttcctttacaacttttatgaccatacctgctttgaagaagctgagaaagctttttttgatggttatcaggaggccggtggtaaaaatactccgtcttctgcttctgattttgaagccattgattttcttgcaggatgccgtctcctggagcttgcccagtcttactggggatacattgatgggattcgtgatacctggggtcaggatatgaaggatttgctgttccattatatggatactggtgtgattgattacgatgcgataggacgtatctggcgtcagagagataagcagccagttatccctgcccgtccatagtcacacgccctattgtgttttttatagagatatgatacaatcattctcggttaacggaatgcagcggaagggggagcgccctgccgctgcgatcaatataatctccggcatcttaacaagattgccggtgcattcttaaaatatgatgacgaaaaccagattgcgagggagcctgtatttccaggctgagaggatcccgtaaggatcgaccgaaacctgtccgccttatataggtggattgtcagcatctgcctgaaagtcatttcttcagtacatgctgcggtatgtacttttttatttggcagataatcaaatttatggaggactttgtaatgaagaaaagaaacacatcagcactctctctggctctctgcctgggacttaccttaggaaacaccagcttggcatttgcttctgatgccaaaaccattgactcattaaaaatcgcattctccccatacgcagactctgatactattacaactgctaccgagccgctggaaaaccttttaaaagaaacccttctggaaaaaggctatgatgtagaaaatgtagacatgactgtgggcaccagctacacagcagtagggcaggcattaagcgcaggaagtgcagatatcggctttatttccggaggcaattacgtacttttctctgatgactgcgatgtgcttctcactgcactccgctacggaatcaacaaggactctgatgacccgaaagactggaatgatggcactgttgaagaaaatacggatgacatgtccacctattaccgttccatctttcttgcaggtccaagtgaaaaaggacaggcacttcttgaaaaggtgaataatggtgaagagcttacctgggatgatttaaacgatgctacctgggctgttatggggccaacctctgcttccggatatatttaccccagcctgtggctccttcaacgttatggcaaaggaatcagcgatctggatcatgctgtagaatctgattcttataccacgtctcttgccagacttgcatccggacaggcagatataatggtatcctatgcgcacatccgcaccaaatatgcaccggaatggaaagaaacctttggcggtactgacgatatgataaaccagacaggcgtgatcggagtaacagacaagatctacaatgatatgatcgcttacagtaaaacttctgagacaatggctgaccaggatttccgacaggctcttggagattctttcatcgaaatcgctcagacggaagaaggaaaggatatcatcagcgtcttcagccaggttggctatgaatggggcgacgactccaattatgacggtgaacgtgaggcacagaaacttctgaaatccgaagaataaggaaggtgattcccataaagctccagatccagcatattcataaatcatttaaaaatcatgttactgcactggaagacattagcttttccatttcccagggagaattcgtctctgtgatcggtccttccggtgcaggaaaaacaaccctgttccgcctgttaaatggaacggaagactgcacaaaaggccagatccttatagatgatcatcctatggagaacattcgcagacaacaaaaacggcagtttaagaagaacatgtctactatttatcaggatttctgccttgtggaaaacagttcctgtctagagaatgtgcttaccgctgcacttcctgacatgagctttttccctgctgttctggggctttatggtactgcacgtacagaaaaggcccttcagctgcttacccgggtcggtctggccgaaaaagaacaagagccggtaaagaacctgtccggcggacagaagcagcggacagccattgcccgggccttaatgcggcagccttctctgcttctggcagatgaacctatcgcttctcttgatcctgttacaggccgtcaaatactgtctcttttaaaagatattcaacaaaaagatggagtaacagttcttatgaacagccacaatctggagctttccatggaattttcccaccgtctcatcggacttaacaatggcagaattgtgttcgatggttcccctgatgaaataaatgattctgtgatccgtaccatttacggaaattccagtgtctgttctctgaataaaaacagaaaggatgtgggactatgaccagaaacagtaaaaacagatggaaaggactagcctgcttccttctttttttatgtctgtttctttttacagtagtctatacacaatgtgatcctgtcctgttctggaagcgccggagtcatcttactgatcttctatccggcatgtttcctatggattttgcttatattccacatattcttactccactgttttacaccatacagatgtctgttacaggtactgtgatcggctcagtactggcttgtatcctggcacctgcatgtgcaggttccatggatttcccaaaatggatccgttatgttctccgttttctcatacaaatcctacggtctttcccagcactgatccttgctctttgtgccacctttctcttcggtcttggaacctttgccggcacctttgccatcaccttgtatacctttgccattatgacccggcttacctatcaggatatggaagcagcctctccattggcttatcaggcacttcgaaccatgggagtatctcgtttcccagcatacatccacgggcttttcccggaaatagccccctcttttttcaccaacgcactatatatgttggaaaccaatgtgcgtcacagttctattcttggttatgtaggcgcaggaggaattggtcttcttctgaacgaaaaaatatcctggctggagtatgaaaaagtaggagccattttactggtacttttcctggctgttttcactattgaaaaccttagccgctatctagccgccctgatccgaaaagaatgcacattgaaaaaaaagtacataaagctgctgctattttttctgacagccctgtttattgtttgcaccatcactctgtctcctccggattttggcagaacaagccttcagaccatgaaaaatatgttttccggttttatgtcaccagactggggcttcttcttttccactaagaaagacggactttttacccttatcctggaaactctttgcatcgcttttgcaggcactgtaattggtacggttttctcgattcctttgtcctttgtgaataccagacgttttgtacctggatctgttgcctttattttcaatctgttgattattgccatccgatccattccttttctcatctatggactgatttttatccgtgtatctggccctggaccctttacaggagttcttactctttccatgtgcagcatcggccttcttacaaaacgctttacagaagccttggatgccatagatttgaaagcttatcgcgctctgctggctatgggagctcatccggtacctgctatatgccatggtattttgccacagctaaaaccaatcttcatctccatcttcctgtatcggtttgatgtaaatatccgtgaagcctctgtgcttggtcttgtaggtgctggcggcattggtgcacccttgatcttttccatgaatcagtatgcctgggaaaaggccggtgctatccttttgggcctgatcctgctggtttggctcattgacatgatttcagtcaagattaatcatattttataaagcccaatatagtttacatcaattataaattatgataaaattaatcacgaatcattgatgggcatttgtcatcaactgcaaagtcttatgcactatcataatagaaaagcaagacttcagctgtgacagggaggagaaaagtatgagaaagccagacaaaggattaacgcccatggaacaggaagttatgaaggttctgtgggaaagtcagcatgaactgacaaacagcgaaatcgcagaaagtatgaaggatcagaaagtcagcgtggcatctgttgcacagaccatgaagagactccttgaaaaaggggctgtctgtgtaggagatcatgtcctttgatatgctcccttctaggtagacaagtgaaataataaaaacttgtcacttaggagggagcatattt

SEQ ID NO: 72 - DNA, 147 bp, Unknown
  gut microbiota DNA sequence
ttatatatcagggcttcgttttcggatttctcccgtgcgcttattatctctgtcatttgccaaactcacgcctacggcgttcagacacggcaaataacagagaagctagcccggtcgaaatctgcgaaagcctcgcatgatatataa

SEQ ID NO: 73 - DNA, 11186 bp, Unknown
  gut microbiota DNA sequence
cctgaaaaagcaaaacctggatcagatcatccagaaaatctccggacaacggctccatttccctcatcccagataccttttcacggatcttccggcacatatggtaaagcattagtttatccgggtactgatcataaatcctgctgccttcgtaatccatcagatcacattcctgttccacctgagcctgcacccttctggcagcagaagggtaataggatttcatcagttcaaactcctgatcctgtaccttttgtccatcgaaaagcccagcttctgcatatgctgtataaaaaggataaaactctttatgatacatatggttttccccttattttcctgtctgttccagtatatgcagacagggcaaaataggttatagcctcctaaaggactgcacacctgttttgccctttttgttcttacagagtttccatgatcttctcagtaagacgcacactgtgctcagctgccagcctttcaaaggtattatactccataccagtgctgtcatctgcattatctgaaatggcacgaatgatcaaaaaaggtacctgattcagccatgccgcctgtccgattgctgcaccttccatctccactgcataagcgccaaaagtatcacggatatcattttttactgcccgatcacagataaactgatctccagaagcaatcctgccctggaaaacctggatctccggattcacctccctgcaggcatctgctgccagctgacggagctttgcgtctgccgggaaagaaagctgtcccatctggggaatctctcctttcttatatccgaacgctcctgcatccacatcatgctgcactacatctgtagaaagtacaatatcgccaatattgatatcattattcaagcttcctgcaataccggtattgatcagggcatctacctgaaaaacatctgccaggatctgcgcacagattcctgcattcaccttgccaatcccggaacggactaccactgccttttttccttttaaagttccctgataaaattccatggaagcttttgtgaccactgtcacatcttccatcatctctttaagtctggctacctcagtttccatagctccgataattccaatacaattcatcttctgaacctcttttcataaaaatagaagcgccagtgccgggaaaatcttcccttttttgcacactgacccttctattgtatcaattcatcagcctgtacgccagaccaaatttaaagaatttgtaattactatctattgttccgcaactgatttacaaagcatcacttccgtactctcctgtacggatacggatagcatcttccacatcatagacaaaaatctttccatcaccgaaatttccggtctggatctgatccactactgcattgatcacatcttctgaaagctcatctggaataaccgtttccaccttgatcttagggatcaggttaatggaagagttgtcatactttctggtagatcttatatttcctttctgatttccacaccccataatgttagacagattcataccatgaacccctcgttgattcagaatttctttcagctgttccagtttttctgcttttataatgatttccaattttttcatatccttcatctaacctttctttcatttgtaataaacatgtcccgccattcacatcatcatacatgaagaggacttcttttcacaaatctgccgtcccctgcctgtcctatatatatcccatgatctgctatcagttttcctcttaaataggtctgtaccggatagccatggtattcatacccatcccatatggaatgatcacaggccgtatgcataatatccggacctcctgtcacagtcatctggggatcatagattaccagatctgcatcttttcccacctgtatactgcccttctgactacacccaaagatctttgccggattttccgcacatacctgcaccaccctttcataagtaagccgtccgtcatgggcagcggacaaaagatagggatagcggttttcaatacctccacagccattagggatctttgtaaagtcatcctttccccagtttttctcctctgtggtaaacggacaatgatctgtagccactgtatcgatcacacctgtttgcaaggctttccacaaggcttcccggctttcctcatttttgattgcaggagagattacatattttacagcatccgctctcttataaacttcacttgtaaattccagatactgtgggcaggtttccacaaagacaggatatccttccatcttagcctttgctgctgcttccacaccttctttgttatccatatgtacaatataaagaggagcatgaagatgcattgccatgtggatcgcactgatatctgcctgtgctgcagcccactccggccggctcatataatgataccagggagaaagctttccttcttttacatatttttctgtaagataatccacaacgcctgcatcctctgcatgcagggtagccataccgcccacctttcccgcctgttccagaatagcggcaaactgttgattatctaccataatgccttcttttttatagacgctgtaacacttaaaggtattaactccatcttttacaaggtctgcgaattcttccagcacctggtcatcttccatcagatctgtaacaatgcagtggagtgcataatccacacaggctcggttttcatatgcctttttcttaatgtctaccgcctctggcagatgcattccttttttctgctttgcaaaatcaaacactgtagtcacaccgccacaggctgctgctcttgtaccagtaaattcgctatcactggaaactgttcctccgaaaggatccgacatatgagtatgcagatcgattgctcctggaagaatatactttccggacacatccactgcctgatcatcctttatgcaaagatcctgtcccacttctgtgatcttttccccctgaattcttacatctgcctgatacatagcggttgaagtaacaactgtaccatttttaaacaatattcccatgctaaaacctccttactgctgctccagaatctgaatgcagctctttggacatactgttttgcatacaccgcagccggggcatttatcaggatccaccactggtcttccctcttccagtgtcatggctccgaaaccacagtcctgacaggctgtgatacaacttttacagccaatgcatttctctttgtcaatggtactgatcccgtgccagtcccttgaaagctcttgctgggaaacaatgtatttaagactgcttcctacaatttctgataaggattcaattccgtgtctgtccataaaatcggacaatccattacaaagatttttgatcatcctgtatccatatttgctgatagcagaacagatttccaccataccacaccccagcatcatgaactccagggcatcttcataattactgatcccccctactcctccaagtggtagtccggtatactgtgcgatctgcgccatacaacccagcgcaatcggctttatagccggtccggaaagaccaccgtaagtggattttccatttacatgtagcttgggaagccctgtctcaatgtcaatgccaataaaacttttcacagtatcaataccgcagagagaatcagccccgcctttttcagcagcctttgcgactgccacaatatctgttacgttaggtgtcattttcacgatcaggggtgttccctttcttacatactgcttaatatcctggacacagccttccagaagctgtggatctgaagccgggatcttcccggatccatcaccctgtgggcaggaaatgctgcactcgatcatgtcgcagcctgcatcttccacagcttccaccagttccttccactgtggtctgttactagccataatactggcgatcacaacccgatccggaaactttttcttcagataacggatctcactgcaaagctcttccagtgtctgctgagtgcacagatcataattgaaaaaagccatctgctttttcccggcaaaatccaatgctcccatatttggctcagccaatgctctttggcatcctctggcctcaatggttttcagcactgctccgccccatccttctaaaaaagcacgctccaccttttccagactgtctgaggaaggtgatgcagcgatcacaaaaggatttacaaatttaattccgcaaaaggtggtactgatatctgccatatagacctcctatttttttccgatctttaccaggatcttagccattgtatctgtaatataatccaggagcagttttcccttttcctctgttgccagcagcggtctgcctaaagtgcctgtttcgctaaagtctctggtcagccatccactgaagtaaggttcaaactctacatccacgttcactgctttttccatatgcaccagttctttttctttatacagcatcatggaagtttccatatctcctgcgtgaatatccactggcacataaatatccttcagggattccacacagttacaattgttataaatagctggtatttccagattataaacaaccacatgatgcttcagattcatttcctgggaaaagcctgcaagcaatgatgtatttcctccatgtccatttactgttaccatttttttgaaaccatgctttgccagtgctgttacaatgtcattgataatggcaaaatatgtagtagctgaaaaggaaatcgttcccggaaaggtcatatgctcgtcactggttcctatcccaaggataggaagacaaagaaaagtaatatctgatggattatctttttcttccagctgctccatacacattctcaggatataatcatccgttcctaccggaaggtgctttccatgctgttcaatagatgaaagaggaagaagtacacagcacttctccttatccaatttttccacttcttcccatgtaagttcatcataatatttataaaacataagcctctcctttctgaatgccaggcaaattcatctgttctgaatcttttgcatatctgttcactcaaacaaaaactctcccttgcggatcacctctgtaccgtccgccaggaaataatctatatcttcaggtccaaccctgtggacaatggaagaaatcacattatggctgtgttttaaattccaggatccagaatggatagccagaaagctggctgactttccttcctctacactcccaaattcactatctcttttaagagactttgctcctgaccaggtagcagcctttaagcattccctgaaatccatacaatcaggtttttcacccagcccccggattacccggctgactgtatccatctcccggaacagatccggagaagtaaacatcatattatcgcttccaagtccccatgtgatcccaagccttgtaaatgcatccagttccgggaagccatctcccaggatcaggtttgtccttggacagcagacaataggaatttttttctttacaagaagttctttatcatgatcatcggtatgggttaaatgcaccataaaatctgtttccagttcaactgcacgctccacttccgactgattatattctctcttagatttttcgcagtcgcttctgccttctgcaatatggatagaaaaaatcttatcaccgcaaagactgcggatcttcttcattctttctttgcttaccgcataaatctgtcccattccaaagccgtctgaaacttccagaatcgaacggatctctttttcaaattccttctctgtggaatctgcatttgtaagggctggtctgcccagttccatcacatggatcggcaagcctttttgtgcctgccgcactgcctggatcccggccagacctccttccctgtaatccgctgccaggatgatgccgtttttcaacatttctttcagaccatcccggacagcttctgtcagttcttcactggtaatttttgccagatatttgtgcttcagaccattgggataaacaactgcctcttccaatgtaagtcctactcccagttctttagcacctgtgtctcccagatgacagtgtgcatttacaaatgcaggtattacataatctccatgaaggtctatgctgctttcaaattgctcatccgtaattccctgaatccttccctgatccaccagaatggttttccctttcaccagttccagatttttcccatagaaaatatttgcatttttatagcttttcaatcctgtcatctcctgagcttgtttcttaactatctgtttctttgttctaagttatctgtttcttaattctttgtttcttaattctttgtttcttagttatctgtttctttgttctctacaacgatctcgccgcttttgattttttcgcaggtatcctctacagcactctttacttcatcaggtacgttatctccaaaagttcctacgaaaactacatcatcagccatgccaggcatccaggaggttccaaactcatctgtacctactttggtaattacttcttcgattgcttttcctgtatcagcgatgcaggatgtaatgcaaagatcagaaccaagatctacctgatccgcaccatagccgatccattttacattattttctgtacaagcctcaatcagtccaagaccggttgtatcacaggaatgcatcagtacatctgccttctgctcgatcatggaaagagcagcctctttaccaagtgcagagtccgtaaaggtaccggacataactgtgatcaccttgatatccggatctacagaagcaacaccatcaataaatgcatttttatcagcaatctggctagactgctccatgcctcccagataacctacaacttttgactctgtggacattgcagcagcaactccgcatgcataagccgcttcatactcttttgtatagcagaatcccaggtttgccggcggttctacaccatccggacatttattggtacagaagaaataggtatctggataatcacctgctaccgttacagctgcttctgtaaactcacttccatgtccgatgatcaggtcatatccctcgtctgcatatgttctgaatactgtttctgcatcagcagcagtaacgctttctgtatatgcagtgtcgtaaccttcctccttcaggtcttccagtgcttcataagccagctggctccaggactggtctgtaataacccctggaaggatcagtgcaatcgtctcaactgaagcggctgcctctgttgtttcctctgctgcatcatctgttgtctcctctgcagctgcttcctctgccatgaccggtgctgacatgctaaatgccatcaatcctgccataaccattcctgccattcttgtaatgaaatgttttctcataataggttcctcctctggttatataataaattttataactaccttttatcttccctctttttcgtacacagtcccaagtgctttcggtgctcttacacctctgccaaacagaaccatactgacaatggtcagtacatagggaagcatcagtaaaaactgatacggaatattaataccataagcctgcattctcatctgcaaaccctgggcaataccaaacacaaaagatgcgatcaaagcaaggataggattccagtgacataacgtggacacagccattgcaataaagccacggcctgcactcatttcttccacaaaacttcccatagtagccactaccaggtatgcaccaccgatcccggaaaggaatcctgccagcatcactgcgatatgcctgtataaaataacattgattccacaggcctgtgcagctcttggattctctccaatagctctgagctgaagtcctgctttcagcttcatcagcacgaaccagcagacaactgctacaacgatcagcacataatacaaaatcgtctgattaaagaaaatatttccaataaaaggaatatctccaagcaccggtatttttatggtgctcataacatcaatgctaagtcctgaaccacttgttccgaaaataacccggtaaataaagctggtaaatccggcagcaaatatgtttacaacaattcctacaacagattgatcctgtttccttgtgattgaaagaaaagaaatgatcattgctgtaagaagaccacctgcgccgcctgcaagtatcccaagaaaataactgtgggtaaagtaaacaactacaaaggtgacaaagcttcctgtcagcatctccccttcacatccgatattcagaacaccgcttttttcagcgatcaccacaccaattccggcaaaagcaatgggaattcccattcggataccggctgcaagcatggaactgataaatgccatcacatccatttataccgcctctctttctttcatcttcacagtagtttctacggtacttttcacactttctttcagatcttcgcaagcctgtttctttgatggtctgaacttttttttcagctttgcgctcagtcccagaagaatgaacaaaaccatcaggcctttcaacatcgatacaaaggtagtaggcactgcacaggtaatctgcattacatttcccccaacattcaatacagagaagaaaaacgctgccagcaggattcccaccggatgatagaatccaagaagcgctatcagcacaccgttaaagccgtagctgttgcagataccatcctgtacacaatatgcaaagctgcacacctccacaacacctgcaaaccctgcaaatgcaccgctgatggccattacctttgtgtaatacttttcaggatctacgccaccatactgcgctgcttttacgctgcctcccaatacacggatcttatatccgaaagttgttttctgcattacgatccaatagagcaggatgcaaaccaatacaataagaatggagtaactgaacatggtgccttcaaaaatccttgggatccgctcgtactctgcaatagattctgtctggggagtagagcttccggccttcagcatcggaccatgatccagatatgcgataaaatattctacaatgtaattcagcattaatacggtaatgatctcgcttactttaaattttgctttcagccatcctgcaaagccgccacatacagctccaaaaacagttccaagaagcatccccacgataatagacatccatcccagatgtttacctatagtggtacttaccagaatcattgccagcgctcccatcaggaactgtccgtcaccgcccaggttgcttaatccacattttcctgcaaatgcaacaccgatagccacaagacttaatgggatcatattacggataatggttccgaagtttcccatatttgtaaacggtgaaaggatcagctgcttataggtttccaatgggcttttgccaagaattactacgaaaattgcaccgatcagcatggctgccacaaagcttatcaatatgatcgccagtgttttcagcaaatctgatattttctgttttgtcacttcattcatgtgctttcacccccatcatcagacttccaacctcctgtacagttgtatgtcttggatctacttcaccaatgatctttcctttaaacataaccaccagccggtctgccaggtaaaacagttcttccagatcaccggataaaagcataactcccattccttcatctctggctttcagtatattatcccggataaaccaggatgccattacatccactcctctggtaggataagaacagatcattgttcttggttttttactaagctctcttgcaagaataaacttctgcaggtttcctccagacaggtttcctgaaatatccccaatgcctcgggctcttacatcgaacatttccatataatcctttgtatcctgcttgatcgcccgataatccagcagtcctgcctttttctgtattttctttctccttaatagccagttatcaaaaagccggaagcttttaacagtggccactgtatttctgtctgcaggcacataagccacatcatggtcgataaaggtctgtgcctttgatttccgtatctcttcgccgtccaggaaaagggagcctccgcaaatttcccgaagccctgctgccacctctgcgatctcagcctggccgttaccttccacaccggcgatccctacgatctctcctctgtggatggtcagatccacaccggaaacagttttcacacctctgtcgtccagtgcttccacacccttcagctccagcaaaggtttttccccttcctccagttctatggtagctcttactactgctgtaggtgcttttacttcttctcctaccatcatattgatgattttctgcttatctgcatccctggtcatcatatggcctgcaactgttccatgactgagcacggtgatccgatcgctgatcttcagcacctcgtccagcttatgactgataaacaccacgctttttccgttttttaccagtgcatgtatggtttcaaagagcatgtcacattcctgaggtgcaagcactgcagtcggctcatcaaggatcagaagctctgctcctgtataaagaagcttcaggatctcaagtctctgctgcattcctatagtcagtttagctacggttgcatgagtgtctacctgaaggccaaactgttttccaatatcctccagccttttctcaatatccttttcttttactcttgaaaaaagagaatcatttccaaccaggtaagcattttcagatgaggaaaaaacatctaccagcatgtaatgctgatgtaccataccgattcccagcctgagggcatcctttggtgatttaatatgtacttctttccctttcaaaaggatctgtccttcatccggatgataaagtccgtaaataatattcattaatgtactttttcctgctccgttttctcccagcagtgcatgtacctcaccaggacgaatggtaagatcaatatgatcatttgccacaaactggccaaatgtttttgtgattcctcttaattcaagtaatggttttgtttcactcatattttctaccccgcagacacaaaaaaagtgcttctccttttcaggaaaagcacctttgcttcatcatgttctttaatgttcacttattatctactgtttatttacttctttgctgtttgcttatctctaagatgtttcacattttatccattt

SEQ ID NO: 74 - DNA, 592 bp, Unknown
  gut microbiota DNA sequence
gtactaactatttaccgtgtacgatcaaatctccttttccactataccataaccagcatatataattctaccattcctctcagattcccagtgaatccagtgaatatttgttttcccgtgaacgatatgctgtggattgggctattctgaaaatacctccatcataagcctgattccaaccttcaatccttcctcaaatgaatctttctcccatgcacagcatacactcccatgacgaatcatgatctcctcccaaagtggtatcctctcccccatatcgtcctccaccactcggtccatgccttcgattccttgcagccattgttccagttccttttcttttgcctgcccggctttcctggcagctgtattttccttccacaggttattttccgtgtaatgttcatagatcagatcaagcaggttttccacaggaggatagtaatgtggctttgtttctgatatatagttctccagtatatcttttaacgtacttataatgctaccgtcctttccagtcaggattttgtgtcttaattatagtgcatattcctgcatatttttatacataatccttaccaccagacgcaca

SEQ ID NO: 75 - DNA, 2375 bp, Unknown
  gut microbiota DNA sequence
atcacatattataaaatatattataaataagatcgttcaaaggaggacggttttacagaaaaagcaaatattatgagtaagaggaggagaagcagtgtttttggaaaagcttataggaagcattatcgctttatggggaattgttgttttgtatggtgcatttaaaaaagcaacgatatgtaaaaagggacagatagcttcagggatagtgataactgtgggaggaatagcagtccttctttcagagatcatgaatgccccatccaagcctaattacggtatagttaaaactgcatctaatagtaattccttattcaaacctgcatttattatagttggaatcggagtggtaatttatatttttaatctgatctgtaaaaataagataataacagtagagacacaggaaaagaataaaaaagaagatttttacaaagaatgcctcaaatcggatatcaaacaatgtaaaaatgaaaaagaagtacagaaagctaaattgatagccgaaaaacatgggattaaatattcagatatctcagaactgtattccgaagcgaaggtactggttaaaaagaaagagcaaaaagaactggatgattctttaaaagctaaaagggaagaagaaagggcagagcagaaaactcttgtgaaatatgagggcatgactggaagagaaaagcggattgccatgcttactgctgaaagagctgcacttttgcaaacagcagatacacttaaaagtggagcaaaagctgtgatgaatgcttcgcaacaaaaagaaaaagattgggcaattcatggaggcattgcaaatggaatagccggtcctgctgccggagcagcaacggctcttaatatccaggcgcaaaatgcacagatacgggctcagaacaaagcaaacctgcaggctttttccccgctaatcacgaattcttatatgggagccgtttcttatgaaagccaggcgcgaggagttgcagtatctattgatagtgccaagacaaaactgctggcgaaagacgatgtgcagacctgtttgaaaagacttgcttttacagagactaaagttgaagtatcggaaactggaacctgtaccgtgactacgaaagttgctcttactgaaccctttacaatatttgaggatgtaaaagctgttatcgatggaacaataatagcaaagatctatgatggagaaacgctggttggaactgctgcccttgtattaccttccaaaggaatcggttattaccatgatccttacccgttaaagggaatgtgcctttattgcggaaaaaaagacagagactaccgggtagaatttgcagctgttgatttatgggctatggagatatgattatgaaaagaaataagaagtgtaatatagcagggattttgtttacgctgcttttaatatatgagacatatagttatgtgatgtttctaaaaatgctttttaaatataatgtagagatggcatggaggtggctatacttccgttcttatgcagacgggggtgaatgggtgatgcttatagggaaaccagttgcaatatgttcgctggtaatcatgatcacttcttcattcagattgaccaaggcaagaatcgggatgcgaaagaaaacagcaatcgtatattttcttgcacagttcagcatgtggtcagttacttttagccttaatacatatcatgctatcttaaatagttggtctatgagagctttcctgtataacgtgtggaactttggaatgatctatatttgtgtgattgtatatctgattgcatattgtttataccggagtggaaaagcaaaacagaaagaaatcgttccggatacgtgtagcgaggaatggaaaataagctattataaaaatctgctggatcataaagtaataacgcaaaaagaatatcagtccatgatagagaagattaagattgggcaactaatgtagcaaggggggctgtcggaagaatccggcggccttttgtgatcattaacggaatagtgccgtggtggtcatgacagtgcccatctaattaaggtacgccgaaagtctgtattttctgtgttgatatcagattataaaatcatagcttgaaactctttttttggcatgttattatactgtcgtgctgtgttttagaaaaaaacatgagaaaaggaatatgcaaagttctcagaaaactatacagaagaaagaggaaattaaattgccaacagagaaaccaaccaagaacaccggttcgaacgcagatatgggtaatatatgggtcaaaacggcctcggcgaagcctgaaacccgcataaacactggggttttggccgatattcccaagttatcgccgatacttgaccggtgttttgtaaaattgatag

SEQ ID NO: 76 - DNA, 572 bp, Unknown
  gut microbiota DNA sequence
ctcccaagagattacgaatgacccggctgtgataggagcagactgcggtacacattgtcagaatgcgctttacattcagaaacatcaccgtgacaggagtttgtgcaacaacactgacattcagcacagcacccggcgcacaggcaaatgcggcagcaaaggtctgccccggtcctgctttggacaggatctgacgatttccccaaatatcctcctggataatcagaatgcttcccgaaagtacaagacctatggattccgccgtatctcctgtatgcataagataggtttcctttgggaaacttattttttgagcatccagacaagagagaattgcggtaagctctgtttccgtaataccggagaacagttgtgaggaacggataacagataaaaaatctttcataaaaatcctctttcgttgaaatatcaaccgacttgttgattttataatactataattgagccaagaaagcaaggaggtgctgttatgaaaagacggatcattgaaattgatcgggataaatgcaacggctgcggcgcctacgtcgctttccacgagcggttcatcg

SEQ ID NO: 77 - DNA, 152 bp, Unknown
  gut microbiota DNA sequence
gcagcaggcggcggatatgcacaggttgttcctatggaggatatcaaccttcactttacaggtgatttccatgccatcggtgcagcgaataacctgctggcagcaatgatcgacaaccatattttccagggaaatgcactgaacattgaccc

SEQ ID NO: 78 - DNA, 383 bp, Unknown
  gut microbiota DNA sequence
cctgccatacggcatttgatatccaggaatttctctgcaccaaggtcagcaccaaaaccagcctctgtgatggtgtaatcagccagctttaaggccatttttgtagcagttacagagttgcatccgtgagcgatgtttgcaaatggtccgccatgtacgatggccggtacatgctccagtgtctgtacaaggtttggcttcagggcatctttaagaagtgcggtcatagcgccctctgcatgaaggtcaccagctgttaccggcttctgctctgatggtttgccatatgtatatccgatgatgatcctggaaagacgttctttcaggtctttgatgtcgcttgcaaggcaaagaacagccatgatctcagatgcaaccgtgat

SEQ ID NO: 79 - DNA, 8871 bp, Unknown
  gut microbiota DNA sequence
gacgttctttcaggtctttgatgtcgcttgcaaggcaaagaacagccatgatctcagatgcaaccgtgatgtcgtatccgtcttcacgaggcataccgtttgttcttccgccaaggccgtctactacattacgaagctgacggtcattcatatctacacatcttctccaggtgatcttacgagggtcaatgttcagtgcatttccctggaaaatatggttgtcgatcattgctgccagcaggttattcgctgcaccgatggcatggaaatcacctgtaaagtgaaggttgatatcctccataggaacaacctgtgcatatccgccgcctgctgcaccgcctttaacaccgaataccggtccaagggatggctcgcggagagctaccataacatttttacccattttctgcattgcatcagcaagaccaacggtagttgttgtcttaccttcaccagccggtgtagggttaatagcagtcacaaggatcagctttccattttctttgtcagattcttttaaaagattgtaatcgatttttgctttgtactttccgtactgctccaggtatttgtcatcaatccctgctttttctgcgatctcagtgatcggcttcatttcgcattcctgtgcgatttcaatgtcagttttgaaccccattgaattacctcctttttatacgctccgcttttcatcggaacgcctccgcataaatatctaatttattaaaacaggattccccatcttaatcaagcaactttcaaaaacgctttcagagaaccaatgatcacatcacccatcactgccatatcctctgctgcaaaagaaactgggaaattatctgaaaaaaggatctgtgaagaaggtggaaactcctcatccccttcccacaggatcatacggatctgatagcctgggtaaatagccacttcataggcaatatccccatacttcacaggttctgcatggatatgctccatgattttcttaaaatcaccgatcctgttcccgtaagtaaaagcaagccttttgatacatctgccgtcaaactgacggagatatacctcaccccagggcatttccctgtaggttttgaaattaccggatccacaggacttcataccgttcaaaaggaaacgaatggtaaggatcttggcatagatcatctcctccagcggataaaagcctttgtcatcctcctggtggcttacctgaaaatccggataagtaatatgatagacagtaccaaggaatgtaagtgtaaagcttctgttttcctgatcataaggaatacctagattctcccctagtacctgaggatctgcctgtccatactgttccagatagtgctcccagggcatccgctccttgctgtccttttcgtaatttaaatcttcaatggtaaatggcattttgtcctccatctaactcttactttctgttctgctgatccttcataacgtccggaaacattcctgtatctgtatgagggataaagcaggctcctacaaattcatccatataagtgggaactgtagaaagctccatatatgtcatgttggaagccagttcatatgtctttttctcagctgcagtggaaagcaacatcaaataagcacctgtcagtgaagagttaccgatgtaatggaatttatccagcggaatatccgggaacataccaatatttactgcatttcgcatattgatcccgcttccgatgccaccggcaacatatacatcatcaatcatggatacatcaaaatcaagggaactgagcatggtgcggatagctgagaaaatagcacctttggcacggataaagttgtcaatatccacctctgtgatctccacatccttaacagatccggcctcttcttcaaaggcgatcacatagctgcccattccgtatttgtcatgtctgatcctcttgccttcacggacaaacttgcccttaggattgatgatcccgcacataaacaattcactgatcacatcaataataccagagccgcaaagtcctacaggctttgtgcccggttctcctaccacactgtaagaaggctccatggtctccttgtcaatggtgcaggcttcaatagccccgtcagtggcacgcataccgcagctgatatcaccgccctcaaaggcaggtcctgcagaacaagcacagctcatcataaagtcagagtttccaaatactagctctccattagtacccaagtcaataaacagggaaaattccggtctgttccagatcatgcttaccaatgtaccggctgtaatatctcctcctacatagcttccgatatttggcgcaataataatatgtgcgtctttattaactgcaatccccagatcagaagcaaacagggaattggttttgtaaaatgcaggaatataaggctccatacggacaggatctgcattcactcctgcaaaaagatgattcatagttgtattggatgctacgcacatccgatagatctgacttgcacgaagcccggaacttttacacatctgggcaatcattggattaatggtttccttgatgatggcatcctgaagcttcttctttccacccggcttctgctgctcaataatacggttgatcacatccgctccaaaacggatctgtccattacctgaggatgcctttgcaaggatctctcctgtttccatattgatcagtacaccggatactgtggttgtacctatatcaatggcaagtccgccgatggtcactttttcatccatgccataaatatcatatacaaacagatcacttggtgttgtacggactacacatttcactttgaaatgattctctcttaatacatccggaagctttttcagcaccatataagggatccgtacctgtttcagattcatatatttttttaatgccctggtaagtctttcattgtctggcatggtatcctcaagactgggctcatccatggacacttcgatcacatccagactatttctcaattcaattcctgtaagttcaacatcttctttcgctctttcaaaaatagcgatttcttcctttgagcttaggtcagcaaccttcatcctgcttttatatgcagatgcaatatcaggcaccagaacagttacatccccaatgatcttactaacgcaggcaagcctccatccaagatcatactcttcatcactgatatgtaatgtctttttactgtcaagctctccctcttttaactgtacccggcatttgccgcaggaggcgtttccggaacatggtgcatcgatggccacattggaatctcttgcaatctcaagtaaattatcccccgcattggcatacgtctctaccacactgccatcttcaaatgcaaatgttatcttaaacatcagcaaccacctttctcgaaaaaaagggctgaggccgaagccccagcccatgttatttctgtatatagatcttcggactgtaaattacagctcaagataagaatctgcatacagggtgttgcccttgaatacgtcacaggatttaattgtctccatcagacgaaggtcattcgggtttacgatagcggaagttaatccctgcatcatagccatggctaccagtgcagaatccatgatcggacggatgttcttcggcataccgttactgttgttggacagaccgcctgtagaattcaatcccatatcagagaacatcttaatagcttccagaacttccatctgtttgtcctgcataccttttactaccaggaacagaggatcgaaccacagatctgtaggctccataccatgctccatacctctttcaagaagcatctggcaatacatcatacgctcatcattgtcttttgcgataccctcgccattgcaaagagcgataacgattgcatcgttagctgctgcaaggtcgatgttctcaattcttcctgctgcatcagcagagtttacgatcggttttcctttacttctgttgtatacggaaataccagcctcaatagccttcttattggaagtatcaagagcaagcggaacattgtcgaaattctcctgaagaagctttacagcccatttcatcaggtcttcaccatcattctcagcaggtccgatgtttacatcaagatatactgcaccagcatccagctgctgttttgctctttttaagatcggctcaggatctctttctgtaaatgctttatttacgatgggagctgtggtggaaagtctctcaccaatagtaacaaattttgccattgtattgttctcctttacattattaatttctacagtacacagccttaagcttcaaggtcttttaagaacttaacaagctgaacagcttctcttggtcctacaatgatctcccatccaggaagtttggactcaagatctcccttaaggacagctaccttaccaggtataacaagttttctgcatttaacctttggctcaacattctctttgataaactgagaaatgctgttaccggagaatttaccggctgcccaggatgtaagtacagataatccacctgcatcattgatcacaaggttaaggggaacgcctgaacgctccaactctccggatacaaggaagtatgtaagagcgaagtctactgttgtaacaacaatagaattctcatctccgccattcatcggataaatgcctggctcaactttcattggcttctgcgggtcagtgaatacgttctgacgcagaccatacagaggaagtgcttctgcataagtcatacgctccataacgatgatggaaccgtatttcatagtgaatacagctgccagcgctgcctgcagatggaaatctccgcttgcgatctttgcaagattaacgatagacggatagccaaaggttctgtcctggtctttcagtgctgcacgacgaacctgtacagcgtttccgaaagtctcttttaaatcagcacctgttacgtccagtacaagattcttgttgccaagcttctcgatagctgctgttgtatcatataactcattaaggtctttgcctgaaactccaagtacaacgccagcagctgttgcaactgcattcattgcctcgtagttggaagcatttgcaccgtttaataccggtttgctgtccttgcatacttcaagggctgctttagcgatctcaggatctgtacatcccagaaccagagttcttccaagacctgctgctttctgaaccagtgcagtataggctgctgcatctgcgccttcgtggcagttcacatatacaacctcagcatacattctctcaccgatacggtcataatcaaccttcgggatctcagccagtttggcttctacagtggcatcatccatgcctgtgcaaagctcaacagcatatctggtcttgttaacaaatgttttctcatgtctgaataaaacagtctcaccgccaagggtaagctcttctgcgcctgtaccgatcttaatggttttcattggcggagcggtagcctcagacagagatgccagtgcttcctcagacatatgaggacactgctctattttcattgcgccctgtgcaactttcatggagaaagccatacatgtcgggcatccacattccttacagtttttctttggtgttaatttaaagatctgaataccattcagtgccatatcttttcttcctcctaactattacacaagtgctttgatcattttggcgatggtagccacagactgaggatgtctcagtattactgcatcagaacctgctgccaggtctgctgctgctgtcataacttccatatcaattccacgctcgtcctcagatccccactcaggcatatctgcctcggaagcaacggattcttttacgccccatgtctcagaagctaccggtgtaataatcggcatctgcagcatattatcattctgggaaagtgctgcacctttgatacgatccatagtggaaacaacatactcataaccatagcctacagtagctgttccaacattcataacgatcttctttgcatcaacacctaactgtgttgttacaacgttcagctgtttagcaaggttgatatcatcagcagactctgcgccaacgatctggccataagcaagacctgctgctgcaccgattgccttgtagttctcttccttctcagacagaacaatgatgttccggccctgaagagcctctgcaaccttaggaagaagttccgcatccttctccacattcttgcagccctctacaaccagtggacagtcaatagcctctgcaacctcttttacaactgcgatcagttcctctgtagatttgttagctccgttaggatctccgccatccagattgagtacaacaaaatctccaccttccatagcagctgccttcttggcaatctcagccatggtggtgcagccttcataatatgccctgattccaggagcaaaatcatcaaggcccatatcggtgatctcaacaccgatcttcggagcgttctcggtcggattatcaaatgtatagaaagggaatgtggaattgcctcctataacaactgctttatcgccagttccaaccgtaaccgcattgatctttgcattaaatttttgtggtttctgattaaatggcatttctaataagcctccttagattattcaaaaataattatactacatcatcgggtccattgacaatgccggatgattatgttctgttaaaaatgcaacaagcacttccggatctgttgcaacggtttcatccccgatcatatccgtaaaattgtcaatcccataaagctcttttgcagtcttattcaagcgttctgcaactgtgtcctttaattccttgggcatccatacaatacgttcaataccgccttctgccttcatgaatttcttagatgaaataaaatgttttccatgtcccataaatccaggtgtctgaacaccgccgccagtcatggatgccatctcggagaacgtcattccaagaggagtcataccggcatactcacggtttgcaatcaccacgccattggaaaatggctcaataccgcagatacattcaaagcatccgcaggaagtcataggatcctgcataatggaatacaaggtaacatgctcaagagctccctgtgagaacttctgaactgcctcatccacatcttcataagaccccaggttctcatcaataggacgttcctttgtgatcacctgacacggtccgtttggatcaagctcattcgtagcttttgcatcaagccaggaaacagcaccgcaaagccccagtctttcaggtgtgactacgcacacatgggacggagaaaatgcctggcacaggatacagctgtaatacacatctactgactcatctgtaagagtctccagacgggcatcacgtttgtcaaaggtaggaatacctacttcatgacgcatcctggtacattctgccggatctgtaaagatcgttacctgacatttgtctacaactgcttcaaattcattcttcacctgggtatacagcacttctccgaaatgtttcgcacggaagcctgcttcataagcctcattactgatacggatacggaacatatccctttggcctgtatgataaacaccctcgatgcagtttatataattgtggaatttacgctcgataaccggttcaaaatccggctgcatcttctttcctgctacttctaccaggtaagcaagactatgtttgctgccaggttcaaaggtatcgatttccgggcctacgaccgtgatcttgtgatcctcaacctcgtccatggccttggtctgtacaagctctacgcagtccacacgggaaccgtcaaattccacacgcatatccttacgacggatgatctccccctcaaatgcagaggcaaatgcaaccgggatatctacttttgtgatcttgatcttaatatttctggcttccaaagaaaccttattgaaatctgctacattggggcatgcgatcagtgcgcctggtacttcttcaatattctcagtctcattggagattaccgggaatccaagcttgatcgcaccggctcctgcagccagtacaacgtcatctaccggcttaaaggcatttacaaatgcaggtaccctctcagcggtataagaaatcagtgatgctgcatcccctggtgttacattaccaaagatcagggctgcacgaagtgcaacagataccacatggatcacagaggtaacgtccttaccaagaggaacgatacggagattgtatcccatcttaagccccagttcctgagcctggtcaataataccgcctaccagtgttacaaggataccctgtgcctgatagcttttgatcagatctacgccttcctgggctgtaggtgcggatccaaggatcacggctacgcctggaatgtcgccggtaacaaggggtacaccaagctcacggatgattgaatccgcaagatggccatagcatggctcctgataaggttctgcaccatccagatatttcagtgcttcaataaactctgcgcacagagctgtagcaacaccggacatcagagcattgtcaagggtctcttccctgttcatcagggattttactacaccaagagcttccttaagctctcccagtgttttgatcttaacaccggtaacagcatagtaacacggcagacagtatgctgtatgtggaaatcctacagccttgtctgcgccattggcttgtacggcatcgtttacagccttctctgtaaggccgtaaacagcgtcatttccgctgaaaattctgttgattaacattgtttccatctcctttttgtatgttaatccaaacctgaatcaagaatgcctcggcattcttgctgcgaggtgcgcgtcatgcaattgcatgacatacttctcctgcgc

SEQ ID NO: 80 - DNA, 89701 bp, Unknown
  gut microbiota DNA sequence
tcacaagaccaaaactttaccctccgctgcaaagctttacgtcatgtcctgttaaaacaggtaagacaaatccgcaattacatcattggatccagtgcaagtgcaggatgacctttctctgtaaggaagcctaccagagtctccggatcagttgctactgtctcatcaccgatcatatcagtgaagttgtcgattccataaaggtcttttgcagttgcatttaatttgtctgcgataaactcttttaattcttttggcatccagacgatacgctcgataccgccctcagccttcataaatttcttggaagcgataaaatgcttaccatgtcccatgaaaccaggtgtctgaacaccaccgcctgtcatggatgccatctctgagaaggtcattccaagaggtgtcatgcctgcatactcacggtttgcgataacaacaccgttggagaatggctcgataccacagatacactcgaagcatccgcaggaagtcataggatcctgcataatggagtacagtgtaacatgctccagagcaccctgggataatttctgaactgcttcatcaacatcctcataagcaccaagttcttcgttgatcggacgctcttttgtaattacctggcaaggtccattcggatccagctcgtaggtagccttagcatccagccatgaaactgcaccgcaaagtccaagtctctctggtgttaccacgcatacatgggacggggagaatgcctggcagaggatacagctgtaatatacgtcaacagactcatctgtaagatttgcaagacggtcatcacgtttctcaaagatcgggatagcaacttcatgacgaactcttgtacactcagcaggatctgtatagatcacaacctcacacttatctacaacagcatcaaactcattcttaacctgtgtatacagaacctcaccaatatgtttgatacggaatcctgcatcaaatgctgcatggctgatacggatacgctgcatatctctctggcctgtatggtatacaccctcgatacagttgatgtagttgtggaatttacgctcgataaccggctcaaagtctggctgcatgttcttaccggaaactttaacaacataagcaatgctgttcttgcttccatcttccatctcgtctacttccggtccaacaactgtgatcttgtggtcctcaacctctgaagcgtcacaggtatgtacaagctctgcacagtctacacgggaaccgtcaaactcaacacgcatgtctttacgacggatgatttcaccctcaaatgcagatgcgaatgcaaccgggatatcaatatttgtgatcttgatcttaatgtcacgtgcctcaagggaagtagcattaaatttgctaacatcctcctgaacgatcaggctcttaggtacacggaaaatgttctctgtctcgtttgtgataacagggaaaccaagtgcgatggcaccagcaccacatgcaacaacaacatcatccagaggtccgaaagcattaacaaatgccggaacacgatccatggtatatttcataagagtgcctgcatcaccaggtgttacattaccgaagatcagggctgcacgaagtgctacagatactacatggatcactgctgtaacatccttgccaagcgggataacacgtacatttgcgccagtattcataccagcttcttttacctggtcaatgatgccgccaaccagtgttacaaggataccctgtgactgatagctctttacaagagcaacaccctcttctacagaaggagctgtgccaaggataactgcaacgcctgggatatctcctgttacaaggggaacacccagctcacggatcactgcatcagcaagatggccatagcatggctcttcgtatggtacagcaccgtcaatatatttcaggacttcgatgaactcagcgcaaagtgcggtagcaacaccggacataaatgcatcattcagtcttttttctcttgtcatcagtgtttttacaacaccaagggcttcttttaattcttttaaggtagtaaccttagaaccggttactgaatagtagcatggaaggctgtaagctgtatcaggaaagcttactgctttgtcttcgccgtgctgagcaattgcagcatcaatcgcaccttctgttaaaccatatacagcgtcatttccgctgaatactctatcaaataatgtcactgtcatacctcctattatttacagacttgaatcattatttacaggaaaccctccgatcgctcatctgttatcagatggtcccatctattttattcttgatctttctgatctcatccgtcacagactggctgaaatcatatggggatttcccctggcggtctgcgtccattacttcagtattgtaatggatcatcccaaggagatcttctgccgggatcctggagcggataaactcctcatcctcagagtttctcactttgttagccaccactttcacctgggatacacccaggtcttttgcaagacgcttaacattcttgtaagtctgtacgcttcttgcacccggctcgatcaccacgataaactcatccatactttctgtggtaccccggcccagatgctccaggccggcttccatgtccatgatcaccacatcatccctgtgaaccacaagattgctgatgatccttttaagcattacatgctcagggcagacacatccgcctccccctgtctccacagtaccaaggacaagcagttttactccgttacaggtcttaccgtaggtatccggaatatcatccactttaggattcaatgtatagaactgattccggctgtttgctcctgtacgttcctccacaagcttacgcatctttgatatcggtacaatggaatccagtgtatcctcatcaaaaccaagggcaaggccaagattggcatccggatctacatccgctgcaagaaccttcttcccctcatctgcgtataatctggcaagtgttgccgcaaaagttgtctttcctactccgcctttaccggttactgctatcttcataagttaatcgcgcctttcctgctatcagattccgagagcgtcacgttttgcttcgattctctcgatcatcagatcgcctaatttatcaatgtctttttcaacggtataagcagcctctacccagtcacgaacgccgctggtaagaagctctgccacctctgtagatccggaaacataaggatctacaccaaggaaggtatcaagacctgtagctactacatagttaccgatagatacagccttctcagacatccactccggagcacatcctacaacaggaagctgggaaatgttaagtccggaatcctttgcaagctcagctgcaaggatcatcatacggctgatatcaacacaggagcccatatgtaatactggtgggatatctgcaagctcgcaaacacgtttcagacctgcaccgcaaagatcctttgcagctttgtccataaggcctgcacgggctgcagcctgtgcggaacatccggaagcgatgatcacgatatcgtttgcgatcagcttcttcatcagttcaatatgtgctgtgtccggtcttactttcgggttgttgcagccaaccatagcaactgctccacggataacaccggaagtaatgcactcaataagaggtttggttgtaccagtctcatcaacctgagagttggtaacaccgtcaagtgtcttaacgatagcttctacagaatatccaactgttgctttatgcttcagctgaggaatatgtacaagctccggtcttctgttcttgaagttctcacatgcaagctttacgatattcttagctgtctctcctgcgttgtcagaatggaactcaatgaaatcagagtctggcatctggcagatcggagaagttgtgatgaacttggtatggaagcacttggaaagaggcccaagagccgggaagatacactgaacgtcaacaacgatagcctcacatgcacctgtaagcactacgttctcctgctgcaggaagttacctgccatcggaataccacggcgcatagcaacctcattggaagtacagcatacaccggatacagtgattcccttagcgcccatggattttgcataatcgatcatttccttgctgtctgcatactcacagatcatctcagaaaggcttggatcatgaccatgaacaacgatatttacattctcttcaaccataacaccaagatttgcttctgtgtcaattggctttggtgttccgaacagaacgtcagagaactcagttccgcacatagaaccgccccatccatcagaaagtccgttacgaagggactgacggatcagagcctccggcttgctggtgttacccatatgggtcatatgaagagcgcaggaaacctcacggtcgatcgctcttggctcaatgcctgctgcatgccacagatcctgtgtatgctgaggagctcttttaagccatctggaatagcctttgatctttccatattcttcctgagcaagttcagacatctcgtgagcaagatcgtaaatatctcttccctctgtctcaacgccccactcttttgcaatacggatcagcttctcaggatcctttacctgataatcgccgccctcttttgcatggctcagtgtgatacagatctcacggccgtgatcagaatgggtagcagcaccgccagctacgaaacgaaggaagtttcttcctacgataccgtgtacgtcacatccgcagatacctctggatgcctttggtgtaatacggcatggtcccatggaacagatacggcagcagacaccctgctcaccaaatttacagtgaggagtctgattctttacacgcatctgccatgcatcagcgcctacctttgcacctgtctcaagaagacgggctgtggcagcttcaaactcttccactgtagtcaatttaaattcgctcattattaacctccttaatgatcatacatccatgcatgaacaattttcaaaagagaaccatggatgtacttcttgggtatattagatgatcccagggcagacatcccatccccacccatgggatattttatttaaaaaaaatcaaagatttaatttgccggcaatttcacgaagtgctttctttacaggattatcctccggaagctctaccgtgggacgtccctcacagtcaaactcataaacagactcatcctgcggaaccactcccagaagtgtaaggccctgattccgaatctcttcctggatcccctcattcagcttgccctgtggcgcacggttcacgatcaatcctactgtatcaggatgcatgttgcactcctggatcagctttgcaatacgtcctactgcctggatgcccctcctggagcagtcgcttaccagaatagccgtctgcatgctgggcagtacgcctctgctgatatgttccataccggcttcattatctactacaaagtaaggataattgttctggtattttgccagctgtgtctgcaggaggccatttacataacaatagcagcctttgccctgagtcctgcccataaccagaaggtcaaaatcatcatcctccacaagtgcatcctcaaaacgcatttcagcatagtcagccttggacataccggctggaatcgggctaaccttcgccagttctgcctgtgcgatctcttcccttacatcgccaagagttgtctccacctttacgccaagaacctcattcagattggaattggcatctgcatctactgccagcacaggacctttgccctgttcgcagagatactggatcagcattccgcataatgtggtctttccaacgccgcctttacctgcaactgcaataacatgtgccataactttaaatgcctcctgtcaattatcataatgctgcaatcttatacaagtgtgcgaagtccggatctgtcaatgatctcagaaacatctttccatttgttaagtgcatacagatggataccgtcaacaccaagtgcacgatactcatcgatctgtttgatagtatactcaataccctcttctttgaatgctttgatcttatcatcatagaacatatcaaatggcttgccgtctgcatcttttgctgcaaatggattcgggaacagccaatgtctggagatcagtctgcaaagctcacgatccattacacagccgttacgtgaaagagccatattaatggtagcagacatatcaaggatcggcattactccaacatctacaggcattgtaacacctgctttacggatagcatccagccagtatttgaactgctccatatcccagcaaagctgagtcatgatataatcagcaccattgtcctgtttctgtctgaggactgcaatgtcactctcaaggctgcgacatgcaatgtgtccttccggagatcctgctacagcgatctcaaatttatcgccgtactgatcacgaacaaacttaacaaggtctgttgcataatcaaaatcaccgcaggtagtagtctcgccaaggggaatatctccacgaagcgcaagcatatgatcaacgccctcttccagatactgatccagctgagctttgataccgtcttttgtattcttaataactgtaaaatgtgttacagggatagtacctgcattcttgatcatctggcacacttctctgttggcgcctacatttccgccgcctgcaccatatgtacaggaaatgtactccggatgatatttcatcaggtgctcaatcgttccaggaagatttgccattcctttttccgtcttcggtgggaaaagttcgaaggacagcagcatcttttctttcattgcttctgataatttcattttacatacctccacgtatattatttgctttatataactaaaggccaaaaagcccttattacctgttattatgatccgcattcgccccagcgatcctgtaggaatgcggaagccatgactggctaatcacattttaccttaacaatactgttggcaagatctaccataaggatactgccttctacaatgcgctcatcccccatgatatcacgaagaacaagcttatcgccatctacatcaatacggcttacatttttgaagatcactgaatcatcactctgtttgtaaacggttgcaagacacatagtcaaacgcctccttaatattcgcaactgtaaaaacagccgttttgcaacaaccgtgcttatgcacccactgtcataattgttatttgctgatctcttcttttacaagagtaagggcaagtccaagacgcatattccctttctgaaaatcagaaactccctcgcggatggtctttgcagctgcagccatgcccatcttctctaaattgtctgccatctgatccagctctgctgcatggtgttcattatgctgcagcatataagtaagaagtgctactgtttcattcttgcagtcgcctccctggcaagatgtacaatggtcaccacactgctgaccctccccgtgtgtatggtcatgctcttctccgtgctcatgtgtatgtgtatgggaatggctcactccgtccgcatgtgtatgctcatgtgtatgctcatgtccatgctgtacaagattgccattttcgtctttaatcaagtgcatgtgtatgctcctttctctttgccccacaaaagggcagacttatgacataattttatcaattatcatcattatacaaccttttcaacccgttatcaaggaatattcactgaattttaaacaaatattgcattttttaatgtgcatttctattcttttttgcttaatcactttaccttgctgatgtgttcgttttctttttaacaatctttttgaaaaatattcaaaacgcttgggcagcatcataaaaagccttcccccactggtatcctggataaatatccaggacagccagaggaaggaaggctttcatcaattctgtattaattcagaaatcacattatttctcaggacctgcagatacaagtgctttaccagctgcatttccttcatatttagcaaagttcttaacaaatctgtcagccagatcttttgcctttgtctcccactcagaagcatctgcataggtatctcttggatcaaggatagccggatcaactcccggaagctctgtaggaacctcaaagttgaagtatgggatcttcttagtaggcgcattcaggatgtcaccgttcaggatcgcatcaatgataccacgggtatctttgatagagatacgtttacctgttccgttccagcctgtgttaacaaggtatgctttagcgccgctcttctccatcttcttaacaagctcttctgcatatttggtaggatgcagctccaggaatgcctggccgaagcatgcggagaatgtaggtgtaggctctgtgataccacgctctgtaccagcaagcttagcagtaaatccggaaaggaagtaatactgtgtctgctctggtgtaagaacagatactggcggcagtacaccaaatgcatcagcagaaaggaagatcacattcttagcagccggtgcagaagaaaccgggcgaacaatattcttaatgtggttgatcggataagatacacgggtattctctgtaacgctcttatcagcaaaatcaatctttccatctttatcaagtgttacgttctcaagaagagcgttacgtttgattgcattgtagatatccggctcagactctttgtcaaggttgataacctttgcatagcagccaccctcgaagttgaatactccgttgtcatcccagccatgctcatcatcaccgatcagaagacgcttaggatctgtggaaagtgtagtcttacctgttccggaaagtccgaagaagatagctgtattctcaccgtccatatctgtgtttgcggagcagtgcatggaagcaatgcccttcagcggcagataatagttcatcatggagaacatacctttcttcatctctccgccgtaccatgtattaacgattacctgctcacggcttgtgatgttgaacataacagctgtctcagagttaagacccagctctttaaagttctcaacctttgccttggaagcattgtaaacaacaaaatcaggctcgaaatctttcagttcttcttctgttggctgaatgaacatatttgttacaaagtgagcctgccaagcaacctcaacgataaaacggatagccatacgtgtgtctttgtttgcgccgcagaatgcatctacaacatacagtttcttattggaaagctccttctgagcgatctctttaactgcctgccatgcttcctgtgttgcaggatggttatcattcttatactcgtcggatgtccaccatacagtgtccttggaattctcatccataacgatatacttatctttaggagaacgtcctgtataaataccggtcattacgtccactgccccaagctcgctgaccttacctttttcaaagccttcaagttccggctttgtctcctcttcaaacaacatctcataagaagggttgtacacaatctcagtagttcctgtaatgccgtattttgttaaatcgattccagccatcttacatttacctctttcttcaaatattgtttatttacctgttacgcaggtatgtgatatctttttaacgatatcattgcaaagaagtaccttgttccttctttggttattattatacataataaaagaataaaatcaaccaaaaaatacatttttttctttcaactatatttgactgtagtagttttttaatagaattgagttaactctttcacatttctatgttatactaatacatgaatttagtgcagcttccgcacatgtattgaggaggattgattgatttgagaacaactgtttttcttaacaacgacagagaaatgccccttcttgggcttggcgtttataaaacagaagattcagaagcagaaactgccattaatgccgccgtaaaggccggctaccgactgatcgatactgcttctgtatacaagaatgaagaaagtgttggcaaggccattgctaaatgcggcatcccaaggaaggacctttttatcaccagtaaagtatggaatactgcccagcgcctgggtgatattgacggtgccttttacagaagcctagaaaggctgaaactggattatgtggatctgtatctgatccactggccggtacccggctgctatcttggcacctggcaggctttggagaagattctggattccggacgtgccctttctattggagtaagcaatttccagatccaccatctggaagagcttaagaaggtttccggcatcatcccggcagtgaatcagatcgaatgccatccattatgttatcccaaagagctgatcgaatattgtgaatccgaaggcatacaggtacaggcctatgccccactggccagaggagcttattttgacaatgatgtgatgtgtgttcttgccacgaaatatgcccgtaccccagcgcagatcggtcttcgatgggccatccaaaaaggcatcagcgtgattcccaagtctgttcatccggatcggatcgcttccaatggtaatgtttttgattttaccattgaagatgaagatatggctatcattgacacattagatgaagacttccacagctcccacgtaccggaagacctgcgagatgtgatcttctaaaacaaaagaactgctgttttttggcagctggtataagaccttttatctggtaccttataccgccgccagaaacagcagtttttataataatcatatagcaattcaagaatgcctcggcattcttagctttattcaacccagggaagagatgaaatctctacctttttatcacggagcatcagatcgatcactgcatctgctgccggcttatcttcaaaaaggatcttattcacctcatctacaataggcatttccacttcatacttttctgcaagttctttggctgccttggcagaatacacaccctctaccaccatcttcacttcgtccatggcctgtttcatagtgtatcccttgcccatcagataaccggctttacggttacggctgtgcacacttgcacaggtaacgatcagatcgccgatcccggaaagaccagcaaaggtttctgcctttgcacccatctttacgcccagacgcccgatctcagcgatacctcttgtaatgagagcagcctttgtattatcaccataaccaaggccatctgcagtacctgctgcaagagcgatcacatttttcaaagcgccgccaagctctacacccaggatatccggtgtggtatacacacggaacacagggctcataaagatttcctgaagatactctgctgtcgcccttttatgggaactgaccacacaggtggtgggaagaccacggcttacctcttctgcatggcttggtcctgacagcacacatacattagcacaaggaatctcctgttcaataatttcgcttaaagtcataagcgtcttctcttccacccctttggcaacattcacaatgatctgtccctggcgcacataaggagccagccgtttggatgtgcttcttgtaaaaggggaaggaactgcaagtatcaccacatccggctgatccattgccagtttctcatcctttgttatcagtattccctccgggatcttcacaccgggaagctttgcaggattttctcttttttcacaaagaagagcaacctcatcccccaatgcagaccaaaggatcacctgatgtccgttattgttcagaagaattgcaagagcagttccccagctgcctgcacccattacactgatttttgccatagcattcacctcatttattttctaaccggtttttaatcaaaataaaccttatttattctttcttgccgaatattctaatataaaccttatttattcttgctggcttttccaagataaaccttactttctttaccagaaagaagtctggatatgttggatctgtggcgatatacagccagcacggtcatcagtcccattaccacatccatctccacagtatgggataaatccatgccataacatcctattgctccaaataccacaaaacagatccatgcagttacataggcgctgatagaacctactgatacataatgaatcgtaaagaacaagataagaaaaacaccagctgcgatcaagaataccttccagtcaagggcaaggagcatccctgcagaagcagccactcccttccctcctttaaaatgaagataaaaagggaaattgtggccaagtacacagcctgctgctgtgtacattcccaacagaggaagtatatcctgataattgttcttaaacagatgatctatcagaaggatagccagcacgcacttaaacatatctcccagcaaagtgatggctccagcctttttgcccagtgtacgcagggcattggtggtgcctgcattgccgctgccgcactggcgaatgtcaatatgatgagattttcctaccagatagccggtctgaaacataccgaatatataaccgattcccagacaaattaatcgttccataatctttattccttttctccccgttcccgtacaatgaatttcagcggagtcccgccaaaatcaaatgcgtcccggattttattttcaatgtacctggtgtatgaaaaatgcatcagttctttgtcgtttacaaaaatcacaaatgtaggcggttttactgccacctgtgtcatatagaagatcttcagcctgcgtcccctgtctgaaggcggctgctgcatagccactgcctcggacagaatctcattgagcacaccggtctggatacgcatattctggttctcgatcactgcatccaatgtttcaaacagtctggaaatacgaagtcctgtctttgcagaaataaagacgatttctgcataaggcataaaggaaagcacctcacgtatcttgttggtatgcttgtaaatagtcttgtcatcctttacaatagcatcccatttattcactgcaatgatcacgcctttgccattttcatgggcaacacctgcgatcttagcatcctgctctgtcaccccttcggaagcatcgatcatcacaactaccacatctgcccgctctacagctgtcactgtacggatcacgctgtagcgctcgatctcctctttgatattcttctttcgtcgaaggcctgctgtatcaataaatacataatctctgccttcccaggtgacttttgtatccactgcatccctggtggtacctgcaatatccgatacgatcacacggtcttctccaagaagcttgttcaccagagaagatttgcctacattgggctttcctacaatggcaatcttggggatatcatcatcctcaccatctgtgctgtcttcaggaaaatgcttcaccacctcatccagcatatctcccagcccctggcggttagctgctgatatggcaaatggttctccaatacccagattataaaattcgtaaacatccatcatgtacttctggaagctgtctactttatttaccacaaggattaccggcttgtgactccggcgcagcatatctgccaccttagcatctgcatccaccagtccctggcgtacatctgtaataaaaatgatcacatctgctgtatcaatggcgatctgggcctgctcccgcatctgtgcaaggatcaggtcactgctgtcaggctctataccgcctgtatcgatcatagtaaatgtcctatcaagccaggtaacatctgcgtagatcctgtctcgtgttacaccgggggtatcctgtacaatggaaatcctgcccccggcaagtacattaaaaagtgtggatttgcctacattaggccttcccactatagcaactaccggtttgctcatacatctgtctccttctaagttttttatggtcaggggggtggatcattgcagatacaagatctgccccgccttcatcaacaattacgatctctacctttaagctttgggataactgctccacagtcatatcatccagaaaaacgtctgtctcacttctaagcatactgcatggaagcaatagcttttctccaagttccacatccttaagctgcttaagcagatcttgtcctgtgatcaggccggataccgtgatcttctccccaaaaaattcattggtgatttttcgtacctggatctgtactcccggatattgctgccgtacaaggtccgcaaatccggcaataaaaggcgctgcaagagcaccggttgcaactgtacccgtaaccttccggtcgtcaccaggaagctgctttaatgcctgacgtacttctgtatccaaaagccgtatcatgcctacaccgttctctagctgaagatacccatcataggaatcctcatttgggagttctctttctgccaggatgtaccattcgtcagaagcatggacaaaatgaatgtcatactgttctttcatcttctcctgccacttttcaatgatcttaagggtttccagtgcttcatttttgccgaacagttccaatgggtaaagtccttccctgtatttggtaagtcctaccggtacaacagaaacactttgcagtaccggggcgtattctgccagcctggacaagctatattccagttctgcaccgtcattcaagcctttgcaaagtacaatctggccgttcatggtgatccctgcctcatacagccgctttactttctttagtgcgtctcctgcaaaacggttatggagcatcttacagcgaagctctgggttcatggtctgaaaggatatgttgatcggctccagatggtactggatgatcctgtcaatgtcatggtcgctcatattggtaagggtcacatagtttccctggagaaaagacagtctggagtcatcatctttaaaatacagtgtttctctcatacccgggggcatctgatcaataaaacagaagacgcagtgattggaacaggatctgtaatcatccatcagaccattttcaaattccactcccagatcttcttcgtattctttctctacttctaattcccagatctctccgtctgctttttctacctgaaggactacgtattcttcattcatcagatatcgataatcgaatacatcttccacctgctgtccattaaccgataacaggatgtctcctggagccagctccagttcctgggcaatgctgcctgggagtacacgagagatcacatgtcttttcttttttttcattattaactccgtttatatcagatccggaaccagctgccatcactgatattaatttgttgctcaccacttgcaggtaggtggcatgttacatctgatatatcataccaattttgagggcaaaaaacaacctgaaattttccagggtgggtgaggcattcggacggcagtaaaaaggagacgaaaacgccgcacaactgtatacgtctagctgtgcggcatttcgtttggtgttttaacatcaaaatcttattttacaataaatgtaaagtatacgttgtcttctgttgaggccggatccatggagaagcagattctgtaggttcctggtgcaacagctgatgtgaatgtaacagcatcctctcttgtagatgtagttgcctgatggataagtgagcctttccataccacgaaaccagcactgttttcatcaacaggtataaagttacatagtgtaccctgcttttcaatagtgatcgaaactgctttgtctatctcacgttgattgcaagatgtttccaggtggaactgaagcttcttctgggtgccttgtgggatcacgtaggagtcaacttcaggattcagtactacatccagtagtggccggtctgtgagaacggtattggtgtatgtaaagcttgctgtgttgctgactttgtttcctgcgatgtttcctcttgggtctttgccgtataccaggcaccagttcatggtgtaggttccaccaggcagatctgtaaaggtcactgcttgattgattgtgcgttctgatacagggaacagcactttgtctttgctgatccatatgccttcctgattattccatttggcttttgtcctgtatgatacagatacattgcctccgttttctgttttcagttctgccatcaggtacaggttctgtcctgacaggtttgcctggtcagtgggcagttttgttacatttacctgcagatctttgttgaataattcagcagatacagcgccttgtgttacggttgtgtagctgtaacttactgctgttcccatattgatggatgatgttccttcagagtccggaagcagggtgaaggttacgtttctgctaatgttattttgtgtaatctttgttccgttaaagtcagcagacaaaaggaatacttcctgtttaggcgcattgtttgtataggctttggtctggaattttgaagttccgcccatcacagtaaactgagagaaccttacactggatatgccgccatcaggaactatgtaatagtaatactgtcctgcactgcctgcggtctttggaacagtgagtgtaagcttcgttcctgccggaagaggctggctaaatgatgccatgtaatctcttccctggatggaggttcctgtacttgcaagccgtgcggtccacccctgactggtctggatagttacagatgttttgccatctgtaaagtctgcaaatacacggccttcttttatggatgtggttcctgttgccagaagccatacatgtacagtcagtgtttttgtgccatctgcattagcagaaacatccttggtgtcagccgtttcaatggttgttcctaaaagggttgttctggcagtaagtcctgccggaagtggtttcccttcttttacaagggcactacgctttccatcttggttgatataccaaccggcaaaaatatttgacgtaacattttccggctttccaggtacaccatcagccggtgtgatggtgagtgtacctaaagtgccgtctgccatatgcttttgttccgtgcggagtactttttcaagtttgtctgtattaaatcctgtaccctttacatcataggtgatcctgtaatgatcctgtacaagaatacctgacaagcggcagcttgtctctgttactgtggtgaaggtatctccataagttccaagtgcaccgatctttgatgcattgactgtagtatctgtcagggttactgaagtcacctggccatccgccggcttgcttccaataacgcctgtggaagctgccgcgctgccgccctgaatgatcaggtcatttgcatacaggttcgttacagttgcggttacatccttcagggtgatatccatagttccatcaccaaagtctcctgttgcagcagatgcatcacttgcatttaatacaccgccttcctgtgtataagaagaaccatctgcatttgcaaatatggtgttcgtacctgtaaaggtgatgcctgcacctgcatcagcggttgctgtgattgcagtattggcagacacagatgctgttttgcttacagtgagcatgccttttagctgaagctgtgtatctgtgttaagtgcaagtttgccaacatccaccgatgtgtttgctgtatttttcggtgtccgcacttccagggtaccggtgatctgtgaaatggtaaggtcaggtgcaactgtctttgtgccttcctggatcagcaggtaatcttttctggcattgtctgccatatgagaagtgtctgcctgaatgtagctgtctccatttatcaggacggatccattggtcatttccaggatctgggtaccatccacattcacatctgacgctgcatccttaatgtacaggataccggtatacagatcagaaataccatgaataccattacctgtgcagattgcttttacttttgaatcggtcactattaccctgcctgtactgctgcttcccacaggtgcggatatttcttttcctgaaatattatcctgaaagttcaggtagatttcagaatttgtgatcgtcagtgtatcttccccgtaaaccggatctgtcagactgctgtctgcgcttccaagcttacaggaatcaaccgttacattctttccttttgtaatggatggacctgccatatgggtggtttcggtctttgtcagtattgcatttttcagatccaccttccgtacatccttgccaccgatccatgcgccggaataaacatccgtatcagagccttcccttactttcatggtacaatccgcaatactgatgtttcctgcacctgttccatcagcggctgcaccgatgccggaggcagaagaacctgcgggcatatttaaggatatatccagatctgtcaaggtaagcgttccgtttgccggctgtgctgctgtgcctccaatggccgcatcaccaacccctggtgttaatgtaatggctccatggactgtactgcttcctttcagctgtacaacagagccgccaggtgccaggatattctttcctgcaaaggtagatgctcgtccatcatagtcaagtgtaagggctgcttttgtatttgctttcagttccacagaattattggagctgatgttcaggtttccaagagcaatatccctgccttccagatttccatcaatgatcaaacgatttacggttgcagctgctccgctgttctgcctgttctggagaaccacataagtgcccggccaggtctttgtcactgtgccctcggctctttcctgggtatatttatccggactaagggtaatggttccctcttccagatacatagtcatcacagttatatacgcggcatcaagggatgctgcattcatctgcaccccatagcttccatctgctgctttctgtgcataatcaggaagcttatactgcaaactgccctgaccatccggcttacgggtaatcgttacaaattccggtgcataaccatagccagtgccctttggtgtaaagtgaatatcagaatgatatttcacatcagcgcctgcactgtcaagctttgccatagtgctgctgcctacgccatcgctgtatgtaatggtccagtattttaaagtatctgcatctgctgtcaagcgccaggtctttgcctgataagaaagcgctacatcgatctggccgttatttgctgcggacacctgcatatctgcttttttgtaagcagtcgtaccattcccatagatccacagatcagatgcaggcttatagccttcgatctggatcagattgctgatcaggtcgcttccgtatgcctgtttcacctgtctggtcacttccactgcatctgtatcatccggctgtgtaaagtctccccagcttcctatcataagtagtcctgctttttccggaagctgtacagaataattcaccgtataaatagttggctgaagccgtacagatacatggttattgatgaactgatccttcagtgtgttatcgccggatccgctgcttgcaaagttcatcttaagatcaaagatgtaggtatgatctgcggatatcacctttgagtgatatagggtcagagtaacctgccatcctgcttcgatttctttttcaaagtccagagtgccatttactgcttttgacagatccagagtctttgtgtctgtacctttactaagggtcacaagcagtgccgctgtattctctgcgctgtactgcttgccatcggttgtccaggcatggtcataagcatgggcttccatcacttctttggataccagctgaagcgcagccgatcccatggtcaggctcatggtaactctgccattttgcatacttgcaggcagtgtataggaatccactgtcagatctgaagtaaccggatctgttttagaattcatggctacattcctgtttacctgtgctgcatagaccgtgtaaaccataatgtcgtaggttccacgttccctagctacttctttaaaggaactacttttagcatcataatcttttgctgtagaaggatatatttctgcagttgtagtaggaccgtttacataccaaccaacaagggagtatccctgttttgtcacctgtgaatttcctgcagtaccgtactttgtaggataatcagaccatacattccagggaccgctgtatttgatggtctgctgctcctggccggcaggatcaatatatcgttccacgaatacaagggatctttccctgtaaactgcgtacatggaaatggtggatccgtccggataatccggcacagaataactgcttccataatttgcggcaatgtctttggaataaccatcatcctcaggcaggaagaacaaagaacttcctgcctggtacagggttccgctattggatattgcggttacagcctctgcataattctgataggttttataccctgcaccatttgcctgctctgtagttccaggatccagtgctgcaaaggttcctcccaggaaaaatcttttggcgttttcctccggtgttcctgttgtgctgctgttatatgcataccagtttccgtctctgctgggccagctattagaatctatggtctggccgactgttacagatatccctgttacaggatccacctgattaaaagaggtgtaattatagcttttgccggtatccttgctgtacagactcacctgataggtattggctttccatgcagcatacagattcacatctgtaaatcttggcgttgtgcctacagatggtacagtggaagggtctgcctctgctttttctgcatcttccaggctggtgtaccatccaaggaaggtatagccctttctggaaagcagtgttctgtagtctgcatctgcatactgcttgttagtattgtaatatgctgctgtagttccaagtacacgataagtaatcccattctcaccggtagtactttccagcacctgtgtagtgttatctgctgcttctgtatgataaccggcaagaggagctccgtatgccggattctgggtacttgcctgtgtattgtctgtccagtgtccgccattcaggtcataggttacatttaccggcgtatattctgctgtaacgcttagcgctatctgatccggggttccgtccggagaaccaagagttacatccagcgtgcggatcagcagtgcgcttaaggcctgggcagaagaaatcctttcttttacagttgttccattctctttatacgaataaaaccatccgttttcattatcaaaggtacttccttctttccatgcataaggaagttctgtcatgtaacgatttccctgtgcatcttgataccagaagctgtttgcctctgttaccggcgtatcatatacccagtagcattccagcgaagtgattggtggctgacctgcagatggtgcctgctgacctgcagtaacccagctgccctctcctgccaaaaactgtaccttataggtattcacctgccagatggcatagatagtggtattggcagtaaaaatactgtcttgatctacccagccttttgtgctgtcctttgtagcatttttatctgtattccagccaaagaaagtatatcctttggctgctgcctgtaccagacctttactgtttccttgtgttacacttgtatctgtaaatgcaggaattgttccaagttttttatctactccaacattttcccggatagcagaaacccctgtagtaaatgctgcatccacaggtctgccgtttttctgattcagatcaaagatcaccgttgcatatctcttctgtaccaaatgtacatgaagaatgatcactgccgtgccatccctgtttgtatcctttgttttgtaatattctgccagtgcctttgtcacagtgctgctggcactaatggactgatctcctgtgtagccgtcctcctggatctccacctccgtcacaccaagggtattggtggaataattgatcaggtttacaccggaggcggtaaggatcctgtccccatatgtaacataagccattttagaagacacataggaattgccgtcctctgccttttgccaatgactgttgcctgcaaattctgcttcgttataatacccggcagcactgctctcatccatcctcagctggaatttcaccttgactttttcccactttgcatacagggtaaagtcatttgcaactgtagtattgacctgggtggaaggacttcctgtacactccggattgttgtaccagcctctgaaataatagccttcgcagaccccgtccttaagcagaagctgctggtccgtagctgtggatgtatagttttctggattatcattcttcacaagcttttcatctgcatccagaaggattccctgtggattcagcacatatgtaacagatacaagatgagtaccaaatacagtctgatccacagcgccggatctgtcattgtactgcttgtcatcctctgctctggaaatgcctttttccccataagcagcagaataaagacctgcttcctgaaccttaagccgtccctgtccatctgtgatctgggcataagcatttggtgcataaacctgggctccagctgttatagtcaggttctgggctgacagggaatctgttacccacacaccgatacgattgcttttgtatctacttgactcattgccctgatatggattttcaaatgcattcttagcttctctaatctcaatagtcccatagtctgcactgatcttagcagctttaatgctagtgttattgcctgaaatctggatctgaccatagggcgcacatatactgcctgtggtggcagcatctgccatggctacgctgcctcctgaaatctggagtttgcttgcaggtacgtgatttccaatactgtccccttttgctgaatagtaatcggaaagagcctttgtctgatgcggggtcataccaagcacagcattttctcccagattcacctgtccgccaaaaacctgaaccgtagtattagcaccgcccaaatagccgccatcttcaatattcacagtacctccatttatggttaccgcagcagactgtgtgtaattgctgtaattatagatgggatacttgtatacatagtccagcttgttcgcaggaagctgctgtataaaaccatacaaataaccggatgtacctactgctgccgtatttaatgttccgccagatactgtaacctttccgttccagtctccacctgcaaatttcttggcatttacggtaccagacctgatcacaaggccagggagtttatttccatcgattacgtttctctgactgctgatcctttgatccagtatagcctttgtagaagcgcagtaataagagacactgctttggggcgaataaaatccactgacaactacataatctgcattaacggtaccaccatccaccagaatatcctttgaaaagaaatagctttcttcacttccgaaagactgtacttttaaaacagcattcgtaagaacctgtaccttggtaaaccaaaggcggctgtctgctgtatacacagcaccatttttaagaatcacttctttggccttacttgtttcataatcattgatggtatgggttcttgtgtcagctgatggatcaaaattcgtaacaatttccgaatcatcaaccgttaaaatgccgccaattccataatcaaaaggataacctcctgtactttcacttccaatggatttccactgaatcttacttttatcgctgactgtcacattcccacaaccggagaacaattctgtggtataagaatatccggtggtaatatcaatgttacttccctggatctttatgtcttcaacctgtcttgcaagcccggtgctgtctccccatgctttattgtagaacgtacagtcttttatggtaagagaaccgcccctttgtgctccatacagcagatatccaccataaccggatttataattaagcttaagaccctcaagtgtcagatttccaggttttcctgcgattgtcccggcattgatcagataatcagaaggcgaattggtctgtgcacgattaaaatacaacaaatctttacctgtgccattcatccctgcaagcgtaagggaagaaggatctttcagctggaaacggaaaagagcaattttcccatccaactgaagctttacatttccaccctggcttccatctgatgagctttctatcaaaactccgaactgatcgtcctgacacttttgatagatcctggacaatatgatctgattattggaattggtctgattagtaaaatctgatgcaaaacggatccgattgcctgtcatatctgctttgtttacaccagtaagtgctgtaccatcagaatctattatctggtcatttttcagattagactgcacgatcctgtaatttccggaataagtaaagcttttatccgcatctgtggcagtcagttttccggaactgtctacatccacaaactgggtcacaaatccattgctgtcaaagctgtagctgctgatccacagatccaatggtagagcatgtgcatcatccaccacatagatataggtatttccctttggcatatcaaaggtaatactgttcccctgccagtttttccctgcaagtgcattgtgatactggccatttccatcaatataccacactactgttcgtgtacggtataactcttcctgtacagtaagggtgatctttgtgcctccggatacagatgccgtctgtacctcaatctgctgcagatctgaaatatctgtcatggtaccagatgtaaatacagcattatcacctttcgcagtcaaagtatacagatctgtaccataaaccttagtcagattatacttatcttttgcagcatataacagaagatggtctttctgactaacattaatattagtgctttcaggtagtaaagacccatctgcagcaatacccgttgcctctggtccagaaagagaaccatattgccaggatcctgtagttccatcggctgcaactggcggtgcaaagctgatcttatctgctgtgtgccagctttctgtagttccatctgtatcctgagcagttaaacgaacattatccggcatggatgcaaatgtattggaagcctctggaaaatctgtattatcataaatatagttaatatattcatcactttgaagtgttgtgttaccctgagttgttttaccctggatcgtgccaccggtaatctctaccaggcttcgctgaatactaccgttattaccatagctatttcttgcaccaatcttatctgcattcaccgtaccaccggtaataagcgtttttttccagcgcatggtgccgtctgcataaaccgtattcagatgatatacatttcctacggtttttgccgttacctgtccgcctgaaattgtaagatcactttttgtaccaaagcttccgtcgcaccagatcaagccattagatactgtggtttcattaaagaatgtaagattaccggctgcataaacctgtgccccggtaaaagccacaaaccttggtgtgtttgtgcctggtatataagtactgtttccaagcatcacacattcattgtttgcataaccggaagctgcttttaccccattttgcaaagccgtatcatcaagtgaaacctgagatttcaaatctccattgtcatccaggcactgaagcacatactcccgaaccgggttctcctgatccatggctgtaatagagagattgtaataatccactccgcctacagctgtggttttataataaccgaacagataaatcctggtaaggtctcctccaaaactataggttcttgtggtagcaacactggaagagaataccctgaagggataatcatcctcgttctgatttgcctgtgcaatagaataaatacgactatcactactgtttagagatggataatacctgcttgtctctttatcataccggatgtttgaataggtattggtggtgatcaggttggtgatcagccgtgcagatccatttgtggtaatataagaaccaacgatcagtgtattacaaattactgttccattggtgaatctggtattggatgcatcatacacggtaccctttacgatcacatatccactggtattaatatcaccggaagcatactgatcctgatttgtggtcaatacgtttccatcaataaccacagaagaagaacccttaacagacatggagtgacggttggacaaaacatccccataaatgtgagcatagctggcaccgcttatgtttatgccataataatatccacgtgcttctcttacatataactgactgtctgccacgttcatatacatgctgtaggtgaatataatcctgtcttttgcctgaatactggattggttgaaatacactgatccaacccgtgaggtatagataagataacgaaatggagttttcttcgcataagcagttacgtccagcttctgaatcgtgcagctaaaatcgccgaaaatcgttcccagtacagctttactgtttccagtatcaattccctgtacatagacggttcctccgaattttgcctccgcatgaaatcctgaagtggaaatatcagcgatcacattgttatcgcctttcagattcaaataaaccgtatactgattggttttatctgtatccagaaccacattggcatactgggtaagatctgtctttgcaaaagtctgactcatacttttcccctgatcgtcagacagattctccagttcgatcccgcccagctttgttcctgctgcctgatccctgtaagcatccgtagcaatcatcttacagtctttcagggtaatggtcatagctgatacaagagtcagctgattctgagtttccttatttttacttgtaatacagaatgaatctgtataatcccagacatagaaatactcgtcctgatggtctgcataagaagcgtctgcctgaaatgcagggcttaaggcatttaccttcatgccgtcgtattcagaaggcaccatcacctgagtataccagaagccatcttcggtacgaccgttgggcatagtcaccttctcttcaaaagtgatcttgcttacagccagatccacatataaggaggaaagatcagacgtatagctcgccttaatatttctgtaaggcatcacagccttccaggtcagatagccggcgcctgaatcgtaagtggtttccactggcagaaagccttccgtaaatgtccagcggctgaaattcagtggatttgttgcactacatctccaaaccagttcactgcctgtggtaacagagatggtcatggtcttttcggagccattaggagtctgaacctgaccattcaccagaagctcccatccatcaaccacatccacagtcagcttatactggccggttccccataagcttgtaagcagtaccggggtatttctgatcttggcttcgtaggtggcaagggactccccttctcctttattatccaggatgcttcctacagagaaggtcatgtcttctaaaagcattgctcctgaaggtgtagaccagcctgcaaactcctgtttttgtactccttctcgctgatccaaaagcacaggcagctgtgaaagaccgattccctttagataatcggacagcttttccccatatataaaatcgtcaaattgcagcaaacgattagccgcatcccagttcacatatgaattggattgtgcaaaagcagaaactgaatcataaactgtagtatcatttgtctgaaccttcagttttgtcaggtctacattactggatatcaggaatcttataggaaagcgttctgctgtccatacggctgtaagcgctatagaaaaagtaccatcttccgattctatggcatcatccaaagataccgtatagctgtcctttacaagtccgctgttttcgccagcagacaggatcttccatccctggaactggtatccaaaccgataaggcgcaggtagctccaccacatctccccatgaacagttctcatatgtggtcaccttattttgtgtctggtaatcatcattactgttttcatccggagtgtatcccaaatctaccgttactgttacctgtgctggtttcatctctgcatttaatgtaaggttgctggcatatccggctggaagcaccgtattaactgtgctatcctttccacaagtccagccttggcaggtgtagcctttctgtacatatacaggcagctggatctgatctgctgtcccaacgtaagtaccggaagcctggtgaaatccgatcatctctcctgtgccgctgatggttccggtatactttacacgataggtatccggccatgtgtcttcctttgtaagctcagccccatcatgtaaataagtaattccataatcacagataaaattagtatcagaagcattggaaattgtctctgcacctgtgatagatacattggctgttccattttcagtagttccaacagctcctatattatgaagttcatttccgcttcctgtaaaggacacagtctttgcaccggttacatcttcttcaaatccaagaagagaggcgttctgcactgtactgctatttacaatcagatggtctgttgctgccactttgcagcctgaggcatccattactgcattatccagtgtaatggagccggcatccagatcatgaaataccaggctgcttccaaaaagggcaatggatccgctgcctgtggtacttcctgttacagtaaatgaatagctgccagcctggatagtcagactgctgcctgctgccagttccatgttcccaatctccaaaacatcagaaagggtcagaacggcctgtgcattttccattagtcttaaagtaccgatcctggagcttttacttacagaaagctttacagagccgaattccttttcttttgcaatggaattaatctgcaaaacagacagttcacttcctgtaccagcaagatccacggaaatatcctgctgtccagaataaagatttccattgtatgtgttgtcacccacataaacggttcttgtacttgcatcctgtccgcttccggtaagacggtatccttttccagtacccgtctgaatgttacctgtagaaacaaactgtgcattggtgagaagatacacctgttccacagaaactgtacttaaattaatttctgtaagtccctcctctgcagtcggcaccggatcagccatcggatgatctgtaaaaatctcctctgtctggccttcttctgctatctgggtttcttgggatatctcggtttctccagagatctgggtttcctcaggtgcagaagcatctgcctcttcttttgcagcctcatctggtccctcagtttcctgaggctgctcttcctggggctgctcttcctgtggcagctgtacctcctccggttcttctgtatcttccacatccatgacctgagtactttccaggatttccggctgggtatcatcagccagtacaaccgttcctgaaacactctgcatgatcattgcaaatgcgaggaggatacttattaatttgttcatttttctgtcttttctgttcaagtcttttccctcctcgttttattttgtcagattgatctcagtccccctaccggatcgttctgtaaagctgtctgtaatattcttgaaaaatagcaattgatatgtagtattatcttctgctttaagaatcccttgtccggatgcatctgaccagtttgccatatcttggttggtgctgtcaggatccagctgcccggtcttccatttaactgtaatattcccgctgtagtcattggtcaggatggtaagaagtaccgttccatctgactgatcctttactgtataagatgggctgccctccgatacgaccttaaaagtagctgaaagtgttttcttataaggtgctgtaacatttacagtaatggttactgtatcacccttctttacatctgtaccaggagtaagatgaatggtctgggatgtgcggtctttactcttttggaaaacgcctttattaggatcactacatacccattttccatccacttttactgtatagctgatgtcgtcccctgcaataagggcaacattctctttttcataattatatagaagaatgtcaattccggatctccagtccgtaacatcatagaaggctccttcttcttccaaaagatcggaggttatatgaaaatcggatgatttcatttcttcctgtttctgattatctgaccggtatctggccagaacccctcctgccagaatacccacaagaaccaatagaaggaacagccacagccatttcttcccggatctgtttcttttcttatgattgcctgtccggcttgtattgatctctcttttcatcattttgaatcttcaccgctctcttctagtctgtctgctttgcattcacatttaatacaagcaaggatgtaccacttgtatttgcgtattttgcatctgcttctttactgggccagcttacacttaacacataattcttttccaacgcttctgccggtgcaaaggtaactgcagctgattcctgaaccagaactgcatcgtccccaaaactttttaccttgcacatttctttactgatcccggattcttcaggatccacttctgttactttgcattcaaggggcatgctgcctgtcagctccagcccgatggtatatttcgtagtgacctcattcactttgctgtctttctcgttacttactgtaaaatggtattcacaggtatctcctggcttttgcacttttttcagatcgatcatctggctcccactgccatctgcaagctgaaacacaaaagccgccaccctggcggtatcgcctccggaactttccgttgtatacctggcatatacatttcccagcatccagagagaaagcatgaccagacacaaaagtactgccacagcctgatagatccggctactgattctgttttccttctccatcttctctctcctttctgttcttggattcctgtacgttctctgtctttattgtttcgtcctgcagcatggccttttttaatccgtcctgctgtatgactttatttgcttcgtcctgctgcacggtctttcttgattcgtcctgctgaatgactttttttgcttcttcctggttcatctcttctttcagcctgcggatctcttccttgatcccttccagctgtcgatcatctgataccttctgctttctgaaagatccttccatcaaaagcactgcacatatcagcagcaaaatgatccccaccggtgttttcaaaaaactgaccaagcttccaagaaaggggatccagcccaccaccactcctttgatctggcttgcatcaaaaaccggatctgctgcttcattggcatcgccctttgtagtcaccagatttccctcgatctgaatcacacggtggacgatcagctcctgacctgactgatatacaacgatctgtcctggttctgtctgtttttcttcttttactaaaagcaaggctcctttggaaaacgtaggttccatactgccagaaagcacattggcgatcccatagccaaagggcattggcagatgattgcctccgatcccggatgcatttgcaaaatacacattcactcccaggatcagaccgatcaccgcaagcaggatccttctcagaaccggacttgtctttctttttgcatttttcatgatctgtcctgttctttcttccttttatatataaagtacagtcccatgccaaacactgctgcagctgccgtcaggatcaggatccaccttgtgaccggtgtatagtcccctgtcttaactgagtttatgaatgtgccctggcttctgtctgctgcgccgctgtctgtatccatagaagcctgtgtgtggatggtaactgtataggtaagttcctgtccatcattaagatttccaagagctgtatccctttcatcttcctcctgttcaaaaggccattgccaataaatggtgtaatcctggcttttcccagcttccatctgtccctgggcagatacaccgttcaggtcttctgcattctcccatacatcatcacttccaagaagccatccgtctgtattcttcatttttgtaagcaccggaaaatctatatctcctgagcttgtacctgcctctatccagaccttatagtcagcttctttgctccctgtgtttttcagggaaaatgtatattgtccatctgtaccaggtgctacgatcttatccccgttttccccttgcacagaaatctctccgtatccattggtatatcggatatggaaaagatcaatggaggtatccgtgctccagatctgttggtcatctgaaacctgaaaatcagcatttgcattgcctgctgtgcttccggcagaggtatttctcgcagtcgttcctgcatcgctgccggtcatactgccagatgaagttcctgtactgctgcctgtggttgctttattctttgacagctgctgcttttcagaataagtctgtccttggtacaggctgatctcacaatcgctctttctggtaaaaggaaatagataggtgccaaccagagctgctgtggcgatcaccatcactgccagaaaaaaaactgctggccagaggatacgctcctgattatgtaattttattctctgtaattgtctctccggcatattgtcccttcctcctgttcccggatcattctatgtggtttttgttattatttcagatttatttttgtttctatatgttatcagttttctttcctgtagcttttggcttttcaaaaaagcagatgtctctccttctttgaaaaaccagaagcccctcttccctgccactgggaagaggattctctggtaggaatcaatttcgcattgttactaatgcagacagatggattagtcgatctgggttgcggtaacggtaatcttcagttccacttcagcaagcttagtggcattgcccatagcggtatcggttacatccttattaaccgtatcagtttccttattacttgcattttcatcaaaaatccatttccatgtaatagtatgatttggattggttataccaaagtcagcaggaagatcccctggtttatattccttttcaccagatgcatcaccagataattttttaatattatcaattaaatccttccatgttccccatgtaccattatcaagtttccacttaatattagtattagactgaatatctgtatcacatttgcttccatttgtatcaacagtaaatttgtaagcaacttctggtgcattagcagcaccgtctccgccatatacaaaactaaatttagctgatccggtagtgcctggtgcaatcaggtctgcactttctgttgctgccttaaccttattccctgttgctccatatgttgctttttcatctacatatgcattactaaataaatcagtaagattaatagtactttcgttaaagccccatttagcaactcttgctttgtcaaaactacttacagaagtcgtatacttcgcaaaggtaccagagatggcacatgtgctcagaagaaccgcaaccagaagaccggatgcagcacgcatcattttgttttttctcatagcttttttctcccttctttctcgcgttccctgttgtcaggaatgctcctcgccgttccacagaacaggcggttcgccattccgataatgccggaacggtcaagaccattcctcaccttccggaacaggatttaatttatatctaattccgatgtggcatcccggaatcaaatatcctttggattgtttttctctttttccgcacgaagtgcttccaactcagcaagaagtgcgtctgtatccttcttcttggacttttcatatgcccggcggcgaatcacatcataagccaccagaaggatgatcgggcagatcacacaaatgatcaggccctgggtagtctgcatgaacatggccacattgccaagtcctttcaagcgggtcttatatacaccgatcagatttttcgccggaactgtaggcagatcctctgtattattggcatcacccttggtgatccatgccagattgccttcatcatctgtaacaacttcctgcacacgatgggtaactgtggcagtgccatttccttccggatcataaaaacagatcacatcaccaaccttaatttcctccggctcagctgtattgcaaatgatcagatcgccggattcaaactccggatacatactgtcagtaagtattatcataggaaaaatcccgctgatactgggaacctgatctttattcgtatagcttttgatgatcagtgtacagttgatcaccaatataggaatcaggatcacgcataatataatgccaatgcctgtaagtatcttatgtccaagagaacttttctctttttcctgtgtctgcttcatttcattcctccttgttatgtggctctgtagcaagcggatccatttctaaaaaagtataaactgacccactgtcatttatattataatgtgccatttttcaataattgtaacgcatatatttgtaaaaatcattgaatataatcaattatctttaattcttcgtcacaacaaatacaaaaaacatcatttatttacagatttgattattctattcgcatttattatatgccttttgttttgttctttttttaaaacagtgccccgttttttctgctttcaggtacaaaaatcaacaaatgccttgaccttacctggctctgatgttataaataagagatgagcgttctttttgcatcttaatactttaggaggaatattatgcccaatattgaattgcttgaaaaatctatacctgttgccccgattcggatcgcagcactggcaggatgccgggatctggcagaggaagtagacaaaaagctggtaaaattccgtaaagaactggtggaaaataagaaattaagtattataccacagggttacagcgaagaaacttttcttgtagactgtgaatgtccacgcttcggtactggcgaaggcaaaggaatcatcaaagaatctgtccgcggtacagacctttttgttatggtagatgttactaatttcagccttacctacagcgtatgcggccatgagaatcacatgtccccggataatcatttccaggatcttaaaaggatcatttccgctgccacaggaaaagcacatcgtatcagtgtgatcatgcccttcctttatgaaggacgtcagcatcgccgttccaagagagagtctttagactgtgcacttgcacttcgggagcttggcgagatgggtgtttccaatattattacctttgacgcacacgatccccgagtacagaattccattcctttaagtggttttgataatttcttccctacgtatcagttcctgaaagcacttgtaaaaagtgttcctgatttcaaggttgataatgatcatctgatgatcatcagcccggacgaaggagctatgtcaagagccgtatatttctccaatattctgggcgttgacatgggtatgttctataagcgcagggactattctgtgatcgtaaacggcaagaatcctatcgtagcccacgaatttcttggtgattctgtagaaggcaaggatgttgttatcatcgatgatatgatttcctctggcgagagtatgctggatgtggcaaagcagatcaaggagcgtcatgcaaaacgtgtatttgtatgcaccacttatggtcttttcacagatggacttgccaaatttgatgaatactacgaaaagggatggatcgataaagtgatcaccaccaacctgaattaccgtattccagagcttctcacaaagccatactatgtagaagcaaatatgagcaaataccttgcaagcattatcgatatcatcaaccatgatgtatctgttgagaaggtacgttccagcaatgagaagatcatgtccctgatgaaaagagtcaatgcatgattccatataatgattaaaactaaaggcacagtctgcggtaaccaaatccgttgactgtgcctttttacatgtatcctctgccactaaagcctaacaaatcagatgctggtttaaagaatctgcttgtacgcaggttctttgttactgcatcgccttataagctccagatattttctctgtctttttctctttctcgtatttcttcaattctgccaatgcttccccaccaagcggataaagtaaaataatattgaagatcgtcatcaaaccgattcccacatctcccagatcccacacaaaggtatacgctgccagaccgccaataaaaagcattaccagtgccagtaccttataagcagtttgccagcaccatttgtctccgaaaatgtatgcaacattacttcttgcataaaacaaaatcccgagaaaagtggaaaagctgaacaggaacagggttactgcaataaatattactccaaacctgccaagatggtactccatggctttctgcatcagatccatcccggtaaggccggcagtcaggtcttcaggagcaagaagcatgatgaatgcagtacagctgcagatcacaactgtatcgataaatactcccagcgcctgcacaagacctgcttttacaggactgctgcactctactgcggctgctgcgcaaggagcagagccggatccagcttcattggaaaaaagccctctttttactccattcataagcactgccccaaagcctccggctgccacctgtcggatcccgaacgcctcctgaaaaatccttgaaaacacacccggaaggtttcccagattcatcaggataatcacaacggtaatggcaaaataacacactgccataaaaggaaccatcatatccaaaacttttactgtagcatttttgcgaagcacgatcactgccgcaagggctaccagaagaatggttgttacgatcggcggtacagaaaaagcatttttaaaagaagataccacagaattactgatcacctggctgatcccgcaccagcagatcaggcctgagatagcaaacagtgtggcaattaccacatgctttctctttttcccctgtttccgttcaatatagctgtggatataataagctgggccgccccggtatcccccataaagaggatctttttctttgtacagctgggccagcgttgcctctacaaaggcagtggaagaaccaatgatcgctgtcacccacatccagaatacagcaccggcgcctcctgctgaaatagccgccacaacgcctaccagattccccattcctactcgggtagcagtggaaatcaacaatgactgaaaggatgacaaactgcttttatgagtctttttctccgttagggctttcaccatatccggaaacagccgaacaggcagaagccgtgtacgtacagaaaaatagatgcctgcaggtatcagaaataagatgagaagggaaatcccaagacttcctccgcctggaagcggtatatataccagatccccccataaaaactggtataccttttcgatcaatgttatcaacatacgtaaattattccccttttatttgttatttatacattccaagaaaagctgcaagatttcctctttttccaccagaagccctgtgtgaaaaaagaaaatccggattgcagcaggtgcaaagatcaggcatatggatattttctggcaaaacttctgcttccataaatatgatccggtttgcctcccatagattcagctgatatttgccgttttccttcttatagaacagactttgccagtgacgactgtgaaaggccattttaaattcttcgatcacatcttcactgacctcatagcagtcctgacaaatggatggtcctatggcaacgaccagatctttcgggtttgtcccataaacttccctcattttcctaatcgtggcctgacccatcctgccttgtgtccctctccacccggaatgggataatccgattgccttgtgtacaggatcgatcagatacaagggcacacaatctgcataaaatgtagtaagtacaatcccaggctgatccgtcaccagaccgtccacatcctgataatccctgggatatagcacacccttccccctgtccttgtcagttaccacccgcacattggtggtatgggtctgatgcgacaccacaagatcctccatactgcatcctatagcctttgtgatcctgttataattttctagtacattcgccttttcatcgcctctggcaaaactcagattcatggaagagaaacatccctggctcactcccccaagccgggtactaaagccatggcagatccatggcatcttatcgatcaccggccaggtaaggtacgtaaccccgttattttcattgatcttcattttaggctgttgttcattataccaacggatcttcataagccatttcctccaccatagtcgtatatcttatagctgaaacgcatcccggatccattgcacctttccgtccaggatcccgaccacgtcaaacctgcagggcgtatttacggtacatttatgggtcaacaggtaatactctgccactttccccaaagtctgctgcttcttaaggtttacagcagccagcggatttccatagctgccgttttttctgtatttcacttctacaaacaccagatatttcccatccatggcaatcagatctacttctcctatccggcacctgtaatttctttctcttatgtgtaagccatgttctgtaagaaaatcagctgcaagattttcatagcagctgcctattttcctttgatttacacatcttttcaaaacactctctcctgatgtcagtaaaaatccagccaacgtaagccggcctggcacagtgaacattaagtagccaccatattgacttgccttaattttcactttactagataaaatttttaataaaggtagccctgtgtattggggatggcccatacttttcaagagcctgaatatgtgcctgggaaccatatcctttattggaagcaaagccatactccggcatcacaggatcatattcctccatcatccgatccctggtaacttttgccacaatacttgcagcagcaatggatacacttttggcatctcccttgataatagatacctgaggaatctccacacccgggatccttactgcatcattcagaaggatctgtggcttcacagataatttgctgatagcctgacgcatcgcttcataagtagcctgtaagatgttgatctcatcaatacgtgcaggacctacaatgccaagccccactgccactgcctggtcaaggatctgctgatacaaagcttctcttttctttgcagaaagctgcttagaatcattcagatacaggatctgacaatctttgggaaggatcacggcacaggctactaccggaccggcaagcggtccccgtcccacttcatcaatcccacacacatatcccaaatgttcgtatttatgctcatataccttcagggactctgtacgcacaagctctgcctggtaagcagcctcttttttatggtattgctccagaagcttctgcacaccactgcggctgtcgctgccatatttctcataaagtgctggccattcctgccggctggcattttcaaattctcctttgatctccccgatagaactcatgctttttcctctttcaccggcggccactctactgtgatcctgcccagcttgccggaacggaaatcatcaaaaaggatgccagatgcttttccataatccagctcttctccttttttcaagcagcctcgcacttttgcaatagcttccaggatctccacatcccttccttcttccggtacatcatatcttttatgaatagctcccggataatactctcttaaaaaaccgatcagttccagggaaagctcttccatattcagaatatcatctttaatagatcctacaaatgccagtctttttcctgtatccggatcctcaaatttgggccagaggatccccggcgtatccagtagctctacacctttattcagacggatccactgcttcccctttgttacacctggcttattgccggtctttgcacaagctttgcctgcaaaggtattaataaaggtggatttgcccacatttgggatgcctgctaccatggcacggatcgggcggttcttgatcccgcgccgtctgtctctttcgatcttttccttgcaggcttcctggatcacagcctgaatagccttgatccctgccccatttctggaatccacctttaccacgtgaaagcctttttcctgaaaatattccttccatctttcattctgcctgtcgtctgccagatctgctttattcaaaaggatcagtctggctttgttcattcccagctggtcaatatccggatttctgctagaaagaggcactcttgcatccaccagttcaatgatcaggtcgatcagacggatatcctcctgcatctgcctttttgccttggtcatatgaccaggataccagttaatattgattctgttttcacgattatccattcttgtcacttccattcattttagtcttcaaaatcattcaaatacgcttgcaaaatcacttaaataagcttgcaaaatcattcaaaaaagcctatggatttcacagggaaaagtttaaaccacagcttgccggtaatatatttcttatttaccttcccgatactgccataccggctgtcctcactgttattcctgttatcaccaagcacaaaatattctcctgattccagtgttaccggactggatgccatccccggattactgatcacaggaaaatccctgccctctttgtaagtctctccattgatcaggatctgtccatccacgatctgcacagtctctcccggaagcccgatcaccctgcggatatgcaatgctgcatcatcactggcgtttgtacggaaaacgatcacatctcctcttttaggggaagatacacgatagatcacccggttcataaaatatctgtctcctacagagatggtgggctccatggaactttcctgcatagtcacagactgaaacatggcgatccctaccagtgctgcaaaagccagtgttacaataatttcaaaaaccaggcgcaatacaccccggaccttcttatcttccagtttttctttcgcttctgctatagatttattctctctccaggtagcccgccagttctcccattgctccctggatcgtttctttcttctattctttaacatattattcaaatgctcctgtttttcgattagctgttatagtataacacactttaaactgtagaagcaaggaatccgccaaaatatgtaagcccataacattacggagtaatttcctataaagtaaaaaataactgcctccggaaatcaatccgacggcagtcattctcataatcaggtatggattatttaatgcgctctttaaccttagcagccttacctacacggtctcttaagtagttaagttttgcacgacgtactttaccgtgacgaataacttctacgctctttacgtgtggggaatgaagcggccatgtcttctcaacgccaacaccattggagctctttcttactgtgaaagttgctcttgtgcttccgccctgtttctttaatactgttccctcgaaaacctggattctctcacggtttccctctttgatcagtgcgtgtactcttacagtatcacctacattgaactgaggaacatctgcttttaactgttctgcttcgatgtttttaataatgtcgttcatgttctttctcctattcttctattggatgttcttaatacacatgaggtaacagaggaccatcttttttcacaacatgattgattatactatagaactcctgccattgcaagagttttttctatggtttcactattataataagccgccggacaagggctccgacggctgttatggatttggatagattcaatatcattatttatttatgcgttctgctctcccggtactgtcaccatcttacgaacctgaaccagtgcttttgaaacagccggaatagagatcaggatcagtgttataactccctcagcaagaatgtagctatagttgtaaacgataggataaatagcagataatgacttaggataattctcaggcatgtagctcatccagtacagatatccgcccagaacatgaaatgcacctctggcaagaatcgctgccacatatgctttctgcagaccgtatttctttgattttgagaaaaagcctgcaatacccatagcgccaaatgccaggatataatcacagcatacctggaaaaagctaagtacatatggctcctgcaggaactggaagataccataaacaagacctgtcagaataccgatcttaggtccgtaccaatatccaatgagtacgataaaaagcatgctgcataaggtcacagagccaccaaatggcagagaaaataccttaaggtaagatgttgcataagcaagggcaagtgccactgcacaggttacaagctgctgtgtagtcagctttcctgaagagcttttcttatggaaaagcacagctgcgatcactaccaggatcaccatggcagcaatacttgttacatagccggcagtagtcagcccaccatcagcagttactagaaaatccatcatttgttttcctccttacgttggcattatccaaatcaagttaaaaggtcgaagcctccggtcaccggaagaatgtcctccctggtgattgcttcctctcagcctgcgcctgcaagctcccttggttcgttctacagtatagcacaccccttcacttcacacaacacaattttcatcctctataaaagaccgtaaacgataaatttcctctcatatcatatattttcctctcagatcagattttactttacctctgaattgtgatattctatttgctgaaaaaacaattatatacggtaactgtaagaatactgaacagttacaccatatatcatcggataaggagcgagtaaaatgtctttaaaaataggaagaaatgatccctgctggtgcggaagcggcaaaaaatacaaaaagtgccacgaagcatttgacgaaaagctggaacaaatgaaacaaaaaggctatccggtacttgaccacaacctgatcaaaaccccggagcagattgagaagatcaaagaaagttgtaagatcaatattgccgtgctggattatgtggctgagcacatccgtccaggcattactacccaggagatcgatgactgggtacatgaagagaccatccgccacggcgggatccctgccccgctgaattatgaaggctatccaaagagtgtatgcacctccattgaccaggtggtttgccacgggatcccatccacagatgtggtcctgaaagaaggagatattatcaatgtagatgtttccaccatttataatgggtatttttctgattcctcacgtatgttctgtatcggaaatgtaagcccggaaaaagaaaagctggtaaaggttgtaaaagaatgtgtagagatcggcatttcacaggtaaagccctggacaccgattggaaatatggggcacgccgttcaccagcatgcgcttgaaaatggttactcagtcgtaaaagaaatcggcggtcatggcataggactggaattccatgaggatccatgggtaagctacacctctgaagaaggaagtggtgtactgatggttccaggcatgatgtttaccattgagccaatggtcaatatgggatctgatgaagtttataccgatgagatggatgactggacagtgcgtacctgtgacggacagccttctgcccagtgggaagtcaccgtgctggtaacagaaagcggatgcgaggtgatctgctggtaatgaaccataagattcaatgtttgatcacatctgttgatgaatttaaagatccaaagttatttcaaaaaggactggcactgcttccggatttcggttcctggaaggaacggaaagaatccatttcccggctacgccgccaggaaagccgtctggaaagccttgtggcagggcttatgctccgtactcttcttctggaaaacagtcttccactggaggctctttctgtttccgaaaagggtaagccgttcctgaaaaatcatgattttcattttaatctttctcacagcaatgggtatgtagtctgtgcttttggctctgtcccctgtgggatcgatatccagaaagaaaaagaagaccgttccaatatcgcccgtattttctttactgaatctgaatatgcccttgtacagaaatatggtgtttccatgtttacacggatctgggcactaaaggaaagctatgtaaaatataaaggggagggtttatccctccccctgaaatcctttcaggtttatcccggttcttatgacatcctttctgatggttctgaatggagccggctttccacttgtatttctactatatattctacggacagaacctgccaagcccgggaatttgcatttaatgattaccggatcgctgtatgctctgcacttgccacagagcctaatatttgccggctttctacggaatcactcttgtgcattatctgatgaagcctgatctgtagtcataatgctgctcagctcatcgatcatctcgtcgtccttcagacggaacttaacttctacacgacgggaagcatccttgtctacattgccatccgcatccaggataggattcgccatagaatgaccgttgactgtaagataatcctgcagatcaattgtctgatcagatgtaagaaattctccctggatttccagcagatactgggcaactgccagggatctgcgctgagaaagctccaggttataagcataatctccatctgtatcagtataaccatcaataatgatctctgccagataagacttgtagctgtcttccagaagcaccttgcagtaaatcggcagaacactgcgaagggctgtttttccctcttcagtaagctctgcatcatcataagcaaaaagaacgctggcatccagtgtcaatgctcctgtctgggaatcaatatttacattcaggttattcttggcaaattcctgctgcagggactcaacaacctctgcctttacaccgatgatattatcgatcttggcctgctgggtgctgatcagctgggttttctcatcaagatccacctgctgctgtgccagggctgcttcctgttccttaagcttctgtgcctgctctgccagctgctgtgccagggcagacagcttctcatcctgtgtcttcagctttgcatcctgatcgtccagggtattctgctgtgcagtgatctcagcaatataattggcctgcatctcattcttctcttgctgctctttaatactctcgtcataactcttctgtgcctggaaaagggttacgcacataatcagtacgaagagaagcaatacaccacacatcatatcggaataggagcgccagatattaaagcttccatcctctgattttcttttcttgtgcatgattctctcctttatttaaataaaccaaattttcctttctgtgctcctttggaaagctctttgatattcctggaaatctcctccagaactgcctgctggtctgcagcctgctgctccatcagcttctccattctgtccatggactcctggctgctgccgccgctcatcaggtaaacacttctgtcacctactgccgaaagctcagaaagcagtctgcgtacctgttccatagtcttataggactgctgctgatatctggtaaactcctgaagctcttggcccagctgctcaacaagcctgctgtttgatgtcagaagatctgtacccgcctggttggatgcagaagccttctccatgccggctgctgctgtctcaacatatttttgcattgcctggttacatgctacccagaacttggctgcagacttctctgcatccttcatataatctaccacatgctgataatcctgctgctggatcttctggatctccctgttctcctgggtgatccttgtagctgtatccaaatagcggctggaaatacctccaagctctgtaaccatatcccgcatagccttttcctgcttctcataggactggcccagctgctgactcatggtctgataaagtgcagtggtataggctgtattctccttctgtgcctgcttcagactggcaagagcctcattaaatccagaaaattccgtgtcaaaggaacctcgcatctgcttcaggaactcctgaaggatatcccttacagcatcctgctgacatcttgtcacagatgccaccagcatatccagagaatcgttcatcttctggaaggtaggagtgatcactttttcaaagctgtctgccatctgcacagagaactgctctgccatctgggccatagcctttgtctgcatcttctggctggaaaggagaagattcctggcttcattctcagcagtgggcatcacgtatgcatggaacttctcaaggaaattctgaagattctgagacataaaggaatattcccgcttcataccccaggaataagtaatggaaaatgtaataccataaatagatgtaaggaatgctaccttaatgccatctaccagtgaagatacggaagttgtcatagcctcataattggtaggctggaaattcttaagtccccatacaaggccaatgaaagtacctaaaataccaaggctggtaaaaatatccggcaccatctccagaagtcttttatgtatatggatatccagctcatcatcattgatatactcttcaatatccccaatgccttccttgctctggctgatgctttcggagaaattccccatcttcttatcaaggtaacgatcatcaaacagctcgtccagatatgccagattcttggtgtctgtcttaccaggggtcttaaaaatatttgtcagctcatctgctgccctgcgaaaggcttctcccagattatccatacgaaacatgccgccaaacaatgtgatcatatagatcacagacattgtaccaagaaaaataaaattatagatcagtacgctgggtgttccctttgcaacgtagacggtcatcccggctgcagctgctaacaccagcacaaacagaagtgtatttgttgtcttttttgccatgttgtacctccttttggctgctttttatggtaaagatgctaaaaaccacattttttatcataatatcacaaattccaaaacaggacaaggtataacagcgaaaaaggaatttctgccttttcaggcaaaaatccccttttcttaattctcaggttttaattctcaattcttaattctcaggtcttaattctttatgcttcatgaatcatttctgccatcaggcataaaccttgtcttcttccaaaaaacgtgcttttttgtcctttacttccaccagattgatactgcagttcggcggcacacagccatgccagaaatgctccggatccttgtatagattctgtaaaagagcccttactgcacatccatgagaagaaacaaggatggttttatcggaaagctgcggatcatttgttttttccagccagaaatccctggttcttgcaagtacatcctccaggctttctcctccttttggcttctggaaatgaacaggatcgttaaaaaacacttccatctccttgctgattgcatggccgtctttgtccagccacacaacgccctccagaacaccgaagtcaatctcctgaatccttttatccaggatcattggaatctttcgttctccaagcacagcctcagccgtctgtcttgcacgaaggaggggacttgaaaaacaaagatcaaatttcacatccttcagcgcttccccggtccgcctggccagggaaatcccggcttcatccagggaaatatctgcacttccctggatcttatgaagatgattccatgttgtttccccatggcggataatatacatcagcatcagcttctcagctggatcccaagatcctcaagtccgttcaggatcttcttcattgctgcagagatctcactttcctcaagagtcttgtcattggccctaaatacaagagagtatgccatggacttataccctgcttggatctggctgccctcgtaaatatcaaacagctgatagctttccaggatctttccgcctctctggatcagtacattttcgatctggcctgccagaacctgatgaggcactacaagacttaaatcacgggatactgccggatatttggcaatacctgtatatttgtggttaaatcctgcaaattccagaacacttaagatatcgatcactgcaatatatgctctctctccaatgccataggcatctgctgtcagtggatgcacctcacccagatatcctactttcttgccttcataaagcatatctgcctgacgtcctggatgaaggtaaggctttttgtctgcaggatcgtactctactcttttcttcatacctgctttttcaaaaaattcctcgcatacacccttcatatcgaagaagtcacctttgccatacattccaagcgtaaacagtgtacgctcatccggaagctccgtaagaggaagtgatttgggaagataaacatttcccagctcatacagtcttacatctttatttcgccggttatagttggtagccagtgaagacagcataccgtttaaggtgctggtacgcataatgctgtaatcctcgcccagcggattactgatggtaatggcgctgcgaagcatatgatcttctggcaggcgcaatttatcaaataccttaggactttcaaaggaatatgtcattccctctgagaatccacagtactctgcaatatcccttgcaaggttctcaatgcgaagcttgaatggaagtcttcctgtagtagcttctccggtagggagtgtagtagggatcttgtcatatccaaaaaatcttgcaacctcttcagccacatctgccatgcagtggatatcctgacggaaagtaggtgctacaatctcaccggaagcttcatcataggtcagttccacttttgccagatagccaagcatttcctcttttgtaaggctggtgcccagaagtgcattaatacggtcaggctcaaatttaactctggaaggaagacgtacttcattacatatatctaccatgccgcctacaacctctcctgctcccagttcttccatcagctgacatgcacggtcgatagctgcctgcgcattgtttggatccaggcctttctcgaatttaccggaagcatctgtgcgaagtccgatcttcttagaggacagacggatatttgttccgttaaagcatgctgcctcaaaaagaacagtgtgaacattgtctgtgatcatggaattttcgccgcccatgatacctgcaatgccaacaggctttttgccgtcacagatcatcagaacagaatcatccatggtacgctcttgtccatccaaagtaacaaacttttcgtcttttgcagctctgcgtacaacgatctccctgccttcaatgtgatcaagatcgtaagcatgcattggctgtccatattcttccattacataatttgtaatatctaccagattattgataggacggattccattggaagcaagacatctctgcatccactttggcgaaggtccgatcttaacattttttaccactcttgcacagtatctggtacaaagatccggatcctgtaccgttacttttacataatcagaagctttttcatcattccctgtaaccttcacttttggagggcagaatttcttatcaaaggtagctgctgcttctcttgcaatccccagtactccataacagtctacacggttagatgtgatctcatattcaaataccacatcgtcaaggccaagagctttgatggcactttcccctacttttgcatcttcagggaaaatatagataccatattccggtgcttccggatacatctcacggctgctgcccagttcctcgatagagcacatcataccataggactctaccccgcgaagcttgccttttttgatcttaataccaccaggcgtcatctttccatcatgacctccggccactcttcctccgtccaatacaaccggaaccttgtccccttcttttacattaggggcaccggtaacgatctgtatggtttcattaccaatattcacctggcagatgatcagtttatctgcatccgggtgtctgtcaatctttgtgatctgtccgatcacgatcttatccaagtcagcatccagctcttcaaagccttctacctttgttcctgaaagagtcattgcatctgtatattcctgtgctgtcacatccagatccggcacatacatttttatccaggataatgaagtattcatctgtatattaacctccgtttactatggtttccctttttagaactgttttaagaatcggatatcattctcatacagcagacgcatatcatcgatctcatatttcagcaatgcaatacgttccagacctaccccaaatgcaaagcctgtatattcatccggatcaatgccacacatacgcagcacatttggatgaactgtaccgcagccaaggatctctatccagccggatcctttgcagaaacggcagccctttcctccgcacttaaagcaggaaacatctacctctgcacttggctctgtaaacgggaaatgatgaggacggaattttgtcttagtttccggcccaaaaagctccttggcaaattcctccagtgttcccttaaggtctgcaaaagtaatattcttatccacaacaagaccttcgatctgatggaaggagggtgaatgtgtagcatctacttcatcagaacggaatacccttccaggtgcgatcatacggatgggcagtttacctttctccatggtacgtgcctgtaccggagaggtctgggatctgagcagaatggagtctgtaataaaaaatgtatcctgttcgtctcttgccggatggtcttccgggatattcagctttgtaaagttataatcagcatattccacttccgggccttctactacctcatagcccattccaataaagatacgctctacctcttccagggcaatggaattagggtgacgatgtcccagcttagctctttttgcaggaagtgtcacatcgatcacttctgctttcattttctcttcacgaacagcttcttccagtttctgcttagactcttccagaagagcctcgatcttgcttcttgtttcatttacaagctgtcctacttttggacgttcctccgggcttacatccttcatgccctttaaaatcgctgtcaattcaccttttttaccaagatatgccactctgacttcatttaatttgtccaggccttctgaatcttcgattcttttcctggcattctcagccagttcctggagtctttctttcatatccataaacttatctccttttttggtttttaagcacatatgggaaacttctatgtaataagaacataacggagtttattacataaaaaaagccccatccccaaagggacggagcatacttccgcggtaccaccctgattcctgttataaacaggctctctgatctgtttaacgcacagcttacgtcacttcctactgcctgatcaactaacctccagtaccatcctcagactgggtcttatcatgacgaccagtatacttcagaaatgcggctccagtgggaaactgagaaacaatctgaacttaaggggcttacagccggtggctccctctctctgtaagaaaatcatttcctgaaacactttctacgccttttcatgttactgtccacagcaacttttcatcatttcttactatgccacaccacttctcatctgtcaagagggatctttctctttctctatatcagcaaccgtctcctcttgtcctgcatcagaagaaactttctcttttccatcatcattttctgctttttctctgttaagcatctcccgcatggatgcctgcgccatcctgaactgcttttcaaagtaagcattgatctctgcgccacacagtacaagatacatacagctatacagccaaagcatcagcatgatcaatgctgtcaggcttccatacatattgcttatattaggaaaaatttcaaaatacaaagaaaagaaaaatgaaaaaacagaccaccctacagcgatcataagtgctcccggcgcctggcttttcatggttgcccgcctgtttggaaggactttataaagaaacaggaacacaagaaaaagcacgccaaaaaccagaagagtccttgccccgataatactgccgatcagctttccaagtactggtatatattttgaagatgctgcctgaatcttattgccaagtacaagaagcagcaaagaaacgatcagcgccactccgaaaagcaaagtataaagaactgcataaatcctgttcagcagccagttacgtgtctccttcacatgatagatggtattcaatccattggtaagggactgcatggcttttcctgcggaccataaagccagaagtgcggaaatcggcacaactgcaacgcttcgattatatacctctgctacgatcaaaagcacgaaattctgaagactgtccggcataaatccacggatcgcatcactaaccacattgtaggtcaatggtgtatattgtatcaaagttgttaaaaaaagcagaaagggaataaaggacataatcataaagtaagccgcctgtgcagcataggctcccacatgatccccattgatccgctccacaaaccctaaaagcagcttgggaatattctgtttttcctttttctcatccatacctctgctcctgaaaattttcttgtatcatatcatgaattaattattctgacaagagaacagcctatcggctggtaatctgaatgtcattaaaaaaatattccaggatttccctccaggtatagccttctgctgccatctgatctgccccgcactggctcattccaactccatgtccatatccctttccctggatgcatactacactgccagccttctgttccatggtaaaataggcacttggcagtaagtcaccgccaactgttgtgctgccatcctgctcggtaatctggcagccggccgtcgtgaggaaacttcgcacatcatattccccttctacaagaaagcttccaagatctgtatttacagttaatcctgtaacagcaccgctttcacttttctttgtgacaagcagactctgcagctttcccttgttgtacatggctgtactgtcttcaagcttttcccagggaatatccactttccagctgccccagggctgatcctgatcaaacctgcaagcaacgcttttcagaaatggagcagcactgtcggctccccagatctgatctgtactggttgtccctgcagaggttgaaaaataatatgcctggatcagttctccattgtgtgtcatgacctgcccttttgtacatgccactgcctcgtccgtgatttctgcctgtgcctgattctgataaacctgaaaattcacactgtcatctacatccgctccatatttctccaggcagccatcttctatttgtttccaagcataagttctggcacagactgcctgagccttcagagcctcctgatgataggaagaaggcatttcacttggcaccaccccctccagataagtttccaacggcagctcattgatcagatacaatgcttcctgattttcggtcttcttgatcttcaacgcccccttgtaggtaggatttccataatttctctctatggatgtgacagtgatcccttcatctcctccatccagcgttatgatttcccctggttttttcaggtcttttgctgtataggataccgctttcccctggatcagtacagatactttagtatgctggtaggtatcatatccggaatccataagcaatacccggatctttggctccatcttttttgttttcctgattgcagactgctgtgtgacagggatcactttttcctttgtgtttgtcttcatagcttcctgtaccttgtctttcaggctttgatctttcatatggatcaaaagtgcttcgcctgcaagcatcagacaggcaagaaaagaaactgcaaacatgatctttttgtatgtttttcctgatattttatgcataaaaaaggctcctcatatacctagtatatgaaagagccttagaaaatagaatgtgtcatgcacacttaaatcatttcacacggaaagcaaaagtagttacagaggaatataactgcccttcctccaagatgggagaatggaaattctctacatttacagcatttggttctacctgcgtttccagacagaagccattcctcttggtatatgtatgaccacatttgcccttgatcggcggctggataaagttgcctgcatagaactgaacacatggacagtcagaagccacatccatcacaataccgctttcctggcaataagcgctggcaatcaggcggcagttccctttggcataattgtctgtcacataattgtggtcatatccgccggtgaagtgaagctgctcaaagtccgcttcaatgtcctgtccgatcctcttaggatgattaaaatccataggagtaccctctacaggagcgtattcacctgtaggaatcgactcccgatctacaggcgtatagaatttgctgtggatggtaagaaactgatccagcacatctccactgccttctccgccaagattgaaataggaatgattggtcatattagctactgtatctctgtcacagatccctgcataatggatacgcagttcattcgtatctgtaaactcgtattttacagataccttaaattctcctggaaaaccattctcattgtccgggcttacccttgtaaaagtaaccgactgcttctcctgggagatctctgtagccttccacattttcttttcaaacccatcagggccgctgtgcaggttatttccgttctcattggcagcaagtctgatctccttaccaaaaagattgaacttcgcaccaccgatacggttgcagttacgtcctaccacaacaccgaaaaaaaacggattctcctcatactgcttcacattatcaaaaccaagaacaacatctgtaagcacaccctccctgtcaggcacgcatacttttaccagaactgctcccagctctgtgacttccacataagctccggatgaattctcaagatgatagatcagcacatcctggcctgttgaaagttctccgaattttcgttctgttacgcccatcttctttcctcccgtgaatcataataaaaaagaagccgctgcacaggctccacttactgtgtatgcccatcatgcaacggccctgtaattttctgttggtcccagaatgccgttcccttctttttgacgcctagcctgcggccaggtgggtgtcctcaacagtccttctgcctaccacagcgagaggtctgacatccaaactgcgatcttggagtcccttaatgtcaatgtaggttcaaaaataaaagggtgctcgcacattccaggatactgtttttttctaaaattcattatactctagtatatgccctttttcaacagaaaatacaagtatttttatgttttttatgacttattgcacaatttactgacagatcatttaactgatcccatttaatttctggtacaaatcctttgcataggtgtctgtcattcctgaaataaaatctgttaccagaagcagccgcagataaagctgatcttcttcgttggcagtatggcgtctgtgcataagatagatctgcctgtaattctccgaaatcagggcaaccatcttctgatccatcatggattgaggctgatctgtatcataatggatcactgcaggcacaaacaaatccataagaaaattcaggatcgtccaggcagaaacctccatagacaggatctgctttgaaagaaaggctcttctgtaagctatatcaccaagaagccggatcacccagtcaccacaggtgccataaaacagatccttttcataagtaccagccatgatctgctcataatgggaaacaaagcctgtggcagcacagaaaagaagctcgctttgcaaccaggaaaggaaattctgaacagcataaagttcaggacttactactccctttgtctttcctgcctgatactggtcagccagcacctttaaaggatccatatgttccctgtctgcatactttccttccctggcagcctttttctggcccttttccagttcctctgcaaggataggataagtaataaagccttttttaaatgcatcctcaatatcagcggtacgataggctatatcatcggcagcttccagaataaaggtaagtgggtgccgcaccccaagagtacccatgtcaccggcgatctgctgatataaagactgctccccgtaaaaataacccattttcttcctggagatcctatccccctccggatccatatcacaggatgaaaccggatacttgatcatagtatcaagaagggcataggtaaggtccatgccattctcatcagaaaggaaatgaagcttggtcacctgcctgagagcctgtgcatttccctcaaaataaaggaaatcctgaagcatctgactggtaagcacctgggtcaaaggcttacctttatagaacagactttccagcttcctggcaaaccaatcccggatcgcttcctccccaaaatgtccaaagggaggatttccaatatcatggatcaggccggcacactgaaggatatcacagatatccctttgcatctctcttgtgaagccagcatccaatccctggttcataatacattctccaatattctgtcccagagatctggcaaaggaagacacctccaaagaatgggtcagccttgtgcggatgaaatcacttttgtccagggcaaacacctgggttttatcttgaagccttcgaaaagaagaacttccaatgatcctgtgatagtccttttcaaattcacttctcagatcccttaaatgagcaggctgtgccaggtcacacatggaggtgctgactctttttgtggaaagaagccgctcccatttcatcttagcaaatacccaggatcttcttcactgtagccggcatatcctgggcatcaactacacaatcgtgaagaacaggtgctgtacggatctcctctaccgctttcggcacgctggtaccggacagctttgcaagggcatctgcaagtgcaaaatcatccatagtttcactgtcactgcttatggcttccataacacttctggtaaacttatatgggctggctgtagatgcgatcacagtaggtgtgtcatcctttgtatcagccttatatttcttatatacgccggcagccacagctgtatgcgtatcaatcacataatgatccttttcaaatacctggtgaatggcttcgcttgtttccttttctgtacagtaattaccatagaaatcagaaagtccagctttcatctggggagtgatggtgtactctcctccctttgacagttcttccatcagttttgcacaagcagccggatcctctcctgtaagacggaagatcagcctttccaggttgctggaaatcaggatgtccatagacggggaagtagtcaggatgaaatccctcttcctgtcataagtacctgtggcaaagaaatcataaagtactttattctcattagaagcacagatcagcttattcactggaagtcccatctgtttcgcatagaaagcagccaggatattaccaaaattgccagtaggcacaacaatattgatcttctctcccgctttgatgctgccctggcggatcagggtgctgtacgcatatacataatatacgatctgcggtacaagacgtccgatattgatagaattggcagaagaaaactggaatccggcactgccaagtaaattctccaggtctttgtcattaaacatcttctttactgctgtctgggcatcatcaaagttgccagtaatccctacaacatatgtattcttgcccttctgtgttaccatctgcttttcctggaccgggctgacaccatgcttcggataaaatacaatgatcctggtgcccggcacatcagcaaaacctgccattgcagccttacctgtatctccggatgtagctgtaaggattacgatctcgttggtaactccattcttcttcgctgctgtagtcatcagatatggaaggatggataatgccatatctttaaatgcaatggtagcaccatggtacaattctaggaaatatgccccgtccgcctgatggatcggtgcgatcttatctgtatcaaatttctcatcatatgcactgcgaatacaatacttcagttcatcttctgtaaaatctgtaaggaaacggctcatcacctcataggctgtctcctggtaggtcattctggaaagcttctccatgggaatatccagccttgggatctgtgtaggtacaaataaacctccgtcatcagaaagtccttttaatatggcctgtgacgcagtcaccagatcacctttgcctcttgtactctgatacattacctccattatgtgttcctgcctttctatgataagtgtttttcgacattaaatccaacaatgccctgtagtttctgccattatagcacatgcttttttaaattaccacatcaaaatgttaaaagaggagacagcgctttttcgctgtcccctctataattaattactgttgttcagtttttaatatcattttttaccatctgtaccacagtttcctgatcattattcttatcggatgaagaatcgtccttaggtgaagaagcatccttagatgaagcatcctccttaccgctgacttcatccggatatttataaaattcgtgaaccccgtatttaaaaagtttctgtaaatctttttcaaaccaggctacattctttttctctgccgcttctttctcaacaaagaataatgctccctgggaataatccacaccctccaaagcttgcttcacggcctccctggtcttatctgtaactgtgacctgatagatccggccgtcataagtaggtgaaaactgaggtactccatatctgtaatcccacaccacatccgttaccgtatcaggaaattcatcgttcttgacccggttcagaatcacgttggcaacaaggatgcggcccttaagatcctctgtgcctgcctctgcctccacgattcttaaaaaaacatcataatccccatcagacataatggttggattctcagccatatgcgcagctgtctggtcaagattctccacggtgttctccatagaggagctaacattcaatctggctgcgccatcctctaccaccttaaccctctgccctaccagcacattctcacaggaagtaccgatccttttgatcctggttcctgcagcgggtgtctcagaaactcctgacacaacacctgcgatccctgtaggaagctcactgccgtcaaaagttcctctctccgacgaagcagaaaccatattctcttcagcttcagaagcggcataaacctggctgcggtcgccattatcaacaaatttggaaccaaccgcaatgctgacagataacagagcgcatccggaaacaagtgcgaaattacggaatgcgtcattcctgctttcctgtctcttttctttttttgttacgccttgtaattcttttttagctttcatgcttttcattccttgcttctttgttatggtttcttttctttcgttatttaatttgtaacaactttgtaacgtatgagaaaattatatttaatatacttagatatgtcaagctatttttgtatttttttccattaaaaatacggaaatcaaaagttaaaaaaagcaaaagaggacactctcataatgctctgatactgtcaaaaacagaaaccagaaacatatgaaagtgtccccttatttaaccgaatcaagcagcgaagcggactggaatatccacttgcccaatcgatctgatacttctcccctgccgtaacatacccttgtgtctccggctatgtatcagattatatatggtctgatacgatccgtcaatcagattcgattgacagttactgacagcctttgacagataaatcaggcaggatacaaaatataacaatatctctgtcagagtgcaggatcaatctgctgcatccagcttgctggcacgcgcttcaatctccttctgctgtatatcagaaggtgcctgctcatagcgggcaaattcaaacgagaattctccacttccgccagtcatggaacgcagatctgtagaatatccataaatctccaacataggcacgtctgcttcaataatggtatttccattatggtcaggattcattcccagtacacggccacggcgtttgttcaggtcgcccattacatcgcctgtgtatttgtccggaactgtaaccttcatggaaacgatcggctccagaagaattggtgatgcatccataaagcctttcttaaatgcaaggatagttgccatcttaaatgccatctcagaggagtctaccggatgataagatccatcataaagagtagccttcacaccaactaccggataagcagcaagaggtcccttctgaacgcactcctgcagacctttctcaacagccgggaagtaattcttcggtacagcaccacctactaccacctgctcaaatacatacggtgtttccagatcgccagatggctcaaagcgcatcttaacgtgaccatactggccatgtccgccagactgtttcttatgctttccttccacatcggaattcttgcggatcgtctctctgaacggaaccttaggcttgcaaagttccacatctactttatatctctctttcagcatgctgacaataatgtcaagatgctgatcacccataccataaataaggctctggcggttagcgccatcattaacaactcgaacggtgcaatcttcactcatgatcttggaaagagcctgggagatcttatcctcatcccctttgttcactgccttaaatctcttataggtataaggaacagaaagaacagcttttggataaaggatcggattggcctttgtagcaagactgtcgcctgtctgtacgcttacaagcttggcgatggcgccaatatctcctgcatgaagttcaggaacctcgatgggcttggagccctgaagcacatacagcttattcagacgttcctcaacacccttctctacgttaagaagtgtgtcatctgccttaattacaccagagcataccttaatcagggaatatttgccaaggaacggatctacaatagacttccatacataggcagatttagccttagcaaagtcataattagcctcaaagatctcattggtcttctgtgcaataccattgcaggatcttttatcagggcttgggaaatatccgcagatatcatccagcaggttggaaacaccccgcagattcacaggggaacccatgcacaccggcacaatacttgcttcctgaatattggtagcaagtgctgcagaaacctctgtaacagagaactcatcgccttcaaaataacgatccataaattcttcgcttgtttcagctacagactccatcaggatatcatggtatttttcaaggtactcttccaggtaatccggaaccgggcattcttctttcatgcctttgtcaatatattttctgccggcctgtttcacaacatttacatagcctacaaacttaccatcctcacggatcgggaaatgaagaggtgcgatcttcttgccatataattcggtaagatcctcaactgctttcctgtaacttacatcatctacgtccatatctgtaacaaagatcatgcggggaagcttatacttctcacacagattccaggccttctgtgtaccaacctgaacgcctgccttaccggaaacaacgatgatcgctgcatcagctgcactaactgcctcttctacttcaccaacaaagtcaaagtagcccggtgtatccagaatattgatcttcatcttctgccatggaaccgggatcacagatgtagaaatagaaaagtgccgtttgatttcttctttatcataatcactgacagtgttgccatcttcaactctgccaagtcggttcgtcaaacctgccaagtaggccatagcctctgccaaagttgtcttaccagccccaccatgacctaataggactacatttctaattcggtcagttctaaaaacgtccatatgtaatacctccctgtttgtctaatatgttcatattttactaaactttctttcaactttcaagtattttatatagttttaacaatatttttttgtcgttttcagataaaatactgtcatttttacagggaattgactttttttcctatatatcataaaataaacctgttgttttactataaactatgcgggaaggatgtttttttaatgaaaaccattggttttataggtctgggactgatcggcggctccattgccaaggcgattcgcaaatatcacccggactatcatattctggcatttgaccagaaccgtggcactcttgcagccgctgtaagcgacaatattatagatggggtttgcgaagaaaaggataaccgttttggcagctgtgattatgtttttctttgtgccccagtagaatataacctaaagtatcttgaatttctgaaagagatccgtcagccaggctgtatcatcacagatgtaggcagcgtaaaaggcatcatccatgaaaaggttgaagctcttggtatgacagactgttttgtaggcggtcatcctatggcaggctctgaaaaatcaggctttgagcattccaccgaccgtcttgtggaaaatgcctattatatcctgaccccaggcggagagatccctcttgaacgtcttaccgatctgacagagatgattgcttccattggcgctattcccatggtgctcactgctgatgaacatgattttatcactgccggagttagccatcttcctcatattattgcttctgcccttgtgaatcttgtaaagaccctggataatgatgcaggatatatgaagaccattgcagccggaggattccgtgatattacaaggatcgcctcttcctctcctgtgatgtggcagcagatctgcctggaaaacacccagaatatttccaatgtactggacgattatatccgtatgctgatacagatccggtgtgccattgacaacaaggatccagattacatttatcaaatgtttgcaagttccagagattatcgcgattccattgacgtggtagacaacggcctgaccaggaaggcttatgtcctttatcttgacctggcagacgaagccggcggcattgctaccatcactactattctggcaatggataatatcagtatcaaaaatatcggcatcatccacaaccgtgagtttgaagaaggtgtacttaagatcgaattctatgaagaagaagctatggagcgaggcaaggctctcctaaaaaaacgtaactatattgtttatgaccgatagactacaggaggcatcatggaaatcccaaaactgaacaagcttcacgggaaacttaccattcccggagacaaatcgatttcccacagggctgttatgtttggagccctggcacagggcaccacaaggatcacccattttctggagggcgctgactgtctttccacaatttcctgttttcaggcaatggggattcatatccagaaaaacaaagatgaagtgctggtagaaggaaaaggacttcacgggcttcaggctcccttagatattcttgatgttggcaacagcggtactactacccggctgatctccggtatcttagccggtcaggatttcaccagccggcttaccggggatgcctctatctgccagcgtcctatggggcggatcattactcccctttccctgatgggtgctcagatcacaagccagaatcagaatggctgcgcccctctcaccattcagggaggacacctccacggaatacattatcagtcacctgtggcatctgcccaggtaaagtcctgtgtacttcttgcaggcatgtatgccgatgcaccaaccagcgttactgaaccagttctttcccgaaatcacactgagcttatgctgaattacttcggtgcacaggttacttcgaaaggcaccacagctgccatacttccacagcctgatcttaaggcccgtgacattacagtccccggcgatatctcttctgctgcatactttattgctgcaggacttctagtgccaggaagtgagattctgctgtgcaatgtgggtatcaatcctaccagggacggtctgcttcgtgtatgtcaggctatgggcggtgatattacgttactgaatgtacgaaacgacggggagcctactgcagaccttcttataagaagcagttctcttcatggcacagagataaagggtgagatcatccctaccttgattgatgagatccccatgattgctgtaatggcagcctttgctgagggcactactgtgatccgagacgctgcagagcttaaagtcaaggaatctgaccgcatccaggttatgacggataatcttacccggatgggtgcagatgtagaggcattaccggatggaatgatcatccatggaggcaagcctttacatggagccacaattgattcccataaggatcaccgtattgccatgtcctttgcagtggcaggcggtatctgtgaaggatcgcttactattactgacggagaatgtgtcaatatctcttatccggaattttatacagatttgtacagcctattgtaatacaagtccaggattgtaaatggatcatgcatgaaatatttcccatgtagcacaatctgaagctttcattaccaagtgtctgatctcatgtgaaactgatagatttttgagaaaatgatggattttctctataagtctttatgatttctttttgagattcaggcgctttttttcttgttcatatttgacaattttttcacatattaattcgttaattttataacaaagtgagattttcatttttttgctattttttggtttttttcagacaaaaaagcgtgtataatccccttcgtaaggaaataataaaattgtgtaactcttcaggcacacttgctgccaatgaaatagttacaaaattgtttatgactgaccaggaggtattcgcacatgaaaattttattttatggtactaaaaattacgatgaagaatttttcgagaagatccttccggattacccggggattcaaattaaatttattgaagccaatatctacgaagaaactgcttctctttccaaaggttatgatgcaatctgtgcttttgtaaatgcagatcttagtgctcctgttattgatgctctggcagaacagggtgtgaagctgatcctgatgcgttgtgcaggatacaataatgtagatctgacagccacacataaacatggaatccatgtgctgcgtgttcccggttattccccggaagctgttgcagagcatgccatggctttggcacttactgccaaccgtcatacccacaaagcttacatcaaattacgtgaaaataatttttccttaaatggtctgatgggtgtgaacctttatcataaaacagctggtatcatcggtaccggtaagatcggtcaggctatggcacggatctgcaagggatttggcatgaaagttatcgcttatgatctttatccaaacaaaaacctggattttctggagtatgtatcccttgatgagcttctggcaaccagtgatctgatcagccttcactgcccgctgacagatgaaacaaagcatctggtaaatgctaagaccattgataaaatgaaggatggagtaatccttgtaaatacatccagaggcggtctgatcaaaacagaggatctgatcacaggaatccgtgagcataaattctttgctgtaggtcttgacgtatacgaagaggaaacagactatgtatacgaggatatgtctgaggagatcatgcagacgtccctgatccagagactgctttccttcccgaatgttaccatgacttcccatcagggattctttacaaaagaagctctatccaatatcgcagagactacccttcagaatgctgctgatttcatgaatcagaaagagcttaaaaacgaagtattatcataacagttcagtaccctagtacagtgaaaatgaagtatctgctatattggcgcagaatgattttctcatatgcaaggcagaggatagttatgtatttccatcacaaaaaatgcctccggcgttcttgctgccggaggctcctctaaaagcctatcacatgcttttgccctgacatctttaatcctgccggaggttgtatcttcggaatatgctttactgctgactgtcagtcagccctgcttcttccagctcctgctgtacttctttgtcaatctcatcctctgtaacgccttcgtcctcaaatacgccgctttcggctgcattcttctccagttcttctgctgcctgacgctcctcttctgatacctggctgtcatcaacactctgaacatcatcatctcccattacttccagatctgccagttcatcactgtccaatggctccatatcatcttcaaatgcatcttcttcgcttttatttccacagcctgttatcgtaaatgtaaaagcaaaaataattccaataaataataataatttatatctcttcatatgatacctcctgtgctgattctctatatttgtaatacagaataattcattttcctgtattatttacagatatcatagttggtggcttttgcccccaacatcttcctatattagtattagtgattcatgtttttcccgaagcagatgaatctcccttgtccatccttcatcatcattcggtgtctcaaggataaccggcagcccttgaagagccgggtggcagatcactcggaccagtgcttcaagaccgatcttcccttccccgatcctggcatgcctgtccttatggctgcctagctcattcatactgtcattcagatgaatggccttcaacctttccagaccgatctgctcctgaaactcttccagaacctgatccaaatggtctgctatatcataacctgcatcccacacatggcaggtatccagacagatccccagcttatccttctggtctgtaagatcaatgatctgcctcagttcctggaaactcctgcccacttctgtccccttacctgccatagtctcaagaagaacggttgtggtctgctcatttgtcagcacatcattcaagattcctgcaatcttccggatcccttcttctgtaccttgtcccacatggctgccaggatgaaaattgtagtaattacctggtgtaaactccatacgtctcagatcatctctcatggtatctctggcaaaatcccgaagattttctttggcagcacaagcattcagtgtatatggtgcatgagctacaatcttcccgaagtgatgttctgcagcaagcacctgatactttgccacatcctccggatcgatctcctttgccttgcctcctctgggattcctggtaaaaaaggcaaaggtgttgcctccattggctatggtctgtcttgccatagatgcataacctttggcagatgatgtatgattacctatatataacattcttattcctctctggtgtaaaatagttttatgggaaatattatactccttttttcctcgtttttgtattctgaaaatccctatagatacaacaaaataagcttagaactggcaatctctgcaatattatatcagctgagagatgactcccacctctataggtggtgagcaacaagctggtatcagtggtgggagtcaatccccaagctgatatagcctccggcaggattgcagccatcatcctatacagcttaggcagttctggtgcagcggacatatgcttattgacgaaaacaggaaatatttgtatactaaaatttgtgaaagtatctaattgtatttctgacttttacaccaaacatctcaaatatatatttacaaggagatttttactatggccgaaaaaagaaatacccgcccgaagcgttctgccaaacctggcgggaagaaagcacaaccgtccatacaaggacacagaaaaaatatatatcgtaaatccagatattatcggcaaagacagcgtcgcatccatatttgtctagggatcctggctgtcctgctggttctcatcgtaagcatttttcttcactcctgttcttcttcagcaaagcctgcttccagcacaggtgcacaggatgcaccagtttcaaataagcaagagatcccagacagcaatactgaggatactacttctgaggcagaatcaactcctacgcaggctcctgtcactttaaccatcagtgttgtaggcgactgtacacttggtacagatgaaacctttgattacagtaccagtctgaatgcctactacgaaaattacgggaaagaatattttctccagaatgtaaaaaacattttccaggcagatgacctgaccatcgccaatatggaaggaactcttaccgaatccactcagagagctgacaaaacctttgcatttaaagcccctgcttcttatgccggaatccttaccagtggttctgtggaagcagtcaacacagccaataaccacagtcatgattatggagagcaaagctttacggatacattatctgccctggatgatgcagggattgttcattttggctatgacgaaacagcagttatggatgtgaaagggatcaaggtgggactgattggtatttacgagttaaatgaccatcttgaacgggaacagcagttaaaagataatatagcaaaagtaaaatccgaaggtgcccagcttaccattgtgatcttccactggggcaatgaaaaggaaactgttcctgattccaatcagataacattaggcagattggccattgatcagggtgctgacctggtatgcgggcatcatcctcatgtacttcagggcattgaaacatacaaaggtaagaatattgtgtacagtcttggaaatttctgcttcggaggcaacagtgctccaagcgatatggattccatgatcttccagcagtcctttaccttcagcaatggctctcttcagaatgacaatgttaccaatatcatcccctgctctatttcttctgcacaaggctataataattatcagccaacgcctgcagagggggatgaaaaaacacgaatcatggaaaaaatccaggaacgcagttccatgatcgataccctatcctgatgtttaatatagcatcatctcattaccaacaatttcttacagaattataatagaatctgcaaaagccaagggaactgacccttggctttttctattaattcataactgttcaataccctcaaagctactatctgctgaataattacaacaaatattcattatggattgccgtcaatgaacatggcatccccaaaggaaaaaaatctatatctttccttcacagcctcttcataagcatgcataatcttttccttacctgccagtgcagaaacaagcatcatgagggttgattctggaagatggaagttggtgatcaggctgtcgatcatcttaaaatgatagcctgggtaaataaaaatctctgtccagcctgaaccggcttttaaaacgccatcttctccggtggctgattccagggtacgacagctggtagtccctacagcgatcacacggccgccgtttttcttagtatcattgatcagctttgcttgatcttcttctaccacgtaatactcagaatgcatatgatgctgctccacatcatctactttgacaggccggaaagtgccaagccctacatgcaatgtcacatgggcgatctgcacacctttttcttttaccttttccagaagttcctttgtaaagtggagccctgcagtaggcgcagcagcagatccctcatgctttgcataaaccgtctgataacgatttttgtcctgtaatttgtgtgtaatatagggaggcagaggcatctctcccaactgatccaggatttcctcaaaaatgccgttatattcgaaatggatcaggcggttcccatcttcgatcacatctacgatctcaccctttaataagccatcaccaaaacggatcctggttccctttcgtgccttttttccaggctttacaagacattcccacacatcgttttcatttctttttaaaagaagtatctcaatcaatgctccggtttcttctttatgtccatacaatctggccgggatcacctttgtatcattgatcacaagacagtctccagggttcagatattccaggatatccgtaaaatgacgatgttcaatacttccatccttgatggacaaatgcatcaatctggatgcacttcggtctgtcagaggatcctgggcaatcagctcctggggcagatcataataaaaatctgatgttttcataattcctcctctttttccggttcacaggtcatgtccgcataggcagctgcctgttgggtttcttccttccattgctttttcagctgccttacataattccattctttattggtaagatcagcctttttcaaaagatccggccggcttttggcagtacgaatcacagactgttccctgcgccatttctcaatattagcatgatgcccggacatcagcacctgaggtacggcttttccatgccatatttccggtctggaatactggggatattctagaaggttcccagcaaaagactctgtctcaccagattctttgttgcttaataccccgggcaccatcctggaaatagaatccatcataaccatagaaggcagttcaccacctgtcagcacataatctccaatggacatgtagtctgtaacgatctcctcaagaacacgttcatcaataccttcataatgaccgcacaaaaaaaccagatcctcttcttttgccatctctctggccatttcctgattaaacaccctgccttggggagtaagataaacaactcttggccttttcccgatacgctgtaccactgactcataggcaagataaaccggttcagcctgcatcagcattcctgcgccgccgccgtacggataatcatccactttctggtgcttattataggcaaaatcccggatgttcacagcttctatggacaaataaccggctgcaattgcccggcctgtaatgctggtattcatcccgttccgaatcatctctggaaatagggtcagtacatgaaaattcatttataccagtcctttcatcagatgtacagtcataatatttttttcaatgtccacatccagaatacactggtgaatcgcagggagaagaagttctttgccctgtgcatcctgaaccacataaacatcattagcacctgtttccattacatccttcagaattcccacagaagtcccatcctctgtcacaaccttcattccgatcagatctgcaatataatactcatcttcttccagatcctgtgcttcctctctggggatccacaactctttgcctttatatttctctatatcattaatattatcaatatttttaaatttcaggatcacaagattcttgaaaaactttacattctggatgtaaagctttttcttctccctgcctgtatccaaaaaaacatattcaagatcaggaaagcgttctgcatccgttgtaggatatacctttacttctcctctcacaccatgtgtggtagtgatcacacctacttttaataaatcttccatcaccaagctcctgtctgtgtacttatcaataaaaatacgaatattcctcatgcatctgaccgcatccttgcggagcgtttttttctaataggaacattacagagtaatttcctattacgaaaaaaggctgttgcatccatactattgcaacagcccctgaaaactatttcattgcagaatatctacaatcacttttttgctgcttttggaagaagccgcttttactacagtacggattgccttggcgatcctgccctgacgtccgatgaccttacccatatcagaaggtcccacttttaattcgatgacgatcacatcatctttctctgtctcagtaacgactacttcatccggattttcaacaagagattttgcaattacttcaactaatcctttcatcacatacctccctgtctcgtccttttggggacgtcacagaaataccctctccggtatttcttatttttcgattccggctgctttgaaaagcttagcaacaacttctgttggctgagcgcctacagaaagccattttttagctgcttcctcatcaattttgaatacacttggatcaaggttaggatcgtaggtaccaatctcctcgatacatcttccatcacgtttgctgcgggaatctgcaacaatgattctatagaaaggtgctttcttctgtcccattcttcttaatctgatcttaactgccatttttgttttcctccattttttgattatgtgttgtttttgattatttattataaataatttatgttaaaaaggaagcttgaagccacctcttttaccaccttttttgccacccatcataccgggcatctgcttcatcatcttcttgctctgttcaaattgcttcacaagacggttgacttcggaaatatccacgccagcccctttggcaatacgattcttacgggatacattcaggattcccggattgctccgttcctgaatcgtcatggaaagtataatggacttggtcctgttcatcgcactttcatcgatcatcccttcaatgtctttcatcttggcgcccataccgggaagcatgttcaggatacttcctatcccgcccatcttattcatctgatccaggctggtaagatagtcattaaagtcaaaatccattttcttaagcttcttggacatctcctgtgcctgctcctgatctacagaggcttccaccttctcgatcagactcatcacatcacccatacctaagatcctggatgccatcctgtccggataaaactgttccagatctgtaagcttctcacccataccaacgtaaaggataggcttgccggtaactgccttaatggaaagggctgcaccacctcgggtatctccatccatcttggtaaggatcacaccgtcaatccccaccttatcagtaaaggtcttggctacatttactgcatcctgccctgtcatggcatccacaacaagaacagtagcatctacttgaacattctccttaatatctgcaagctcctgcatcatattctcatcaatatgaagacgtcctgcagtatcaatgatcacaacattctgctgatgttcctttgcatgaccaatggcagctttggcaatgtctacaggcttctgtttgtctcccatggaaaaaacttctacgccctgcttctcaccatttacctgaagctgtgtaatagctgccggccggtatacatcacaggcaaccaaaagcggacgcttgccttttgccttcagcttacctgcaagcttggccgctgtagtggtcttaccagctccctgaagacctgccatcatgatcactgtcatatcattacctggcttaataggaagctctgtagtctcactgcccatcaggcttacaagctcgtcatttacaatcttgatcaccatctgtcccggattcagaccattcattacatcctgtcctactgcacgctcctgcacagacttggtaaactgcttgaccaccttgaaattgacatctgcttcaagaagagccatcttaacttctttcaaagcgatcttaacatcttcttctgtcagcctgcctttacttctcagctttttgaatacattctgtaatttttctgtcaagctttcaaatgccatgtattataactcctctaatatcacattggaaatcgctgcaatctcttcaatcccggattcttcagcaatctgatggatccgctttacctgctttcgtatattcagaaacttgtcaactaaatgaagcttctcttcatactcctccagtgccttatcgcatctccggatcatatcgtgtactccctgtctggaaattcccagatcctgtgctacttcacttaaggaataatcctccaggacaacattcgtatacacctgctgctgcctactggtaagaagttcaccataaaaatcatacaaaagtgtacgctctacaaacttttccattcgtaatcaccttgtgtatcttaccgtatttgcgcccggatgtcaagtgttttttcttgacagataaataatttaattctgcctgttaaaggctggcgcggatcacttttggtctgcagccagctgtttccagtgcttttacgatctggttcttatgatctgtgccaaatgcctccagcgtgatcttcagttcaacagccgcattacggttggtgcttacaaactgattatgctcaagcttgataacatttccctgattctctgcaataatgcttgctacacgtaccaattcacctggtttatccggaatcagcacagatacagtaaagatacgatctctctggatcagcccatgctgaataacagaagacatagtgatcacatccatattgccaccgcttaaaatagaaaccactttcttgttcttgaaatcaagatggcgaagggctgctaccgtaagaagtccggagttttctacaaccatcttgtgattttcaaccatatccaggaaagcaacgatcagttcatcatcctcaatggtgatgatcccgtccagattcttctggatataagggaagattttggaaccgggcgtctgaacagcagtaccatctgcaatagtatttacatgaggaagggtaaccacttcccctttctcaagagatgctttcatgcaagctgcaccggccggctctacaccaatcactttgatatggggattcagaagctttgcaagtgtggaaactcctgtagcaagtccgccgcctccaataggcacaagaatgtaatctaccaatggaagttcctgtacgatctccatagcaatggttccctgacctgtagctactgccggatcatcaaagggatggataaaagtatatccttctttttctgccagttccagtgcaaatgcacaggcttcatcatatacatccccatgaaggatcacctttgccccatagcttttggtacgctctaccttgatcaggggtgtggtggttggcatgacgatgactgcttttaccccatatttatgtgctgcataggcaacgccctgagcatggtttcctgcagaagcagtgatcagccctttgcttctctcttcttccgtcagtgtactgatcttataataagcaccacgcaccttatatgctcctgtacgctgcatattttcaggtttaaaataaaccttatttccagtcatttctgaaaaataactgcttttgatcagctttgtctcctgtgtcacctgtttcacgatctctgatgcctgttcaaaactgtccagtgtcaacattgtgcttcctcctcgtctgccttcggcagaattttaaatttagtttttataagtaagcttagtttttataggtaagtttgttttttatccagaaagtatattttggctttactttgtaatacttgttttttcctttgatcttaagactgtaagcggattttttatttacatggatccttacagaatcagatgttttgcatttgtagaagctacaactgtcgatcaccaggcttaccttaccggatttcaggttttcactgtaaatattgtgtgccttattattcttaaaaatacacttcttgatcaccgcacgggtgttactatcatttacaagaagccctgttgctgcattggcacggaatttacaatttgtaaatgttcctttagaaccgccaacaaggataaccccatcatgtttgtctttcagtccgtttttgtaaatatcgcaattagtcattgtaacattgcacacaagtgctgtaccaagaccatgacgtccattattgtaaagcttacaatttgtaacagacgctgtaccattctttacggaaataccacattcacggttgccattcagctgagaaccggaaatattgaaaacagacttctcatatacgcctactccgtgtcccagccctttctttggatatccggaaccattattcaggatcttgcatcctttggctgtaacctgacattgaccagacagtcccataccaatgctggtactcttggaaatagttacattttccaggtatgcagtcgttgcacgtaatttaataccattcaatcctgattccacattcatattaagaagacggatatcggatccgctgttgcctgaaataacagtagaacctgcacttcctctccaggtaccgccatctaccactgcaccggaagccccggtcaggttgatcagcttgctgcctgtacctgttacaaccgtctgctcatcagcagccagcaccatcctggatgcaagttttaccgtaccgtgaactgtataagatcctgctggaaaatatagcagttttttaccactgttttttcttgctgcacgtaaagcagatgaaatagcaaaatcacaggcctgtgctcctgttgggtctgccccgtattcggtcacattataaacggtataatctccataagcttcagatactgccgcatgtgttatctgaggatatccagccagaatcagtactgcaagcagcagaaaacagatatttctccatgtttttttcatattctacctccttacacgatcccgtgtttattcattatcttccccgatgcttcgggctctttcatcaacattgaacaatgcatttacaaattcgttggcatcaaatttctgcagatcatcaatactctcacctacaccgatatatttgaccggaatatccagttcagactggattgccactgcaataccacctttggctgtaccgtcaagcttggtaaggatgatcccgtttacattggcaacttcagcaaactgtctggcctgtacaagagcattctgtcctgtggttccatccaatacgaccagagtctccaaatatgcttccggatattctttctcaagaatccggtaaatcttacgaagctcttccatcagattcttcttattgtgaagacgtcctgctgtgtcacagatcagcacgtcagcatttcttgcttttgctgcagccactgcatcatatactactgaagcaggatctgctcctgactggccaccgataatatccacacctgcacgattggcccactgggtcagctgttctcccgctgctgcacggaaggtatctgctgctgcaaggatcactttcttcccctgatcctttaatttacctgccagcttacctacagatgtagtcttgcccacaccatttacaccgattaccaggatcactgacttacgattctcaaattcatagtctgtgctgtccacatacatctgttctttaatactgtcgattagaagttccttgcactccataggatccttgatatgcttctcttctacctgagttttcagattttcaagaatagctgtagtggcattgatcccaatatctcccatgatcaggatctcctccagctcctcgtaaaaatcatcatcaatactggaatatccgctgaaaagggagtcaaaccctttcacaatgttgtcacgggtcttggtaagaccacttacaagccttttaaaaaagccttttttctcctctgccatatcccattccctccttactgcgttagctggttctccacaaggtcaacagacacaagagtggatactcctttttcctgcatggtgataccgtacagtctgtctgctgcattcatggttccccttctatgtgttattataataaactgcgtgttcttcgtcaacttctgcaaatacccggcaaaccttcctacattggaatcatccagggctgcctcgatctcatcaagaagacagaacggtgaaggcttcaggttctggattgcaaataaaagggcaattgcagtcaatgccttctcaccaccggacagctgcatcatattctgcagcttcttgcctggtggctgggagataatcttaatgccagcttccaggatatccacatcttcttccaattccagagtacccttgcctcccccaaacaattccttgaaggctttgtcaaactctctctggatatctctgaatttttcggaaaactgctgacgcataccttcatccaattcccggataatattttcaagctgagcctctgcttttttcagatcctcatactggccggaaaggaatgcatgacgttcctgaagatttttataatcctcaatagcatttacgtttacagaaccaagctttctgatctcatcctttaactgtgtgatctgcttcttcatttccttcaggtctgtatattcttcctttcgatattgaagagcattattaggtgtgatctcatactcctcccacatataggaaatctgagcctcccggctttcctccagcttttccatctgacttttcaggcggaagcattctttatccagcaaggaaatctggccggacaaatgatcccttttttcaaaaaaggctttatggctggtatttttcagatccttttctttctgccaattctccagctgctgtctgtctgcctcttcctggccgccaaatccggacactgcttctttcagctcttccacagatctgcgcttattttccatctcctgatttccctgcttcagggtttccaaaatagtctgtttttcctgcacaagtccttggatctcagaaataagacgggaaagattctcagatgcaaagctttctttctgctgggtggtagatgcttccagacgaagatcttccagctttctttgtactaaactttcttcatttttccattcttccagttccttctgccttgtctcgatataggtttccagttctttctcatcttgtctggaagcttttaattcttcatcgatcttgtcatgatcctgcttgatctcacttaactgtctgcggatctgctcctgatccagacggattctttcatatccatcacggatctcctgctctttatcatttagctgtaccagattcatttttgcagtattctgtgctacgtatttgctgcgcagctgttcctgcagctgtgaaatctgctcacggagctgattgcggttatgcctgttctcttccatagaagcagccagacggcttacctcttccttttgggcagccacctttccttccagttcctcgatctccctgcgccttcccagaagattgctgttattcttaaacgcaccacctgtcatggacccgcccggacttaaggattctccctcaatggttaccatacgcaggctgtggtgatacttttttgcaatggcaattgcatggtcaatctgatccactaccaggactctgccaagaaggtacctggtaagccctgtatattctttttctgtggtaaccagatcagaagccaggcctatcacacccgcctcctttaatgcatctttctgactgaactcacctcttgtattaatgctgttcaaagggagaaatgtggcacgaccgaaacggttcttcttcaggtattcgatcatcctttttgcagtctgctcattgtcagtaacaatattctggatacttcctccaagggctgtctcaatggcgatctcatactctttgttaacctggatcagatctgctaccacaccacggatgccggatacccggtctttctgctccatgaccctgcggatactgttgccatatccgtcatagcgttctgtaatattccgcaaggattccagcctggatgcttccctgtggtaggcggtctgactgatctccagctgtgtggtctgttttttcagatcttcactaaggctatgtacctgctggtccatctgtctggacttctgatcgatctgatggatctcttctgtgatctggtcatactctgactgggcttttgcccgaatggtcttctgctgggcttcctcacttttcaggtgaagaatgtgttgatttacttctgccttacgaatccccacctgctccatcaaagtatcaaatctctgagcctttccttttgtggtagctctggaattcaagatctctatgatctcgttcttgccgtcttctactgcactttcacactgggagatctgttcctgcaccgtatgcagtctgtcttcctggtctgtcagccgtttctgagcttcttttacaatggtatgaagagatcccttctcttcttctacttcagatctggcctgctgtctctgcttcagatcctcttccacaatttccagacggttcttaaaatgtgtatcactttgcaagcctgcctggatctgctcgtttaaaacattgatctggccttccaactgctgcttttgcaacgcattttgctgggtcttttccctcagctcatccatctgccggttcagttcttccagttcctgctccagacggtcatactctacctttgtctgctggtattctctgttggtatcttcaagctgtgcagatgctgtttcattcttctctcttaacaccaacagatccttttctgtctgccggctttccaaaaggaacatatttacatccagttcccttaagctgtcccttttcgctaaatagatccttgccgtttcagactgacgttccaaaggtccaagctgcttggtaagctcgcttaagatatcggttacacgaaccagattctgttgttcatcctccagctttttgatggtggtatttttcctgcgtttatacttgacgattcctgctgcctcatcaaacagttctcttcgatcctctggctttccgcttaagatcttgtcgatctgtccctgtccgataatggaatagccttcctttccgataccggtatcataaaacatctcattaatgtctttcaacctgcatgcactgccgttgatcagatattcactttcaccggagcggtacaaacgccttgtaactgttacctcattaaactccactggcagcttatggtcactgttatccagcgtaatggcaacggaggcaaagcttaatggctttcttgtctctgttcctgagaaaataacatcctgcatattgccgcctcgaagctgcttggcactctgttctccaagaacccagcgtactgcatcaccaacattgctttttccgctgccattaggccctacaataccagtaatgccattgtgaaattcaaaattgatcttctgtgcaaatgatttaaatccctgcacttcaatattttttaagtacatattttacctatggccctttattttctcagttttcggattgcctcataagcagctgcctgctctgcagctttcttggtgtgtccggtgccctgtcccattacctggtcattcaccagcacttccactgtaaagcttttgttgtgatccggtcctgattctcccacaaggcggtattctactccatgactcagattctcctggacaatttcctgcaggatggtcttgctatcataaaagagctgcttatgctccaggtcattcagtataaaatccaatacaaactcctttgcattagcaaaaccaccgtccagataaatagccccaagaagagcctctgttgcatctgagacaatagaatcccggttccgtcctcctgtaagttcctctcctctgccaaggagcagatacttaggcaactcaaaatcccttgcacaaaatgcaaggcttggctcacataccaggcttgcacgtttctttgttaattctccttccggaagctttggatatttttcaaaaagaaaatgactgctgatcagttccagcactgcatctcctaaaaattccagccgttcattacagcctccttttccaagctttttttcatttgcataagagctatgggtcaaggctttcacaagaagggttttatctttaaagctgtacccgatcctgctctccaattccgttaaattcgtctccatattatctccttattataacaaatcatcctattgcaaacattactgagtaatttcctgctacacacaagaaagggctgccgttccaggctgtccccaaaaccggcaatcccttctcaagaatgcctcggcattcttgctgcgaggtgcgcgtcatgcaattgcatgacatacttctcctgcgcacctctgcaatcctgccggaggctatatcagctgggggattgactcccaccactgataccagcttgttgctcaccacctatagaggtgggagtcatctcccagctgttatccttactctttagatgtgtcagccatctccagaatatgttccccgatcttttcattgatccgctgctgtttaaactgaacacactggaaaatcccgtttttgatctctatggatctggcacttccatgacattttaccacaagccctttaagaccaagaagcggtgctccgccatgctctgtcacatcaaaggatttcagggtcttcttaagtgcaggcttgatcagaagtgcccccagcttgctgcggaaactggacatcaggccgcctttgatcttcttcatcagtgtgcctgcaagcccttcataaagcttcaggatcacattgcctacaaaggcttcgcataccactacatctgcatatccggaaggaatatcccttgcttcaatgcttccgataaaattaataccagggcatgccttcaaaaggggaaatgtctcttttacaagtgcatttcccttttcttcctctgcaccaatattcacgatggctactttgggattcttgatccccactacattctccatgtaaatagatcccattttggcaaactgtaccagatgggaagatctggcatcaactgtagcaccgcagtcgatcagaagggaaactcccttctctgtaggaatcagaggtgccaagggcggccgctctactcctttaagtctgcctacaagtacctgacctccaacaagaatggcacctgtacttccacaagatacaaatgcatctgcctcctggcgctttaccatcttaagtcctactacaagtgaagaatcctttttcttctggatggccataaccggcggttcagctgtctggatcacctctgtggctggtaccacctggatcctgtccttaggataatcaggatatttcgcaagctgggcatgcacttcatcctcaggacctgtcaggatcacctggatatcttttctttccgtaaccgcttctacggctgcctttacaggctcctgaggtgcataatcgcctcccattgcatctacaactacttttaccaattctgacatttataattacctcctgaaaaaagcgaaactgcttcctggatttagtattccctgtggccaactgtcctaacatacgcttacagttactccgtatcttactatactaaaaacaaggcgcaaaagtcaatagcattcctctatatgctccggtggcatcctgttatccgccaatctcacacatagcccttagttcttccttttctttcctttcgtccttttgctcttccaggaaatgatggcacataggtttttcttttactgccttaaggatcatctgtttcagcgtttcttctgatgcccctttttgcaggtaaggcataagatcacagcctgcctgatactgaagacaggttttcagatatccgtcactggtcagccggatccggttgcactgactgcaaaatttatggcttactgcactgatgaagccgatttttcctttaaatccctgtgcctgataataatgggcaggaccatttcccagactgccttcataaggaatcagctgagtatgaagcttcttttccagaagcatcagaatctgatcctctgtgcagcaggtaaaatccttcccatatccgataggcatcatttcaataaaacgtacatgcaggtcctgatctttggcaagtaaagccagatctgccagatcctgatgattttttccataaacaggcacacagttcagctttgttacaagctccggataagataaggctgcttttagactgtccataacaggaaggagcctgtccctgccgctgatctgttgataatgtacggaattcagggaatcaatactgatattgactcctgtaatccctgcctttaccaactggggaagatactttttcaataaaatcccgttcgttgtaagagtaacgctgcgtatcccaggaatctgccttatttctttaataagtgtgggaacctgaggccgcaaaagaggttcaccgcctgtgatcttgactctggacactccaagctgtgcaaaacacctgcacagcataaggatctgatcatctgtaagcatctgtttgggcactttttgtatacagccttctggcatacaataaatacaccgaagattgcactgatctgttacagaaatcctgatatagtcaatggttctgccataactgtcctgcatacggcttcctcctttctttttttccttgaaacacctgatgatttttagtataatttttccgggagcagaaaggtgctggtgtgtctcctggtcttcaaaaccagtgtggggcatggattgtcccgggtgggttcgattcccacatgttcccgccagtaaatcatatcttttttacagcttttcagttatccaatgctgtgtgccagaattcttttctttccattccagctggtaaaatgctctttgtcgtagctttccaaaagagtaatggcacactttcttgaaataccaagtatatccctgaacattcctgtagggatctcaccatgttgcctaaaaagaaaagcagcacattcttttcctttcttataaaaggcttttgccatataatctccctctccaaacctgcataaatctccctgctgtatcattttgaaaaaagcctgggaaaatcccggttctttcccaagcagttttttgacctcacaggttttaggtggaaagaaacccgcctgctgatacaaagcgcagatctttttcatggtttcaccggattcctctggcttttggcataccttttcccgtctaaccttatcgcaaagctgtattactacaccgcctccaatggtttttgaaggagaatatttccgaaggatcagatgatctccaggctttatataaagttctttttccaaacgaagctgtgcctggcattcttctcctggaaaaatctgttccttaccttccagaagtatcctgccctgaaatgtaccacagccccagcatacctgtatacgactgttattttttacaggttcttttaagctttttacggtctgaaactgtatatttattctccctgcaggcttttgactgccaggctgtgccagtaccatgcctctggaaatctgctttttttctattcccggcagattcactgccaccctggtgccagcctgtacccattcagcctgttttccaaagatctccagcctgcggatcttaacttctttcccttttggatacaggattccttttgcacctgcacagatccttccctgaaccagggtacctgtaattacagttccaaaccctggcactgtaaaagcacggtcaataggcagaaaataaggcagagaaaggtcttttggcggcagcattttggcaagctgtgacagctcctttcgtatggtcttgatcccttcaccagtaagtatgctggtttctatgacaggtgcctgttcaaggaaagtcccttttacaagggtttctatatcctgtctcaccttctgcttttgcgttgcatcagccagatcacatctggtaagagcgatcaatccttttttgatccccagaagtgacaggatctgcaaatgctcgactgtctgaggcatgatcccctcatcagctgccaccacaaatatgatgatctccattccccacacaccagccagcatattcttgataaagtgctcatgccccggtacatcgatgatcccgccacggatctcttgtcccagatccacaggggcaaatccaagatcaaccgtcaggcctctttgcttttcttccagaagccggtctgtatccacccctgtcaacgcttttaccaaacaggttttcccatgatccacatgtcctgctgtcccaatggtaacgtactgcatccactcacctccttgtgaggaagaacatttctccggctttcttaaatatcaagaacttttttgattatctgtgtcaattccttcatttctcccggaaatatggtccgcatatccagaaccacctggtctttctcaattttcccgattaccggaggctcactgtggcgcagcctttcttctatctccatcacagaatacctggatgaacggatagacaggccttttcctggcagatcctttcccggcatactgcctccacctgttgttcctagagtgtcgatcatctgaagctgcacatgatctcctgcttcatgttccaggctttttaataaagcatctgccatctgttccatctgttccaggctccggctggtcatttccaataccgggatcttttgtttttcagattccttgtacagccttactgtttcatccagcacagctgccgtgaatttatcgatcctgagcgcacgcatcagaggatgcttttttatcctgtggatcagttctctttttcctgcaagtatccctgcctgcggcccgcccagcagcttgtccccactgaaggacaccaggtctgccccctgagccagaactgacctgactgtctcttttgggtccgttccgggaatatagcccagatctccgctgcccagatccaccagcagatacagctgacgcttatgtgcttcctctgccagttcttttacagaaggtgcacaggtaaaacctgtgatctggtaattactggtatgcaccttcaggaatgcagccgtgttctctgtaactgcgccggtataatcttcaaggtaagttcggtttgtagtgcctacctcaacaaggattcctccgctttgctccataacctcagggatcctgaatttccctccgatttccaccagttcccctcttgaaacacaaacctgacgttcaaaagccaatacagtaagcataagaagcactgcagctgcattattattgaccactgctactgcctcagcgcctgtaagactctccagatcctgctgaaaggaagccagcctgcttcccctttttcctgtttccagatccagttccagattggtatacccggtcatcagccgtgccacatgctctgctgtctcctctccaaaaggtgcacgtcccagattggtgtgcaggatcacccctgtgccattgatcacatgggtcagatgcctgcgcttctgcttttttagtatggcacggatctcgttaaatatatctcccgggtcttttcccggatcctggcgtatctggtctgcagcaatccttgcagcctgcaaggtttcctgatatccgtaagtcttggcaagctgcctgcctgtttcctgagccatcagctgatccattttagggatctgccgcatcctttttggatcatccattttctttttcctcttcaatccgctgggctagatcatttaaataaacccatctgtccattttttcctccagaagcacttctgcatctcctttttctttcatcaactcctgaagttttaaggaattggtggcatttttaagaatctcctgatccagattttcaatcttctcttccaggctgctgatcacatcatcaatcgtctcaaattccttttgttctttaaaagaaaatttcagcttctccggccggttctttttccattcctttgcagccttctttttatcttctgcagatttctccaaagatgccaaagaagcatgcactgctttttcctgctttgcctttacatagtctgtatatccgccttcgtattgtaccagatggccatccccctcaaatgcaaaaatccgatccactacattgtccagaaaatatcggtcatgggacactgtgatcacaatcccgttaaaagaagacagataatcctccaatatagttaatgtagggatgtccaggtcatttcccggctcatccaaaagcagcacatttggtgcttccataaggactttcagcagatataaacgccttttctcaccaccggacagtttctggatgggagtatactgcatggcggagtcaaaaaggaagcgttccagcatcatagaggctgtgatctttccatctctggtaggaatatactctgccacatcacggatataatcgatcacacgctggttgttgtccatatccggtacttcctgggcaaaatatccgatccgaatcgtttcacctacctctacttctccctggtccggctgtaccacacctgcgatcatacggatcaatgtggattttccgcagccgtttggaccaatgattcccagtctctgccctctcagtacaatataatcaaaatcatttaccagcatcttatcctgatatttctttgtaagatgatgaagaagtatggttttttttcccattcgtgtttctacggaatccatttctaccgtctgctctgccaaaggtgtggttccgtttttcagggcttccaaacgttccagacgtgctctttgtttggtgctcctggctctgcatccccgctttgcccattccagttccattctaagcacactgcggcgtttccggtcgctggcaagctccatttcctctctttgggctttcagttccagaaatctggaatagtttgcctcataagaatacaagctcccgtgactgatctccaggatcctgttggacacccggtcaagaaaataacggtcatgagtgaccatgatcagcacccctttaaaccggatcagataatcctccagccatgaaaccatttctccgtccagatggttggtaggctcgtccagaatcagaatatccgaaggattcaccagtatcctggcaagtgcagcccgctttttctgacctccagacagatgggaaatttttgcctgatgatctgtaagccctagcttattcagcacatttccggcctcactttccgtaccccactctttatgccatcttccatctgccacataatcaagaacggtaccgtctgcaggaaactgaggattctgcggaaggtatgccagatggacaccattctgcatgatcacctggccttcatcgccttcttccagccctgccaggatccttagaagagtgcttttccctgtaccgttgataccgatgatcccaatcttctcaccttcctgtataccacaggatatatcgtcaaaaatcaccttttcgccataaaccttgctgatatgttctatatttaatatattcatcctaaaaactccttgttatcatagcctggggcttttgacccatattccatcctatcacaaaccgcttattatttccacttctttaataaccagccatctccttaaacaagaatgcctcggcattcttgctgcgaggtgcgcgtcatgcaattgcatgacatacttctc

SEQ ID NO: 81 - DNA, 80304 bp, Unknown
  gut microbiota DNA sequence
tccagggtatctgcagtctctcgcttcagcatatctgcgacccgctgattgccctctttcttaagttccatctgtctcttcgtatctgtttcttttgcaagcagacggtcatatttgcagatcaattcatggcctttggccattaccttttcctgataacgctcaatatggaatactgattttttgtaggaagcatctgccatagctgcgatcaggcggctagaccagtagaagttatctgtagaaacctgacctgtggtattggaaaggtattccggtgcttcctcaatatctgcgtaaaatggcaccagtacattgaatgcgttggaagcaaaagccacccattccaatgtattatgggatttctccatacccgggcgcatctggatcacagacagaaaatcgttccgattaatgccaatagaacggtacgctcccttcatagaaggatctccataagcaccgtatgggtcatatggggttccctgaaaatgagaggaaagtacatacttcacatcctctactgtcacctttttctcaggaaccagacaccagggaatgtcatccgatgcaggtgtatagtccgcatctgctccatcccatttatatgtatggggattcagataacgctccatgatccaggctcttggtgtattgtatacatggtcagcgtcatcatggctgccaaaagcatctcttgggttcagcactccatcccaggacagatcaagatggttttcattaataaattcccgcatatcagaagaacacatatattccttctcagtggaaagagcgtcctcaagatcaaactgatccaggcccagctgattcggcataactacatacacatcatccggcacacggcgtgcgatccagtgatggccgccaatggtctccagccaccagatctcatcctgatcctggaatgcgatcccattcatctcgtaggtgccatacttctccaaaagacttcccagacgcttcaccccttctctggcactgcgaatatagggaagtacaacataaaccaggtcttcttctcccagccctcccgggatttcaggtgtatcctcacctgccggctgataggtcaccaacgggtcagcgccaagaacgcgaggattggaggtgatcgtttctgtagctgtcatacctacgccagcttcattcacgccgcttgcagcccagatccccactccttttactgcatttggcatagctgtgtatctcatgggatcagatggcagctctacttccacatgagaaagctctgatctgtatttcacaggctgatcctctggatggatcaccacaaatttctttggtgtaaaatgtccggagcctgaatcgtcattcctggcgatcatagtggatccgtcataagatgcttttttcccaactaatatagtcgtacaacccattataatttctccttttccttaaaattgaaagtgtatccacatttttgcacaaagataaagaggatatccacattcttctacaaatttctgaatatctgcctgcatgaggcattctccttatcctgccaggtgcagtacctggatcagtaaaatccagccaagtccataataagtaacaacagccacaaggtcgttcaccgtagtgataagcggtcctgaagcaactgcagggtcaatattgatcttcttaaagaacagcggaatgcatgtacctactgcactggaaatcaacattgccaacagcaatgccacgccgatacatccggaaactgcataggaaaacagcagggttttccctttaaagaggtaaatataaagcccgatcacagcaaaggacaatataccaagaagaccgccgttacataaaccgatcttcatctctttaaataccagctccaccttctgcttgccagtcaaggactcatccatcagtacgcggatggtaacagccagtgactgggtaccaacattaccggccatgtccaggatcagtgactgaaaggccataataataggcagctgggtaactacatgctcaaatactccaaccacagaagatactaccatgcccaggcccagaagaacgatcagccagggcatacgtttcttcatactttccttaagcggctccttcaggtcctcctctgcagtcaagccggcgaacatggcgtaatcttcacccatctcatcatctaccagatcaatgatattggcagatgtgatcacacccagaagccggttgtcattatccagtacaggaacggaatcctcggaataatccttcagtttttcgatacaatcatcaatatcctcttcagcatacacatatggataagaagtgaccaccagatcctcaagtgcccgatcttgcctggcaatgatcagatccttcaggtcaatggctccgtaaaatttctgctgctctgttaccacaaacaatgtagaaatattgtcattcttggccgcctgctctaccaggctgctcattgcctgtttcacagtcagattctcacggataatgatacagttggtggtcatcttgcttccgatctcatcatcatcaaaagaagcgatcacttcaatatcatgacgtacttcatcatccatcaaatccagaagaagacgttttttcgccttatcgatcttgtgcagcacttccacaagggcatctgtctccatccttgaaaggatcgcagcccctttcttcacgtctatttctttcaggtattctgctgcattatctgaatctgtatactcaaaaatatctgacagcatatccatatccaggatacgatacagcttgcatctttcctgtacggtcaactccggcataacctctgccaggtcattcgcatgataatcttccagcctgctgcacataacagcaggggatgtattgcttctgataattttcaggatctctccggtataatcctgcgttcttttttccatcctctttcctccatttccggcaaaggggtagggcatccccttccttagccattttctgctgtaaatggacaccaaaataaagcagatctgtcttccgcttctaaaatgtgatgtttaagaataccactggcattcttgctgcgaaatgtgtgtcatctcacatcggatataatttatcttcagggattcataggataagaaaaaaagaattgatagaattaaaacagaacagaagaacagtgctgcttcaagggtatcaaattttcccatcctatgctactacttcgcccatgagaatcacaactgtccactctgttcacctgccttttttctgaaataagaatgtctgacattatatgtaaaaaatccacatcattaatatcattccattacacaagacattctatacgcttttttcgcaaaaagcaataataaatttcgtcttacttcataaatagccgggcatcaataaatacccacaaaagataaatcattgattctttttcaaaaatctccacaacgtagacctgctgattcctaaccgatctgacgcagcgcttttattcccctgttcttcttcaaggaccttgcatacaatatcataattaattttatctaatgtttgattaagatctaaattaatatttgcatcctccgccttttcactcactgtagcaataatattttccttttttaaaacagtttgaacttcgtcaacattaagcatactgctttggcttactgtaaccaattcttccatcacccgttgaaattgcgtataattatgcggccattcatagtcctccagcaaccgtaaagcatccgtttcgattcctatcaatggtttcgtcagccgtatattcatataattcagatacttatttgcaagcaaacttatctgatttctgcgaaagcataatggtgcaacaaataaacatacacaacataaagcttcgagaatgttttttcctgtttccgtcacagagccctgtttattacaaacaccggaaaaaataacccgatttcttttgcaaacattcatctctaaaagattagcaataagctgacatcgctgaatcactgacagtacatctatatttttaaaataaattgtacatccatcctgcgccattggagaattgtgatgatccataagataatcccatgctttattattcagcatatatgaatcaatcacaacaaggggacgattattccatcgactctgtaaatacacatatttgcaaatttgttccttacaggttccatcttctccataaatcagcaatggttgatcacttttattgaccagctcaacctcctgataaatatcaggatccattccaaccacgccataaatactgtcattaaactctttttgtgcttcttcctggcctaagtaacgaattccacggcgaatatcaggcaatgataccttattctccgtaaaataatatacggtgtattctttctgggtaatatactcctttgttaaatgtatagaatatctgatattactgatctgctttataatgtgacaatcatctccgctgaactggcgatttctttcttctcttaaataagtaattataggctcattgttattttccagggttgagagaaaaatttctccattttcatcaaaaacaactgtatgattcatatgtttccagataagattccgtaaaaaacgattttcttctcttaggttttgatgcgtataatacaattgacgcgcccgcatgaaggctgcctcaacacattctttccctgcttgtataagcactgcattcaagccgagctttaaagctgtggtataagcaatcatatctccaataaccatatgattccctgtagatgggactgtctttaaaagattttcaacctcactcttatcgttaatggataacgtattaatctgggttttcataagctggcaaatcgtatcaacattgctgatgatattagggaatcctatgacagtgcaagtttcagagacatttccgccaactcgcatggcacgtaatacatcgaggggagatgtttcaatctcaatcactgggatatccaactgacttttaagcatagacgcagtaccaccacgcgaaataataatatcataatcattatagaaattatgacgtgcaagaagaagcccctgtccaagatttccaacaaaagcattacactcaatatcatcaaacagctttgcagtttcaagcaaaagtaaacgcatgccttcataaggtgcaatagcaagtatacgtatttttctcatatctctccttattcaaaatccgcaagataaccctcttcatcaaaatcccagaaatatggatcactgattatttgaacatttagattgtcacgaatatccggaatcaggcttgtggaaatttccaattcacttaatgacaatgtgtcacgaatcctggctacccgtgcttttttaaaatctattttcgtacaggtacgtatcgcaactctgattgcttcataatcattattctgatacatcggtattttcccgccatcaatcatggtattggttgtaagatttacccatgtactttcccaatcaacagaattaagacactttcgtgttgtgatatcagcaaggcctaatccgcaggcattataatgactctgctctgtaagtcctcggatcataagacgttttgtatgaaaatcgtctttgaaatatggcatgaacccacgtcctgtcacatttggatcagcaccctcaccggaaatattcttaccgattctatctacaataagaaggtctatgttatcgaaaagcattctcggaaatcttcttcttgcaatttgaagaagctctttatctccttctataattttctccttaggatatacttcaatttctgatatttcatcataagcattttgcacgactccaacgccaaacagcaccggaagtttactaagaaaaacttctgctgtcattggaattctctttgcaaaagtatcaaatccctgtgcatgaaacatggaacaacctttatgcttggctaagccaatcgccatcattttaagtaacccactttcatgctcgcctttaaaatctgtatgaactttaactttgttatacaaaacaatcccgtcagcttcagccgcatatttatcacaatatacaggtgttccaacagcatcattaatagagccaatctgaacaacctccatacttgcaagaatcggtacgcccattgcctcttccgttattccgtaaccatttataatttcaagatttccttctacagtaccaccgccatggcttcccatagccggcacaataaatggctttgctccccattccttcaacttgtcgcaaatagtacgaacaatttccgcattatgaggtataccgcgactgccaaccgttatcgcaattctttttcctttagcatttgcagccattttagattgttccagcttttgctgtaaatgtgaagtaatgtcttctattttgtcatcctcaaatttttgtctgatccttaccatctgaggcatcggtactgaatctataccttgaatcggaaaactgatttctggaaaattaatatttttcatagctgatctccccttaatttaaaaagaagatcttctccaacattgtacttgtgtaaaagaagatcttctttaatagtttatattactctactattgcatatgctcgacatggcgaaccgccgcagcccaacaattttaaaggtactgcatgaagttccacttctttatattcaagcacttcatcaggaaatgttaattcctctaacaaccatacctcattggaaagtaagatttcgtgacagggtcttccggtaccctcataccatccgcccatactcattccatcaataccaacacctttaacacctttgtccagaagccatttagcgccttcgccggaaagatatggccaatcattataatattctttactgaatccacgtttcttataccacccagtgcaaagcaggacaatcttgccttctgtgatcaggtcttcatatggaagaagatccttgactccgatggcatagcagccggatacacctgtcagattaacaattacagccttccctataaatttatccagaggaatctgatcaattgttttcatatctgggaagaaatggaacggcgcatccaaatgggtagctgtatgggtattcattctgataatttctgaagtatacccttccacaccaacaacagtttcatgagtaaccgttgtttctttgtatgttggccagcctgggcatgaactgtaaacaggctgtgttaagtcaaaaattttcattctatcaccttcttattcagctttggattctgggaatacgttctcttccagctgtttagtcacatcatcatctttgcagttttctgctgttaccagaagtgtaggaacatcgattttctcttccggattctctccattaaagatctgctgtgcagtctgaactgcatattttcccataagtgcaggctgctgaattgctgctgcgagaagttctccattctcaatgcttgttactgtctcaggtgttccatcgaatccacaaacgataacagaatctcctttatctgcgttctgcactgccttaactgtacctaaggtcggctcatccatatgagtaaagataactgcaagatcgtcatatgttgtcagaagatcagaagcaattccttcagcctcagcacgcgtaaattggctcatctgcttgtaatctgcaagttctacaccaaattcctccagtgcggcattaaagccctcatatcttgccttaatattatttctagccatggatcctgtgatctgtgcagctcttccagtaatattattgtctttcatatactgaagaacatactctcctaattcctgagaaccatctgcattcggagtaacaatcagagtttcataagttccggaatctgttccgatatcagcaataacaaccgggatctcagcttcttctgcaagtgacaaaacagccgggcaggatgagctatcggttggtgaaatgataatcaaatcagcacctttagagattgcatcctgagcgttctgtaactgtgtttcactgctgtttttagaatcataaacctgaactgttgcatccatttctgaatcaattacttcattctcgataccgtttgcaagatatctccagaatggaagatccaagccaggggtaagatatgcaatctgctttgtgccttccacagcctcatccgcatttgcgcataccggcatagacattaccataacaccacaacataataccgctaccaatcttttcttcatttttgtttcctccttaaattatattttttcttatttatttcttttgctggctaagctttcagccagtacagctacaataattacaactcctgttacagagccctgccagaatggattgattccaagcagatttaaagcatttcttaaaaagcaatacagtaatacaccaataaatgttcccggaagtattccttttcctccagccatacttacaccgccaataactgctgcggcaatggaatccatctccagcccggatcctgtagtcggatccacagccattaatcgaatcatattgaccatagcagcaagaccacacattaaacctgaaataatatagcataacattgtataccaattaacatttataccagataaccgtgtagcctctttgttggagccgatcgcataagtaaatcgtccaaccttagtgcttgacataatccatgtcattaagatatacagaacaatcataaaaataatatatacacgaatatccagtattttatagtttcctacagtgccaagcgcaggcggaaagcctgaagctgaatttccatcagagcaaacataggttaatgaattacaaattacctgtgtacccaatgttgcgataaacgccgcgattctaagatatccaaccaaaaagccattaataaagcctaccagaacagaaactcccaaaataatcaatattcccacaaagaggttctgtgtcctggacatgtacattccgccaagcattccactcagacctataatcattccaacggaaagatcaattccaccggatacaataacaaatgtttgtccaattgccagaatggcggttactgacatctgtgataacacactaagcacattcgatttggtgttaaaagaaggtgaggcaaagctcattatgatataaaacaccaagaatacaattaacatagataattctgaacggtatgtcttaaaaaaacgtgccctcttctcatttttcattttcgtttcctcctatggttgccagttttgtaatcttttgttctgatacctctgtatgatccaattctccggccagttgtccatctcgcataactaaaatccgatcacacatgcctattacttccggttgctccgatgaaaccatcaatacagttacaccttcatctgacaaccgattaagaatcgcatatatttccgatttagatgagatatcaattccacgggtaggttcatcaataatcagaatctgtggattcataagcatccattttccaagaagaactttctgctgatttccaccgctcaggctgtcacaattatcatgatggcttcccattttaatgtttagttcttccttcatttttgcagcattatctacgctttttcttttatttataatgacgcttttttgtatactctgaagcaccagcgagatattgtctgaaatgctttcatccagaatcagtccatcgtattttctatcttcaggaacaaaacccacacctgccagaattgcgttttttactgtcaggtttttaatttctttaccgtgaattaaaactcttcctgttttcttcttgtcaataccgaaaatacatctgacaaattcggttctcccagcaccaacaactccagtcagccccacaatctcgcctttccgcaatttcaggcttacatccttaacccgtccgttaaaatcagatatatgttctgcctcaagcacaacctcattttctttacaagctccaaatgtcctggaaccatacaggttcttaatctcacggccaaccattgatttaaccagatcattttctgtaagatcttttatatttgcgccattaagaatttcttttccatcacgaaatacagtaactcgatcggcaatttcaaagatttcttcgattttatgagagacaataataaaaccgatatttttctcagacttcaattgacgtacaataacaaataactgttctacctcattcggtgatagtgctgcagttggttcatcaagtataataacttttgaatctgcatctacagctttaaggatttccagtacctgcatttgtgcaatggataaatttttcaccttttcataaatgtccagatttgctccaagatcaaataatccaagcagttcttttgcatgcgagtacattttacgtttgtttaataaaaagccattgtaatattcttcatttccaataattagattctctgcaaccgataaatccggcagaagattaaattcctgtaaaacgatagaaatacctttagattttgcagctttaggattttcaactgtcattttctcgttttcaaaaaataaatctcctccatctggctgatgaatacctgcaaatatctttcccagagtagatttacctgctccattttctcccattaaggcatgaacctctccggcctttaagcaaaaagacacgccgcttaaagcctgagttccgccgaaacgcttggaaatattctccgcaaccaatattccgtctttttgacttcccatatttaacactcacctccgcaatatctaaattgattactgagttctgtgatttgctaatgtaattgcataatcaatggcatttgtaagactaagctcattagctgttcctgatccagcatgtccaaatcctgttccatgatcaacactggcacggataataggaagtcctaatgtaacatttacaccagcaactgcatcccaatgtttctcttttttgttatatacaaatcctttaacctttaacgggatatgaccctgatcatgatacataaccacaactatgtcataccatccgccaattgcttttgaaaaaacagtatccggcggtgttggtttgccttccggaatatagattccctcgcccatggcctgatctatagctggctggatctcttctatttcctctgttccaaacattccgttttcaccacaatgtggatttaatccggcaacaccaattttaggtttttcaatacccagagccttacatccatcatttgcgattcgaatgcattcaagaacacgttctttttttaccctatcgcacgcctcacgcagagaaacatgggttgaaacatgtacgactcttaactcctcgtgtgccagcatcatggtatatttatctgttcctgtatattctgcatagatttccgtatggccagaataatgatggccagccatattaattgcttctttagacagtgcattagtaactgtagcgtcaacttctttagccattgctaattcaattactttttttacatactggaaagatgcttcgccaccaattttgcttgctccaattccaaatggctccggcttgtccttgtcaagagaatcaggaatagaatctgctggaaccagcccaagatctaacagatcaatcgttccatattcatataacgcatcttcaaccttttgaatcggatgtaatttcaaatctgttccccttaatttttttgatacctgaagtgcatattccatactggtcagatcgcctactaccaaaggtctgcatctatcatacaattggggatcactcatagcccgtactgttatttccggaccatttccaaaaggatcacccatcgttattcctattatcggcttattgaacatactattttctcctctcattttctttattcctccataacactataggaagaattatgtataatatttgtaaggttcaacaacaaatcatcttctccgaaaccaccagactttgaaatcaaattatacgtttgacagttgtaatcaaattgggaaagaaccactcctggaataagttcacaaattgggattatggtactttgattaatacaatccataaaagacattaacgtatctccacctgttactaaaattgtacttgttattcctaaatttataagttccttcaaaatatttcccataacattcgcaatataatgtcgtgcgtctaataaagaaattttatatttctccatatattgcgaagttctttcttcatcctttactccgcattcaataatcatgttttgatgaacctgaaattctgttttccatttctgaatttgcagcccaccttttttactttttatccatgatggctgaagcttttgttcaggcgaaagtgccacccggtaaaatccattttccgatgctttatccaactgacgaatggtaacattgtttatgcttccgcatattaccagtaatttatcaacaaaaaacggtaacatttcatcatggttctttatttctaaaagctgaaaaaggattcctgcaaaacctgcacagcctgccacaaagtgaagttgatccttctcttttaagatcttcccaagattctgcatgtcttcctgagtttggctatcatatacatagattcctttttttgcataatccaattggtcatttccctgtaaaacaggaatatcgctttgttctgcaataatctcatttatggaagatttttttactggttcaaatggatcctttccaaatacgctttcagctaccggcaccttattgatataatgaataccatttacagttgtacgccccatctgaggaaaggccggaatataatgaatgctatgcgatccagttgctttccagaatgcagtcaattcgcttccgatatttcccctcatgccagaatcgttctttttgtaaatatatgaaattttaagctgcaaagctaattccacaatgctatagacaatgttataagcgtcctttgaattcaaatgcctgctttctgtatctacaatcaatacttgaagatcctcaaggaatacttttcgaagtttttgcatatcccccttatacacaaacaccattgatttttgtgcccggaattgcactcctgtgtctaatgcaccggtaaagtcatctgcaattacaagtaatttaaccatttcattttcaccaccaaactgttttgatttgcaacgctttctttcaaaatattattgagcaattgcttcaaaatatgtttattaccgatttgcatataccgggttatcagtaattagttaaaactactaatattttcttatctatttgcatttatttaagcatttttcttcttttggttcaattctacaggatgttgttttgtgtattattttgaaacgcttcttaaaaagggtgtaatagaatggaattgtgaaatacgaccagttaaatagaaaaagagtaagattatctttttttaatggactagcagtcttaaattgattatactcaaactataaggtgtcagggttaaaagttccagactctgagtcttttaatattttatgaatacttgattttggaggtttttacaatgaatacagctaattttgaatctgtgatccgcaaatgtaccccagaagatctggataagatcatgaagctgcaggagcatatctgccagactatggaagatacccgtctttttgtttccaccagccgggaagaaaacagggattatcttatctatcccaataccatcctgggagtatttgacggagaaaagctgatcgcctatggttcccttgtttttccaaatgattcaccggagaatattggctgggatcttgactggtcaagagaaaaaatatttcactgtcttacactggacaccatcgtggtagatcctgattacaggggccacggtctgcaacggaccttgatccgcagctgcgttgcctatgcactggaattaatgccggatgccactgttctgactactgtatctccgtttaataaatacagccttcacaatgtacaggcagagggcttccagatcctgaagcgtaaggaaaaatatggcggttatgaccgctacattcttggatataccaaggctccggataaagaattccctgcctttgagccaggtccggatgcagtgatcctgcccatggagaatattttacagaatccggagcttcccacaggctgtgagtctgtagcgctgaccatggttctgaattactatggacagaagctttccaaaaccaccattgcagatgagtatctgatccgcgatccggagaattttgtaactgcctataaaggagatccttaccagatttccggtgatggtatttatgcaccaggacttacccaaacagctgccaggtatctgcaggcaaatcactgtcctcaaacagcaacagacctgaccggcactgaatttacaaagctttatcagtacctggacaagtctgcacctgtgatcgtatataattctgtttacctgaaaacaccgatagatgtagcttcctataccctctccggaaaaacctggcatttttaccataatgagcactgcgtggttctttgcggatatgatcctgcagggcacatggtcctgatcaacgattccctgtccggccttgtgtggcgcagtgaagaagcgtttgccaggatctacgaccagcttggcaaaatggctgtgctgatccgttagggaaggtcagctgctttacgcctgtaacgcttataggaccatttccttggtgttttctacttcataggaagcaaagcctttttcctcagactcgatctcaccggtctgattgtcatatgggtcaatgggcataaaatcttttttaacagcaaaatcctgctgaaaagcattatttgccaccatccggtaggtctccagatttccgaaatagaatctgcgccgctgttcatccccagaggcgtaagcggaacctccaaaggatgggtctgcataaagccatccataaggctctacgtagaacattgcccagtcatgtggccctacatatgccggatttgcataaagaccggactgccacttggcaggtatgccgcagatcctgcaaagcgtaataaataaaagtgcctgtacaccgcagtcgcccctaaggtttcttgcacaatactggggaatatccgtgatcagtgaatactctttcatgtaagaatattgtacctttgtggtaatgtaatcatagatccttctggcaatttccagaggatctttttcttcccctgcgatctcccgggcaagggaagtaagataagggctgaaccggatatgaggatattgttccttcagatattcctccattccttctggcacactgcttttctttacctcatcagaccacagatccacatattttgcagttactgtatacttatactccacaaagaatgtacggttttcctgaagctgatcctggaaacagatagatctgtacagggaatccggcttatcaatgcttacatttccctgtgtatgatccaggatctgaacatctgaaatctggaagctttccgccggaatcggaagatgcacctttaccttcattccaggcttaaactgttcatcctttaaacggatcgtagcacggatgcggaagctttcctttgcctccccctgttcacggatctgctgaaccttctgaagcagcagctttttatcctccgaaatcttttcataaatccctgcacgttcccggatatcatcatctttgtccataatattccgcataagattgtggatataatgcttttctccattgatatagatccattctgccaggtttttcgattccattttcctgatatcctcttcagaaaaatccggaagcttttccttaaaaaagcggatcacatctgcctttgtatacggaaattgctttggcagttcttccagaataaatttttcatagcgaagccttgtttttaattcttccccaattggctgctccagccagcgatctgctgcttcctttgctttttccagatctccgaaatccttatatttcaaaacatcctccggcagctccagtgccagagatttcaattcttctcctgaaaaccttctcatataaatacactcccacatcctgttattttctgtgccaggtcttccctgtaatcttcatcctcttcccacagactgttgatggttacataaggtgttttcacatagcctgtggaatggatgtactttccattgccaaggtaaagggccacatgtcccggaaaaaagatcagatctcctgttttcagatcctcctgtttcaccggagacaccggaaattcttcacgaatcgacgcatccctgtagatcagaagtccactgttcagataactcataaaagtaagtccggaacagtcgattccctgagaagatttcccgccccagcgatactgggtgcccatgtattccagtgcgctttcctttatcctctcacggaaggtttcttcttctactgcaagtctttgtctcattgcgtgaaaatagccttttccttctgtatttttctctgacagatagccatcatcctcttttctttcacgaagattcacggtatggatgaaaccttcccggcctgccccacttcgtaccttactccagcctggaacaacttctttttccagaagctctacgatacagcttttcaataaaagctccagcggaagtccctgcacctttggtgcatccagaagatctgcttctgagatccccagcctgaaaaaccgatctttatcctgccgtttttccaactcttcttctgtgatgggttttatttcttcttcttttacataaccggaatatccataatgggtttctatcttcagatactgttttccaggaagcttttctaataccttcacagcccatccggagaaaatctcatcttcgattccgcttaagttttctccattttcattttcagcctctgccctaagataagcatgctctgcagtcacaattgcaagatactctttcatgtttcagatcctttctatttcagatcttttctgttttagatattttctgttttagatatttttttagattatttctgtttcagatcctttcaaactttaccggaactttggtgatcccgatcccataatcttcacttaataagatctttggtccctgatataccgggcctccttcataaggatccactttacataatgacgggccatccaggtctgccatagttacacaggaacgtgcagcagccagatgtactcctgcgctgacggaaaccttgctttccagcatgcatccgatcatacatttaatgccgaatcggtcggctgcgtcacagatcttcactgcctcatggatgccgcctgttttcatcagcttgatgtttaccaggtctgccccatgctcttccatcacacgcacaccgtcctcataggaaaatacgctttcatctgcaaggatcggggtctgtacatgagcggttacatactgcatccctttaaaatcatgataggataccggctgctccaccaattcgatccccagacctgcgtcctccatagctgtaatggtagaaactgcttcttccctggtccagccctggttggcatccacgcggatcaccacgtctttccccactgccttgcggatctcacggatacgctccacatccttctcaccgccttttcctactttgaccttcaggatacggaagccttccccaactgcttttacgctgtcccttaccatttcatctgtatcatttacgctgatggtaatatctgtttccagttctgtttttaccgcagaagggtctttttccccaagaagcctgaaaagcggctttttctgaagctttgcataaagatcataaagtgcaatgtccacagctgcctttgcagtagtatttttggcaagacacttttccatttttgccataatagacggaaggtcgtccagatccatccctgtaatggaaggggcaatataataacggatggctgcctctatggactctttcgtgtctccggtgatcacggctgtaggcggtgcttccccgtatccttctgtcccatcctctgctgttacctttacgatcagatcattcacactgtttactgtacggagggctgtcttaaatggggtaacaagtggaatttcaatgtacccgattgcaatttctttcagtttcataatcttatttactccttaaaaaaggctgccgcctctggttttcccgaaatcatgccggattccctaagacgacagcccttattttctgtcagcagtataccagccgcctttggctttttacctgcatcattttattaaagtgctttgaggtaagtaaatacaaagttaccacagctgtatacaaggccttcataatttgtgtcatcaaacagataagaactcatagaatgaaggattacgcttacaggcagatctcttgccaggatctcatcacattccttgtagccttcccactgctcttcctctgtggcagcactggtagcctttaagaaagctgcgtcatactcatctccctgatagaaggagttagaatttgcagttgcatacatggagtcatacatattggaaagatccttgtaatccataaaccatccataataagccaggtcgtagtcaccagagtttcttgctgcagagaagttctcaaccttctctactgtaatggaatcaattcccagaacctctttccagtcattgacgattgcttctgcgatctctttacggctgtcattgtttacaatgtaggtaagagccggaaagcctttgccatcctcatatccagcctctgcaagaagctgttttgctgtctcacagttctcatcatatgcttctacgtcttcccaaggatcacagtaatctacaaaatctgtaccatcagcgttctcatatcctctgcaggcaagtgtcacaccaatctcatcattcagtccacggatattcatgatcctctctctgtcgatggtcagagacaaagctttacgaacatttacatccttcagaacatcatttcctttgtcgccaaggttgaacattacacagtagttgttatttccttctgcataaaccagtccgttgccttccatacgaggcttctcctcatccggacacatatcggaatatatataatcaccactctcaaaagaagcaagtgcagagctttcttctgtgatcagttcccagttgatagtgccaacctggatctggtctgcatcataataatcatcacgaagcttcataacaacttctgactcatgtgcccagctttccatttcataaggtccgttgtaaactgctttgtccggatctgttgcataagcatctccgtattcttccacataatcctgtcttgccggataggtaggtgggaatgcaagaacagaaggaagatatgagcacgcatgtttcagatgaagtaccagagtcttgtcatcggttgcttcatagctgtccacaatatcagaaatcatggtacagtaatcgccgccctgtgctgccagattgtcaaatccgaaaacaaaatcatttgcagttacagcctgtccgtcagaccaggtgatatcatctctcaatgtaaaggtccatgtgagattgtcatcgctctgctctacagaagctgcctgtccaagagcaatctctccattagcatccagcttgtaaagaccttcataaagatgtctcaatgctgaaattccattcaggaatccgctggtagctgtattcagctgcatagaatcttctccaccgccggtgacggaaatttcgatcttatccccatctgcccatacattcatggggacagtggttgctgcaagacctgcaatcgtaagcactgaaactaattttgtgatctttttcataattattcctccttttgataggtttttcatatcagcgtcaggctaaaggcctctccctgacatctttatatatactccgcaagcggaaacatatatcaattttttcaaaatgatctgatattaggactcctaggacagaagctctgatgttatattatttcttcatcttcggatccagtgcatcccttaatccatcaccgaacaggttaaaggaaaggatgatcaaactgatcagaaccgcagggaaaataacacggtatggatatgtggtgataccatttaatgcttcagaagtaagggaaccaaggctggccatcggtgcggaaacaccaattcccaagtagcttaagaatgcctcagtaaaaatcgccgatggaatctgaagcataacagtagcgatcagctggccaatacagttgggaagaagatgctctttgatcatggttgcttttccgcatccaagagcttccgctgctgtaacaaagtccagtgtcttcagctgaaggatctggccgcggacgatcctggccataccaacccaatacaagcatccgtatacaatgaatatggcgatcagaccggaaccgatcttctgcaatccgtgaaacataggtaccgtatcaatcaatgactgtaacggctcactgatcaccattttgataacaacgatcagcaggatctcaggtacagagtaaatgatatctacgatacgcatcattacgatatccaccttaccgccaaccagtccggaaattgctccgtaaatacttcccacgatcataacgatcacagctgatacaagacccaccaccatggaaatcctagtaccgatcatacaacgtaccagaatgtcacggccaagacggtccgtaccaaagggatgcttcagacagggccaaagtgcttcatcgcctcttacctgctggtcataggcgtaaggagaaagaatggggcctataaatgcaaaaataaacatgatcacgatcacaacgagggctgcaatggcgatcttgttggacttcaggcggatccagctggccttccagtaaccaatctcctccgtatcaagagattcctctttaaaatagttttcatccaggggagcaaagtcttccggtgaaattttgttttgtatgcttaaaatgttcttcatggcgtcttcctttaattaatccaactttattcttgggtctacgatcttgtacaggatatcacagatcaggttcataaatacgatcagtgctgagtagaagatggtcacacccatgatcatggtgtaatccctgcggctgatggagctgacaaaatatcttccaagcccgggaacactgaatacgctctctgcaacaaaaccaccggtaagaatggatgcagtaagaggtcccaggtatgtgataacaggaatcagggaattcttcaatgcgtggacaaatacaaccacaaattcagacattcccttcgccctctctgtgcgaaggtaatcctggttcataacctccaggatactggcccttgtcagacgggtcagatacgaagtaggataaatggcaagtgtgaccataggcatgatccatccgcctggcttattgtagctcaccggaagcaccttaaagcttactgccagaaaaatcatcagtgcggaagcaattacataccccggcatggaaataccaatggacgagaatacacggatcaccgcatccggccatttatctttacaaaggcctgcgatacatccaagaatgatcccgcatacaattgcaaggatcaacgcccttacaccaagtcccatggatactgcaaaggactggaaaataatatcctttactgcacggcctttctgaagaacgtagctggtacccatatctcccttaagaagattggtcaggtattttccatactgcacatacaccggctgatccagtccgtattttgcaatcaggatcgccctgttctcttcagaagccttttcagacataaacgggtctccaggcatcagattcattaaaaaataagtaatggtaataatcgcgaagatactgactaatgccagcagcactcgcttaacaatatatcttgaagtctgcattttgattctccttgttatgcattatggcatgctgcaaaatgtccgggtgccacttcccgaaggggaggcatactctcacggcaggcctgatacgctttggggcatctggtcctgaacggacagcctgacggaggattcaaggggcttggcacctctccttccagtcgtatccttttccttgttgcggataaatccggatctgcgataggaattgcagacaacagcatctctgtatacgggtggagcggattacggtaaagctctgcactgtcagccagctctacaagatgaccaagatacataactccgatcctggtgctgatatgtttcacaacagccaggtcatgtgcaataaaaagatatgtaagatttttattttcctgaagttcttccagcatattgatgatctgcgcctggatagacacatccaaagcagataccggctcgtcacagataataaatcccgggtttactgcaagtgctctcgcaatcccgatacgctgtctctggccaccggaaaactcatgtggaaaacggttataaaactctgcattcagtcctaccagcttcatcagctccagcacacgctcacggcgttcattcttgctgctgcaaagcttctgcagatccattgcctcaccaataatatcggataccgtcttcctcggatccaaagatgcatacggatcctgaaatacgatctgcatctttttgcggtattccttcatgtctttaccgataatggattcattctcatagatgatatctccggaggtaggctcttccagacggagcactgtccttccaagagtggtcttaccacatccgctttcccctacgatcccaagggtctcccccttgcgtacaaaaaagcttacatcatctacagcctttaaatctgtcttttttacaaatccggtacgcaccggataatatttcttaagattttttacctgaaggaggatctctcctttttgaatttcattgtttcccatactcttgtccatcctatcctttatgcatcctgcaatgcttttttaatggtctgccagcaggataccacatgtgtgtcatccaactcatactggggcggctcttccttgacacagatctgcatagcgcagctgcatctgggtgcaaacgcacagcctggcttcacacagctcatatccggcggatttcccttgataggcttcagcttttcgtttacatcactgtccagcttaggcacagaggccagaagcccctcagtatacggatggcatctctgataaaagatctgacggctggtaccttcctccacgatcttccctgcgtacataacaatgatcttgtcacagatctcagataccactccaaggtcatgggtgataaagatgatcgccatacccagtttatccttcagttcctttaaaagctcaacgatctgggcctgaatggtaacatccaaagctgtggtaggctcatctgcgatcagaagctcaggatcacaggaaagtgccatagcgatcatcacacgctgccgcataccgccggaaaactcatatggatactgcttcagtcgtcgctccggctgattgatccctaccagctccaacagatggatcatcctgagtctgcggccgttaccgtccagatctgtatgctttttcaaagattcattcaattgatattcaacagtaaacagcggatccagggaagtcataggatcctggaaaatcatggcaatcttattaccccgcaattcctgcagttccttcttggacattttcagaatgtcctttccatgaaaaaggatctccccttgcttcacttttcctgtatccggggtcagtcttaaaataccgtggctggaaacagacttgccgcttccagactcgccaacgattcctaacacctcacccttatgtaatgtataactgataccacgtactgcctggatctctcctgtcttattgtaaaaggaaatcgacagatccttcatttccaacagtacatcctgtttttcttccatattacctctcccatccacatatacaaaacagacgcagactgacccactggatcagacccctgcgtctgtaagcttctttcgttcttcttcatttactttcttgctattgtaatgccaaacacattcctgtgtcaaggttaaattctcatataatgaagttttaacgtattaaattaccattttctataccgttttttcaaatgtacactgcttgtcactctgctcaccccatgctatgataaacaaaactaatacattgtttcgtaaataactatagtattgggaaaggaggaaaatcatgtacagcagcaaaaagacaaaatttttgaatatcctgtgtattatacttgccttatcccccggtctgatacgccttaccaggcatcattttcccaatgtatcaagcaactccctgatctgtgttctttacattactgctgtgctgatctggctgacccagctgcggctccgcctgctgcgcaaagaagaacgcagctatctggtttttgcagctttgctgatcgttttcctgatggttatccgtacaacaaaatatatatttatcccggaaaatactcctgcagctcgatatatctggtatctttactattttccccagacctatgtggtactttttatgttttttgctgtgttatataccggaaagccttacggctgttccatttctcccaaatggaagctgctgcacatccctgcacttctcatcgttctgggtatccttaccaatgatctgcaccagctggcattccgtttttccggcagcatttcccattgggtggaagatgagccttattcatacggacctttttatattgcttccctgatctggctggcagttatattcggagcaattctgattctttcttttgtgcattgtatttctctggattgccgtaggaatatatggatgccttgtatccctctggctgctgccctgatttacctgatcctgtttctcaaggatccttattctcccctgcagcggcttttcaaaacaacggatatgatcaccttcctgtttccagcctttatggaggctttaatacaggcaggactttttccatccaatgatcagtattcccttatgtggaaagtttctgatctaggcgccgggatcatggatatgcagggtaaaatctgctatcagtcagagaaaagccttccagttacagaaacacaggttcttgccgccttgtcctcccctgttacccttgcagacagcaatatggtcctgaacagccatcagatccatggcggctatggttactggctgacagatctttcccagatccagcagatcaacaaagctctggctgacctgggagatgttatggcggaacaaaattccattctggaaggcgagaaccggctggcggagaagaaagcctccatccaacagcaaaatcagctgtacgaccggatttcccaggatgtttcccaccagctttttatgctgcatacgattctggcagatcttccggaaaatgaatatgcttttgaaaataaaatgaaatatgcctccgttttaatggtttacataaagcgaagagcaaatcttctgctccttatcaatcaacagaactggatactcggaaaagaactttctctttcccttgctgaatctctggaatatgtccggctatcccacataacagcctatggcacttatcaggatgaattttctatacctggtgtgtatgctcttgccatataccagcttttccagcagattctggaagcctgccttcccaatacacaggccctgatactccaactgaccattgcggaaacgattcatttttatatggaaataagttgcccggaaaacatattcccactgcttcctgccgcaaagcaaatccaggctttaggcggaactgtgaaaacagaatctgatccggataacctgttccttactgtgacctttaatgctagggattttaagggaggtgataccacatgagccattatgcacagctttcatcttcttttcatgcctttatgggactttgcagcatccttttaatgacccttgctgtctgttttatgataaccgtcctgctccacggattttcccgaaaaagtcagtggatcggaggtgttttatgctgtctttgcatcctgttcatgcaaggcctttgcgatctgggccgtgacggttcccagaagctttctccaacctttttggcacagcttaccggttctctgccctggatcgcggttcccggactattgagcattttagcattatttgagggattatttggcttctctttgtacagacagcagaaaaagcgccttaacccaggtgccatcaaagaaagttttgatgcccttccggacggaatctgttttgcacggcaaagcggtgttcctctccttatcaatacacgtatggaacagctttgcagtcagcttctggggacaaggcttcaaaataccaattttttctggcattctctgcaggttcaggagtacaataagaaaatccacaacatttccacaggaacaacggttactcttcagtttcctgatggtacggtctgggatttccgccgcagggaattgtccctgaaaaaagacagtatatggcagttctctgcctgtaatgtgacacagcaatatcttttaaatcagaagctgaaacaacaaaatgaccagttgaatcaggtaaatgagcacctgcggcttttcagttatgaagtagaaaaagttacccgggaaaaagaaaatctggccgccagagtaaagctgcatgatgaaatcggaagagcgcttctgtctttccgcatttatctggagcagcctggcgacaaacgcagcagacaacagcttgtgcctttgtgggaatatattgtctctgccatggagcagggcatctcccctgaaagcactgacagcctggacaaggttctcactgctgcccaaactctcgggatccacgtggaaggatgttctaagttacctctttctcacagcaaaggttctgaactgcttcttgcggccttgaaagagtgtataaacaatactgccaggcatgcccatggaacccatgtatatcttcaaattagtgaaacacctgacaggatttgtgccagctttaccaacgacggaacccctccttccggaaaaatcgtggaaaagggcggccttaaaaatctgcgggcagctattgcaaaagcacatggcagtatggaaatatccagcgccccggcctttgtattatatatagaaattccaaaaggagaatcttaattgcgaaaaataaatgtgatcattgtagatgaccaatatatggcaagacagctttttgagctgtacataaaaagcagtggccggtatcagctggccggtaccgccagttccggtcagcaggctctgtcccttgtacaggctgtttctgcagacctaatcctgatggatatcctgatgcctgatggggaaaacggtctggaaacagcagccaggatcaaagctatccgtccctggatccggatcattgctgttacctctatggcagaagcctcctggctgaaacgtgccagggaaatcggaatcgaaagcttctggtacaaagagtcttctaaagaaacgattttagaggtaatggactgtaccatgaacggcgattctgtatatccggatcagccgcccaaggtaaagctggggctctccagcaatacagaatttactcagagggaactggaagtgctccgcctgatgacccgaggtatgtccaattcttccattgccggtgagctgggcatttccgagaacactgtcaaatcccatatccagcacatgcttgataaaaccggctataaaaacaggactgaactggccattgaagcccggatccgcggaatcgtggtgagtattccctgatttatcaccgttctccattcactgtaatcccagttttgtttttccttatcatcctttcaggtgatgttatttttctctgaagttatataattatatagaggagattctgtcctgtcatatgatacacagaacagaaaataacatttttcaggaggtatgaatatgaaaaagacaaaccaacaaaccacaaagcttctttcgctggtaatggccatactggcggtgctttgcatcatctccgttccggttaaggcccaggattataatcattcatttatcattaccggaccagacacttaccggattgcctttggggaagattacaggggcaaagaatcagtcaccaccattcgtaaccagaccactattcccatgcgtctggatatccagcgatccgttgcccgcacaaaagtagtcacccctccaaaattaaaacaatttgaatggatcgaaaatgcagttactaatacttcctccggctttgtgatcctggaaccaggggaaaccatatctatgacttttatcttccgttcggactattcatccggctcttcctgtatgcttacagccacccgttccaatatttctgacatcggcggcaaagcttttgtccaggcgcagccaatccctgtggaaggctccatttcaggtgcattaatggattatggtcttaatcccgacgaaaatgccagatatttttctctttccctggcaaccaagcgttacgtaaatctggaactgatcagtaataacaaaaaccaggtgaccgcatagttttactccaaggataattccacctcccatatggcaaaactggaatccgatgcatccgctgaccatttctccggtatactggatgcgggagattatgtgctgaagcttgcctacacacgaagacaaagcaccccggccagaacagaagtcttcactttgaacgttagcggaagagaatatatccaggctacaggtgtgactctcacctgctcctcttccaacccttccttcgattccagaattaagaaaaaggcaaagacctttaccattactgccaccaccgtgcccgccaacagcgatgacaagctgtcctgtattcttgcagacggcaacattcctggcagtgattacctgatcagcggcaatgtagaaggacagaatcaggcaacattcaccatcacttacggtattgcatcctgggctcattatacttatggttatacacggctttcagtaaaaacagaggctggtgttctttccaacaatgtggacatcatcggaaaagcagctgcaccggtggtcagtgatgtaaccagctattataataagattctctttaacaaatgtcagattggagacagcatgtatccttctgcttcccagccggtaaaagtttatatgaaatctggaaagaaatgggtattaaaaaccacagtaaaacatggcaggcctttccagatcaagaaattaaagccaaacaccaagtaccaattcaagtttgtttctgcctgcaagggacctgacggctcgctgatcaatggttcttcaactgtgaaaacctatcggacagggcgaaaagtcaagccggctatccgttccatttccgtcagcaatgtaaaggttacctataactccagatttgagaagtacatggggaaatggacatggcgtaaatattacaccacccgcttcactgtgaatgtgcagctgaagaaacagcttcccggtacacaaggcttatatatagacggcgtcaaatgcaaaggaaaagggactaactttaaagtaaacctttcttattcaggcaatcacagaggacgcaaaacaccgattaatgttataccatattccaataccagccgggacaagggactgggcataaatgcaaaaacaaaagttatcattcgttaaaccatgatatacagtataaggcggctgcacctggcagccgcctctcttgatcacatcgattaatctatgcacacactcaaaaagcgaatgcagttttatcctgcatccgctcttttttcatgttgattcccgaattatcaattccgtatcaagtataagagacttcatctcttcctgtggttcttccagcagttccagaagcatttcacaggctgtatagcccatctggaatttgggctgattcacagttgtaatagaaggtgttgtcatagaagataactcgatattatcaaatccgactaccagaatgtcccgcggtacatgcagatgaaaacgctttgccgcacggatcactgctgccgcaaaaatatctgatattgtaaaaaaagcatttggccggctgtcagaattcaacagtctgcatatggctgcatatgccatctcatagcttacttccggcagctgcacgatccactgcttcggaatcatcacctctgctttctgaagcgcattcataaatccttcctgacgcctcctggcatatttaaaatttcccggtccattgatcagggcaatcttacttccgccatttgacagaagatattccgttgcaatttctgctgctttagtgtcatcaatactaacatacggataatctgcgtgttcattgtattcacagcattgtaccagaggtgcgatcgtccgtatctgattcagggcctcttctgatatacggtttagaagaattacacctgcagcatccactcttcgcaaaagattacagaaatccagcatatttcctttattcagatgtgattcatgaatcaataaatgacagccatgtgcctttgcagatactcgtgctccccgaatgatttcctgataaaatgcattttcgattcccggaatattcagaacgaccaatggttgtgtttcctttgaaacagtgaccgtattttccatctgacatcccagtgaacgcatggcctcttctacccggcggattgtcggctctttcaccagttccctgtgattcagtacccttgacactgttgccggtgaaacctgtgctttctcagcaattaatgaaacggttatcttcttcatgctttctctctttttcaggttttatgtttttattttatcctgtgttttattcagccttttttaatttctgtttgatctgcggtcctatgatctgtaccataataaccagcagtaagataattcccttgatcgcattattaataagagagtccatcttaagggacacgatgatcttatcaatgatcgtataggacattgcaccgaacaggattccaaggcattttcctttaccaccggacatgctgatcccaccaagtactgctgctgcgatcgcatacatttcatagctgtttcctgttgttgccgggtcggcagaagcattcatcgcaatccagagaaaagcaccaattccaacaagtgcacctgcgatcacaaatacggaaattttcacagcagcggtattgattcccgccatctgcgcacctttcatattacttcctactgcatatacttttttaccgtattttgtacttgttgtaatatatacaaaaacaagggtcatgataataagtatcagtccaacgattggaatcgtagatacttttccgttaccgaaattgtaaagagtctgataagaagactggctgtttgccattttgtaaacggaacttcctccaccgatcaaagctttgtccacatgctggcagaaatactgtgcaaaagaacgataaatcaacattgttgcaagcgtaacgataaatgcgggcatctgaatccatcctaccatcacgccattgatcaaaccgcagaaggcaccaaacagaaccgcaaataaaaatgtgaggataatgctgtttgttatgttaaagattataacagaaaatccgccatcaagagccagcatagaacctacggaaagatcgatctcaccagtgatacagatcagtcccatgcccagtccaatgataccgattactgcggaatgacgaaatacattcatcataccgctccaggtcagtccgtttgttgtcagtgcatatacgataaaaattgccacaaaaacaatgatataactattttctcccagaaatcctacaatacgtccaggaactgttgtattctttttactcattttattttccctcctctgtctgtgccgcatttgttgaatacatcataacggtcatctcatcaatttcctgatgttccaggatcttaatgatctcgccgttataaaacactgcacagtaatcggcaactttctggatctctggtatttccagtgtattgatcagaattgtttttccctgtttagcaagttccaggatcagtttgtagatttctgcttttgctcctacgtcaattccctgtgtagggttgtccagaagaagaatttctgcatctgtattcagccagcgcgcaagaaatactttctgctgatttccaccactcagggaggtgatcggatcttcccaggaatttgccttaatgttcaacatctccttatatttcttgtatctttcgacttctttcttttttgagatggctggtttccatgcggaaagggtatgctctgacagatacatattttccaggatactcatatccggaatcacagaattttccttcctgtttgatgccagcatcgcaattccatcagtcatggccgtatgaatagaatgatccctcataactttgcccatcgcacgcatctggccgctgtatgctcttgttacaccgaacatacactgcatcagttcactgcttccggcaccctgaagaccagtcagtccaacgatgctgccttttttcactgccagattgatattgcgaaaaccttctccactgaaattcttcagctccaggatcatgtctccaaggggtcttttttcataaacatcctgatctgagtatttctcaccaaccatcatacgtgtcacagcttctggtgtggtatcttttatatttccggtgcctacaaattctccgtttcggaatacggtatatcggtctgacaggcggaaaatctccggcattttatgtgaaataaagataaaggaagttccctttttcttcaaattattgacaatgtcaaacagatgtgccacctcatcattatttaatgatgttgtaggctcatccaaaatcagaagttttgctttaaaaaacagagcttttgatatttcaagcagctgtttctggcttgtttttaatttagaaacctgctgtgtaggatcaatatccactcccagttcctgaaacagtctctctgcctcctgaatcatttttttcttatccaggcggcccagtttatttgtgtattctttctgaaggaatatattttcataaacttttaaatcgttaaacaaatttaattcctgatgtacaaaagcaattcccatattctcagactgcttgatcgtaatattttttaatttatttccatcaaattcgatttcacctttatcgcgaggaaatacacccgtcaaaacgttcataagcgttgactttcccgcaccattttcgccaagaagtgcatgcacttcccccttttctactgtaagctgtacatttttcagtaccggaaccccactgaaggacttacagatgttactcatctgcagcaaactcataattctcgcctcctcgcccgatctgtcgggctttctgatacactgctctgatacacattcacttaattatctgacagaagggaactttgcagttcccttcgtcatttctgtcttatttaaaaagattatatcatgaaaatatttgatttagaaagaaggataatcttttacgttgtccttatttacgatttcacaggcaattacgtgatcctgctctacatcttttccatccagataatcaaccatatcctggattgctgtctggatcattgccgggctgtaagttacagatacaataccgccaaactgatctgcgatatctgtgaaggattctccacgaagtactgcataaagttcatccagtccgccgcagcctgtcagatatggtgtatttccaaggaatttttcttttgttgcatcgtcaattccaccaccctgaagagcttcaaggatacccattgcaagttcatcatcttctgcatagaaccatttgatgtctgcatttgatgcatcacccagcagagattcaaaagatgtttttgtatcagaacggctccagttcatagcgcctgaatatgtgatggatttaagatcatcttctgaccattttgcatcgtctgcgattgtttttccatcatattccagttctcctgtaaggtattttgtaaatccactgtcacggagagttgttacagaagaagtatctccttcgtatacataaactgcatcaccaggtttaagtccctgctctgtatagtaagctgcacatgctgcaccgataccttcgttgtcaccttttacattggatactgcactgtcagctacgccatcgatgatacggtcaaatgctacatatgggatctcagcgtcaaccagctgctggattgcagactgaacagtgtcatcgattggctgaataacaacggcgatattgtcttcaccagctgcgatgatatcttcaatgttgacgatctgttctgccgcatctgcagatgtgatcagttctgcactgtaagttccggcatcatttacttcttcgattttttcttttgcgaatgttgctacggaaccagtccagccatggtcttccggagctgtcagtacataaacgtgtgtggcatctccttctccgtccgcaaatacaggagtaaccatactgcccattgtcatagctgcgataagcgtgcaaactactgttttcttcataattcatttcctccttttggaatatgtttgtttttaataagcggttttcccccgcattatttcagcttttaacattttaataaatcagatcgtcttttcagatcacaaactgtctcatatatctcagagaaagtttcaggctgtccagaactcgttcttcagaaccttcaaaagatttatcttcgatttcaatgcaggtatatccttcaaatccaatgtctgtcaatgcggatacatatttaccccaatccacatctcccagtcccggaagcttcggcttcatatattgaagcggatatgccattgttccacactctttcagtttctctttaaaaagttttatgtctttgtaatgtacatggaaaattttatccttaaactcataaagcggctgaatgtaatcaatcatctgccatacaaaatgagatggatcataattgattccgatataatcactgtcaagaatatcaaaaacttttctccagattaccggtgtggtcatcaggttctgtccacctggccactgatctccgtcaaagagcatgggacagttttcaatcgcaatacgtactttcttttcttctgcgtaacgcacgattggaatccagatttcttttaccagttccagattttcttctactgtctttgtctggtctcttccaataaaggttgtaacaaggttaattccaagttttttgcttgcatcaatcactttatataagtgttctatgttggcagctcttttttcaagattaccatccatggtattcggataaaatgccagagaagaaatctctacatttttctctttgcaataagaaaggatttcttctgcttctttatttcccagatttgccacatcaatgtggctgactcctgcatatctgcgctctgctttggcttttggccagcaggcaacttccacacattcatagccaatctctgaaactgtatcgatcatttttttgaaatcataatcttccagaattgcactgactaaccctatcttcactctaattcctcctcatctacgcgaacgcatcttccaagttcgcttgatttcagacttccgaaaattgctttcattgcactgagtacactttttcccggaacagcaggttctgtgtcattttccacagattctacaaatgaatcaatgattcctgattttgtctgattatcatttgtctggatctggtcgatatcatagaacacttttccgccgtctttacggatcagttcgatacagtatttgggatcatgataaatcttaagcattccttctgttccatagatgatcgtggaattgtcttcctctccataatacgtccagctggctgtcatcgttccgatgattccgctcttcattttgtaaatacagatggcattatcatctacaccgatcagatttccattactgtctttcttatccagtgtcatcacttttgcagttgtttcttctactgtatcattaagcagatactggatcagatctgtcttatggactccaaggtcggccattgctcccattgcagctctcttcttatcaaagaaccagttctgtgggccggcatctatactccatgtttctgggccgccatgtccgaaggttgttttgaaagtaagaacgtttccgatatctccacgctggatgagttttcgtgcttctgcatgagcctttgcaaatctctgattctggccgatcataagttttttgcccatctgctctgctgtatccaccatcatttgacagtcttttaattttgttgccatcggtttttcacaaagtacatgttttcctgcttttaatgctgcaatcgtaatttcggcatgaacatgatttgctgcacatacactgactgcatcaatttccggatctgccagcatatcctcaatgctttcataagacctgcagccgtatttttcagcaagatcctttgcccgctgctgattcagatcataaaggccggtcagttttgcattcggattatccagatattccggaatatgacgaacctgtgcaatctttccacagcctataattccgacttttaccatctcattacctcctttatgatttcatatgtttttcattttttcagtgtttatttcatttttcatctaaaacatatcatttttcagaaatacggtcaatatttttgtgctatacgtatgttttttctatgttttgcacattttcattatatatttttgacatttatcactatattttcttatccatttctgaaatcttttcatttttttcatttcagacaacgtaaaaaaaggggatgtgggttaatacaaaattcccacatcctcttctttattcttgttcccaatataactggatctgttcccgtttcatcccttccccgatcacaatgatcactgcctggccagctgaaaccggctgcactgtgatctctccatgagtggcatttacttccagccacccgtccccttcttttacaaagcctttgatcctggaaacctgaccacagccagaatcatttaatattttctctgctgccccggcaagtctttctcccggaatctccatattcataaaataaagagtgtcaaatccctgtttttcatcaaaatactgcttttcataggcttctgtccggtaaccgcaaccaagaagcatatcaaaatccctgtccgtcaaagtatcccagtctttgcacagcacttcatcctggaatctgcggctacattttacctgttccagcgcccggttcaggtgattgatcgccgcatctgcctgttcttctgaatatttctggcatttacttaagaccacacatcctgcctcagctgcttccgatgccagcagatattctccctggccatccagcttttccggaagcccggcatcaacaatcgtgatcacgttgccgatctcataccatttatccaacggttcctcatacaatgcgtcaaaaaattcatccacgtcaaaaatcccggagggctcgatcagtacccggtcataaccgcacatccccattgcaatcagctttgttttgaatcgtcttctgtgagtttcccgatcacaaccacctgcgatcatttccaattcgcagtgctccccttccagatcgtgcagaagcatcatatccacattcactgctccgtggtcattctccagtattccaatattcatgcctttttcaatcagatactccgcatattttttcaaaaatgtggttttcccggagccaagaaaacccgtgatcagatctacctttatcatcctgtcattctcctgtgcagcacttttctgatacaaactattcacaagtctgtctttctgcatttatcccatttatcgtatttctgctcaatgtctttgtctcatttctgcttgatgaatctgtgtttattacttttcaaatctgtatacttcccccacacgtattgcttttgcatccgtgccatgaccgatcatcgacgttcttgctaccggcagtacctccgaaataaaaggtttcaaaagaggatacatctgctgtccctggctttccatacgtgtaaacgtaccaagaagaatccctttaactttttcaaaagcccctagctgctgcagctggcttaagtaggtaagcatctgcccttcctgtccgcccagtgcctccagaagcaggatcttgccttccagatccgggaaataagatgttcctgccagtttcagaaagcatcggatattgccgcctacaactatgccttccatagcctctccctgaaagaattcataaggaaactgaaacagtgtatcctcttgtccgcataaagctacctgcagttccttctgctggcgttccccctgatcataaaccaaattcctcacctgataaagaactgaggctctgcccgtctttgtatagattgcattcattactgtggtcagatcactgtatccccagaaacacttttcgctttcctgaatctgtgcataatccagatacggaaggattccattggccaaatctccgcctgaaacatcaaaaatctgacgaatttctttatccctgtaaaattccataagtgcctttgccctttgcctggcagtcccgctccacacatgctcctttgcataaagatatggggaatataccggttccaagcccatacctttcaatacctgttccaatgcttgaagatctttctggctgctcttttgaaaaccattcgagcaacacacaattcctgctttttccatgatcaaaacccaaattcctgatagtcttccggaagaaatctgtgataaataaaatggcagccctcatccttaaagcagtaataatatgggtcatcctctttatctagaaaacggatcagataatcaaattcatcactatccatctttgtgaactctaccttcgcccagtatttatcaaaaagctcccgaatccgttcaatagtacagtcatgatccgggatcagctggatcagtgccttaataaattcatccggctgggtgtgctcatgtacatacacgcttccttcctccggtatatggaaacagaatctgtcatttttatgagacaccgccacctcacctaacttcccctttatggactccggcatttctttcaaccgacctgccatctcctcttcgctgtcctgtgtactgaaaaaatgattcaatgaagacagcgggtaatacatctgtattttttctttctggtagcccagctttgcctgctcttccttgatcacatcgattaggctgcgttccagcttctgaaatccctgatccatcttgattctcctctcgtataaagccacttatgctgcattggcagtatgattccaagccacaaaaataaccgccctgtcctgagaaaacttggcggtcatttttgatcacttttaagcttagggctaaccgtcaatcggtagcaccctttctataatcagaatatcatctaaccgcaactatgtcaaacatctattccattgtcaagttaccacattttcaatttcgtcgtcaaccattttaatttagtcatttgcttttcatttgactaaattgaaattacaaatgacataattgaattttcttcactttatttcaccggacggaaacctcgtccatctttccattcaagaatgcctcggcattcttgctgcgaggtgcgcgtcatgcaattgcatgacatacttctcctgcgcacctctgcaatcctgccggaggctatatcagctgggggattgactcccagctgatatagaaaaacattgaaatccccctgcccttgcatatatactagaaatacaggaggtattaaatcatgaacatacttacaacccgctggacgaaccaggccgcacttggcaaaacactgcaggaatacccaaggcctatgatggtacgaaacgaatgggtctgcctgaacggcatctgggattatatcataacagacacacgaatcacacctgctgactttgaagacccggattcctttccatttcagggccagatccgagttcccttttcaccggaggcacctctttccggcgtgatgcgccagctaaagcctgatgaaaccctgtggtattccctaacagttcttcttccctgggataccataaatgaaaccacagactgtctgcttttgcattttggcgcagtggatcagatttgtacggtctacgtaaacggtcatcatgccggatatcataaaggcggatatctgcccttcaccctggatatcacaaaggccgctgcacgttcccaaaggctccatcttcttgtatcagtgcgagatttcagtgacacatcctatcacagccgtggaaaacaaaaactgactccaggcggcatgttctacactgcccaaagcgggatctggcagactgtatggctggaaaaagttgctgcagaccacattaaaagcctgaaactgactcccaatctggatcatcaaagcctttcccttaaagtacaggtcagcagttctgactgcaggcaggaagccctgtgccagatttatgctccctgtcttcttacagagcagggggtcactgaaaaagcatgtcaggaacttctctttgaaggctctattgttcctggcaaaacagcctgcatccctgtaaaggatccgatcccctggacttctgattctccccttctttatccggtacggatcagctttggtcaggatcagatctatacttattttgccatgcgcaagctggatattcagctagataaaaaaggcattccccgtttctgtctgaatgatcatcccgttttccagactggagtgctggaccagggatactggccggacgggctttacacagctccctctgaccaggccttgatctacgatatccagactatgaaggagctgggctttaacatgctccgcaagcacggaaaaatcgaagccgatcgctggtatttccattgtgaccgtatgggcatgctggtatggcaggatatggtaaatggcggcagcacttatcaatcctggtttgttacatacctggcaactcttatgaattatcttcgcattcctgtaaaagatcactgccgctttcttttttccagaaaaagctatgaaggcagacaggagtttatccaggaaaccagacagaccatccaggcactttacaaccatccttccattgtatgctgggttccctttaatgaaggctggggacaattttccacgaagaaaatcagtgatatgatccggaagctggattcttccagactggtagatcctgccagcggctggtttgaccagaactgtggagatataaaaagcatccattattatttctttggcctgcctcttcccagaaaagaaagccgggtaatggctctgtctgagttcggcggctattccttcaggatttccggacacagtgcctataataaaatctatggctataaaaaattcaacagtcaaaaggcccttaccagtgggataaaagcacttttccttaacactcttcttcctgctgttcccaaaggcatttctgcatctgtctacacccaattatcagatgtggaagaagaagtaaatggtatccttacctatgaccgtgaaatgataaaacctgttccccataccataaagagcctgaaccaccggttaaaaagccaaatccaggatcaggcattctgaccagcttcaggataacttttgggaaatctttttaaataatagataacaaacaatacagcagtaatactccaggaaataggatagctgagcataatggtgtcgattccaggatatctgggtaccatagtaaacaaccaaaggagtctgagcgtacatacacctccacaggtgagtaccatagggatcagcacctttccagcccccctaagtgcgccggacaggatgctgatcactacaaatatggaataggcaggaagcatacggaaaatcatatgtactccgatctgaagcaccttctgatcagaagtaaacagtccgaaaagttcttttccaaaaagaatgatcgtaccgctgatggctactgaggagaacaaggccatgatcatgcagatacgcacactctttttcattcttgtaaattttccggccccgtaattttgtcccacaaatgttgttatggatatgccgaaagcattcagcaccatccagaaaaaggcgtcgatcttgcttaaggttccccaggcagccacagtatctgtacccagcttattaacatatacctggatgatcaaatttgacacattatacatggtagattcaagagctgccggtattccgatcctgagaattgctttcagataacggctgtgaaagcgaattctggatggaatcaaccggtagctttctttcgttttcagcagcattactatcacaataaccgcactgatcgcctgagagatcactgttgcagcagccacaccaagaacgcccagaccaaatccgatcacaagaagaagatccaggataatatttacagtacatgtaatgatcagtacatacaaaggccgtttggaatctcctactgcacggagaatccctgctcccatattatatagaaggttaaaaagcatgcctataaaataaatatgcagatataatacagaatcttccagcacatctgccggtgtatccatgatctgcagcatccatctggagccggcatagccaatcactcccagcacaatgcttccaatgatagaaaatgcgaatgctgtgtgaagagttttctccaggctgtcatcatccttagccccgtaaaactgtgcaagaatcacagacgcaccagaagacaggcctacaaacagaccgactgccaggttcacgatcacagtggtggaaccgcctactgcagccagtgcctgttttcctacaaagcggcccaccacaatggtatctgccgtattatagatctgctgaaaaaatgtaccaaaaacaattggaaagaaaaataaaagcagctgtttccagatcactccttctgtgatctgattcactgcgttttttgcctcttttttcatatttacccccttttaccccaaaacaaggggctgcaacattaacaccagccacgaatacttcctatccatgtccgctgttaatgccacagccccttgaatcatttctgcagtgttgaattagtcttcaaccttaatgatctcttttttgttatagcttccacaagccttgcaaactctgtgtggcatcatcagagcaccacatttgctgcattttacaagattcggagcgctcattttccagtttgctcttctcttatcacgtcttgctttggaagatttattctttgggcagatggacattggttacacctccttaaatttactgaatatatcactgatagctgccatgcggggatccttaggctcatccacacatccgcagggaccgtcattaaggtttttcccacattggctgcagatacctttgcaatcctctctgcataaaacctttaagggccagcccatcagtacctcaagatagaccaattggtccacatccaggtccatacctgtgagatagctgctctcatccagatcatttatccgttcttcttccgtaagcttcatatccagctttctctggatctgaaaaggaatatctactgaaacttcctccagacatctgtcacatggaatcgacactgtgatctgtccatgtcctgtcagttccagaatccggtctccggtattagtaatacaaagctctaccggtttcttcgccagaacaggatatgtacctgcctgaaaagaaatccgatccatctcaaaaggaacggactgctgtatgcacttaccttcactggatgaaatatccgataaatgaatccgcataattatctcctatccacactcaatcaattataccgttggctttgtattttgtcaacgtataaattgcggctttttatgaaaaaaatgttgcattttatgaaatttgctgtaacagtcataaaaatggggatctgcccaaggcacatccccatttattcttaagaatgctgcatggaattatttaacaagagcaactgtatcacggcagattgccagttcttcgttagtaggaataactgcaacctttacagcggaatcagcagcagaaatcactacttcttctcccattgcctcgtttgcttctgcatccagcttaacgccaaggaatccaagatatgagcataccttttcacggatcatgcctacattctcaccaatacctgcagtaaatacgatagcatctacaccattcatagctgccacatagccgcctacaaacttggcaatgccatagcaaagaacctcaatagcattcttggcatcttcgttgccttctgcagctgcagctctcaggtcacgcatatcactggatacaccggacataccctgaagacctgatttcttattcaggacattcataacacctgcaagatccaggttctctttctttgcaatgtactcaacgatagccggatcaatgttaccggaacgtgtacccattactacaccttcaagaggggtaagacccatagttgtgtccacacatttgccattctgtacagcgctgatggaagaaccattgcccaggtggcagacgatcactttggaattgtccttatcaaggccaaggaactcaaccgcacgtttggatacaaagctgtgggatgtaccgtggaagccatatcttcttactttatatttcttataatattcaataggaagtccgtacagatatgcttttgcaggcattgtctgatggaaagcagtatcaaatacacctacctgcggaactccaggcataagctctgcacatacgcggataccgatcaggtttgcaggattgtgaagaggtgccagatcattacactcctcaacagctgcgatcatttcatctgtgatgattgcagaggaagcaaatttctcaccgccatggacaatacgatgtccgatagcaccaacctctttcagactggagatagcaccagtcttgtcatttgtcagtgcatccagtaccatctggatagcctctttgtgagtaggcatggaagcctctgtgatctctttgtcattgccagctttctggtaaacaagtcttccgtcgataccgatcctctcacaaagaccttttgcaagaactgcctctgtctcagaatcgatcagctgatacttcagggaagaacttccgcagttaattaccaatacattcatttttctactctccttaaaaaatatggtaacagttttctatcttcacagttacaaaatatgtacttaatatgatgggctatagaatctgatggatcagtcctgagcctggcactgaacagatgtgatagctactacacctacgatatcatctgcagaacatcctctggaaaggtcatttacaggcttagcaataccctgtgtgataggtccgtatgcttcagcctttgcaagacgctgagccagtttgtaaccgatatttcctgcatcaagatccgggaatatcaatacatttgctttaccggcaaccgggctgccaggagctttggaagcacctacgcttggaacgatagctgcatcaagctggaactctccgtcaagtgcaagctctggatactgctcttttgcaatctttgtagcttcaacaaccttgtcaacatctgcatgctttgcacttccctttgtagaatgggaaagcattgcaacaataggctcttcctgaacgagaagcttaaaggactcagctgaagatccagcgatagcagccagttcttccggattcgggttctggttcagtccggaatctccaaatacaaatgcaccctttgcaccatattcgcaatccggaacaatgatcagaaagaatgcggatacaagctttgtgcctggttttgtcttaaggatctgcagacatggtctgagtgtgtcagctgtagaatggcatgcaccggataccataccatctgcatcgcccatctttaccatcataacaccatagtacagatactggttcagaagtatctcctttgcctgctcaggagtcatccccttcttctgtcttaactctactaatttgtcaatatatccctgtgtcttctcagaagtctcaggatcaacgatctgtgcaccggagatatcaaagccgccttctgctgcgctctttttaaccttctcctcattaccgataagaatcagctttgcaataccctctttcaggaccttgtcagcagcttccagagttctcatatcctctgtctcaggaagtacgattgtctttacgtttgcttttgctctgtttttgattacatcaataaatcccataataattcattagctcctttcataagtgttggcccgacagaaatcattttctcaggccatacctgtaatatattataaacctcccggccttgtatttcaagcatttcgatggtagaatgtgccatataatcgtattttatgaggtacaatttcatgaaaactgtaggtatcattgccgaatacaatccctttcacacaggccataaatatcagcttgatcaaatccgccaaaagcttcatgcggattatattgtgatcgccatgagcggagattttgtgcagcggggcactcctgcccttttttcaaagcatgtgcgtaccaggatggctttatcctgcggcgcagacctggtggtggagctgcctgtttctgtttccacagccagtgccgaaggctttgcaaaaggagctgtacacctgctctcaggccttggcgtaacagacgttctctgctttggcagtgaatccacagatacgcagcttcttatggagcttgcccggatcctgctcagagaaccagagccatacaggcagcttcttacaaagaacttgaaagatgggctttcctttcctgctgccagaagcaatgcccttaccctttatactcataatcctcagcttgccaccttactttccaaacctaatactatcctgggaattgaatactgtaaggcgattctctccctgaaaagttccatccatccttacgccctgcaaagagaaggcagcggctaccatgacactgatctgtcagatacttttccttcagcttccggtatacgcgcccagctttttaaggagcctttggcttgttttcaggatctgattccatcgccttccttttctattttaaaaaaagcaattgaggaagggttgtatttaaaagaaagtgacctggaccctctttacagatatcgtcttctcctggaaacaccagattctcttcagcagtatctggatatgaacgaggatcttgcaaggcggatctgtacctgcgcctgggaatatagcacatttactgaatttgcagctaaggttaaaacgaagaatatgacccaggcccgcattcagcgtgcactgcttcatgccctgcttcagatccggcacactcccagcgattttcattatgcacgcattcttggttttcgtaaggccagcagcagccttttatcccaaataaaaaaaagaggctccatgcctcttctatcaaaggcagcagatgccgctttactgctgccccctacagaaaataatctgtttcaggaaactgtttttgcttccaacctgtatcagaccatgctttcacaaaaaaccggccagccattcattcatgaatacagccagccggtggtcgtcttataatgatttaatgtaactatttggcaggaagtgtacacatactgaatcgttacaacttaattatcttttccagaaagcaggatcctgtcattgtcaagtgctttccctgctccagcattgaatttctccagaaggccggcaactgtcaggccttctctttcttttccactgatatccagcacaatcctgccgctgtccatcatcagcgtacgattgcccagttccagggctgaatacatattgtgagtgatcattagacaggtaagatgattctcttccaccaccctttttgtcattgccagcaccttagctgctgtacccggatccagtgctgctgtatgctcatcaagaagcagcagcttgggtggattcatggtatccatcagaaggcttaaagcctgcctctgtcctccggaaagaagtcctaccggctgcgacatccggttctcaagcccaatatccagaagtgcaagctgttccctgaacctttccttgtctgctttggatacatgagaaagccatccacctctgccagctgccagtgcaagattctcctcaatggtcattcctggtgccgtccccctcatagggtcctgatacagccgtccgatacttttggagcggatatgctgaggcacaaaggtaatatcctgtccatccagaacaatagatcctgaatctgtgagaaagtccccgcagatcgcattgaacaaggtagatttaccggctccgttagaaccgatgatcgtagcaaaatcacctggcttcagagaaagagacagatcacttaaggcctttttttcatttacagttcccggattaaaggttttggaaatatgatttaattccagcatctgtcagatacctcccttcttgtgtgtcatccttcttcgtatctgcggccattgtttcttcagatatgggcctgagattgcaaggactacgatcacagaggaaaccagtttcagcataaatgcaggcatattcagtctaagcgcaatggtatatacaagcctgaaaatgaaagcacccaaaaccattccaacagcccgaagcaaaatgccccccttgcccaggatggttcctccgatcagaagggatgccagggcgatagtcaccataccctgaccaatattaatatctacagacttctgtgactgggccagcaggcatcctgaaagtgctgtaaaggaattggccacacaaagccctacaatggtggtaaataccggattaatagaagaagatttaaccatatccggattgtttccggtagcccggatcgcaagaccaagtcttgttttcaggaaaaatacaaggaacgcaaccacgatcactactgcgatcagtgcgatcaggatctctgtccttccctggagaggggtacctttcagtgcatccttcatcatcgtaaatacggtggtggtcctgttcatattcaaaagagaggagcctcccatcactgcaatattcacagaatacagccctgtattcacaatgatcccggcaagaagactgtccacacccattttagtctgcaggatcgcagttacaaaaccggaacctacacctgcagccatagctgcaggaatagacaaaaatgggtgtccgctgattgctacggttgccccaactgctgctccaagcgtaaaacagccatcggttgacaagtcacatacgttcagcatggaatagctgagaaacagcgccagaactgtaagggaacaaataagtcccagctttaatgcagtctctcccagtgttagaatggttgcgatattcacaataaattcctccaatcagtcagcattcagctcgtcaaagctttcagcagttgtgatttctttaatctgtgtgcagtgtggctcaaaagccgccttaacctgttccagatccagtccaagaccttcacatgtctctgtattgatagttgctgtaccattatcaaaagttttaacaggagtagaagccggatctgcgccctctaaaaggatctggctgatcatatctgctgtctcgcttccaagatttgcataatcaactccatagcccatgaaagctccgtttaatgcaaaggaatcagctcctgtatactgagggatccctgcctccataaatttctcataaattgaaagttctgctgtcataatggtattgtctgtaggtgtaaatactgcatccacgccatctgcaaccaatgcatctgctgccagctgtacctcatctgttgtagtacctgtacgctctacaacctcaatatctttctcctccaggaatgcttttgcttcctcaatagccgctgcagaggaatcctgtcctacatcatataaaagacctacttttttcacatccggattcacagcaagaatcaaattcatcacagatgctgtgtcaagataatctgaagtacctgtaatatttgctcccggctcttccaaagattctaccagtcctgcgcctacaggatctgtaactgcggaaaatacaaccggtgtatctgtaccttctgtcatagactgcatacgcattgcaacaggtgtagctacaccaaccattaagtctacgccatctgcctgaaaatcagaaatgatctgctccataacatttgcatctgcattgcagttttcataagaaatatcaaaatttacgcctttttctttaccaatctcttccagttttgtctgaagattatctacaatctgattcagggatgcatcatctacataattgcagataccgattttgaagtcatctgccattacagttgctgtcatcattgctgttgctgccattgctgccattacacataccatcatcttttttttcattttcgttctcctttcttgatccgctgaacctgtgtactaacaaaacaacataagaaccaactctaatgttttgatacctacggattgctccgtgctttgcactctcgcaatcctaccctctattcgcatatcgtgggattaacatcccacttttatgctcatataagggcgggtcccaaggtctttcatccacttatgagcaagctcatgtggatttagaccttttgaccctggtatcaaaaaaaccgcctcaaggcagcatatctgctgatccttgagacggtaataagattcttattatcgcggtaccactcaaattgactcattgtcctctttcgcgcgtactgtcatacactcctgattgataacgggtccggttcccgtcggctcctactctgctgtaaaatgatttcgggccgccctcaaaaggccattcagcaaaccgctccatacaggcttccaccaatacctgctctctgtaatgtttccggaatgcttactattctttctcgttggtttaactgttgttactttagcacactaatgcctgaatgtcaacacattttttaatttttgaagctatggataggagccgggatcctgccgcctctttccacaaatgcagcacaggagaatgggttcaccggcatgatcggtgcatagcctaacaaaccgccgaactcaactgtctctcctactccttttccgatcactgggatcagacgaacggctgttgttttctgattgaccataccaatagcagcttcatctgcaatgataccggaaatagtagaggctttggtatctccaggtactgcgatcatatcaaggcctacagagcatacacaagtcatagcttccagcttctcgatggaaagagcacctgcattcaccgcatcgatcataccctgatcctcactgaccgggataaatgcgccgcttaaacctcctacagcagtggaagccataactccgcctttcttcacctggtcattcaaaagcgccagagcagccgttgtgccaggggcacctgcacgctccagtccgatctcctcaaggatctcagccacactgtctccaatagccggtgtgggagcaagggaaaggtctacaatgccaaaaggcacaccaagacgtctggaagcttcccttgctaccagctgtcctacacgggttactttaaatgcagtacgtttgatcatctcacaaagagtttcaaaatctgcaccacgcacctttgtcagggcggtctttacaacacccgggccgctgacccctacattgataatactatctgcttctgtaacgccatggaaagctccggccataaacggattgtcatccggtgcattacaaaatacaaccagcttggcgcagcctaaggaatcctgatcctttgtttcttttgcagtctcaaccaccatctctcccataagctttactgcatccatattgatacctgtctttgtggatcctacattaaccgaactacatacacgatccgtgcaggcaagggcttttggaatggaacggatgagaagttcctctgcaggtgtcatgcccttgcttacaagagctgtatatccgccgataaaattcacaccaactgttttggcagcacgatccagtgttttggcaatggatacaaaatcctctgttgttttgcaggcagcacttccgatcagtccaatgggggtaacggaaatccttttattaacaatgggaattccaaactctgcagaaatctgttctccggtagatacaaggttctctgccttctttgtgatcttattgtagatcttctcatttaatttatccaaatcactgtcaatacagtccagaaggctgataccaagggtaatggtacgcacatccagattctcctgctctatcattttatttgtctcatttacttcaaaaatgttgatcatattcttctccttgcttccaggtctgcttccgctgttcttttgttgccgctgctttactttctgcagtcatttcaaaaatccatatcagatacggtgcatcacgttgaaaatatcttcatgctggcaatggatcactacgccgatctcatcgcccagagctgaaagcccgtcagcaagagcgcctgtatccttcttggaagcgctggtgtcagttaccatcatcatgttaaaatacccctgaacgatggtctgggaaatatcaagaatatttacctgattctcagccaggtaagtacatactttcgcaataatccctacagtgtcatttcctaccacagtaataattgtctttttcatcgtattatcctttctatatgtaaaatttaaataataaccggttgggataagcattccctcctggcaacctgaattctgaaatcaccggagcgatatggattatcccccagtgttacttccgagcacacagtttcatatgccagctgttcataattattctctttactaagatggcctaaaaatacggccttcagattatcatggagaagtctgcacaaaagccttcctgcattttcattggaaaggtgcccccgatctcccagtatcctctgtttcagataatatgggtatttccccacctgaagcatgcggatatcatggtttgcttccaggagcaaggcatccagcccctgaagatgctccacaatataatcattatattttccaaggtcagttgcaatcccaacagaactgctgtcatgctcaagccggaagccaaccggttgtgctgcatcatgagggatggtaaatgcatttactttcagatcctttatctgaaacggttcatcctcccggatctcctggatcagtccctggggcagctggccaagccctttcgacctgatgatggcatctgcagtacctcctgttgtgtaaatgggaatctggtattttcttgagatcacgccaagaccgcctatatggtcagaatgctcatgagtgatcaagatcccatcaatatctttccctgtaagatcaagttcattcagacccttctcgatccgtctgccgctgatccctgcatctatcagaagatgtgtctcctgggtgcctacgtaaatacagtttccgctgcttccgctggcaatactacaaaaccgcatgtttctctatcctctccctgatctgggcataagttctgtccagatcattattattttcaatcacataatctgtatgggcacgaaaatactcctcagttgcctggctggcaatgatcccttccgctttttcccttgtataacctctgctttcttccagacgacgaatccgaatctgtggatctgtatggatataccagacctgatcacaaaaatcctgataatgttcttccagaagaagggctgcctccaccacacaaagcctgcatccactttcctgaagttcccgaatcctgcggcaaatgtaccgttttactgccggatggattacagactccagccttttcagaaggtgcggctgttcaaatactacatccgataccctctttcggtcaatagttttatcctcttttatgatttcttttccgaaaatacctattacatcctcataacattcttctcctggttccattaccagatggcccacctgatctgcctgtatgacggctgcaccgtattctttttccagaaaagcaagtacagtgctttttcctgcacctacccctcctgtgatcccgattatcctcatttattttgcctcgtaccagctgcttccttcatgcatatccacttccaattctacctgaaggctagctgcacctttcatctcttcttccaggatcctggctacctgcgtaagttcttctttccttgtctcgatcagaagctcgtcatgtacctgcagaacaagcctggattttttgccttctgatttcaggcgtttgtatacccgattcatggcaatcttaataatatctgcagcagttccctggataggtgaattcatagccaccctttctccaaaagaacgctgcataaaattactggactttaattccggtacaggacgccgtctgccatacatggtactggcatagcctttctccctggcagtctccaccagatcatccagaaactccttgatctttggataagtctcaaaatatttttgaatataatctgctgcttcttttctggtaatacttaagtcctggctcagtccaaaggagctgatgccgtaaacaataccaaaattcactgcctttgcatttcttcgctgaagaggtgttacctgatcaaaaggtacatgaaacacctgggacgctgtcagcctgtgaatatcctgagcctgctgatatgcctggatcagggtctgatccccggacatatgtgccagaacacgaagctcgatctgggaatagtctgcatcaagaaaaacgcagccatcttcaggtacaaaaactttacggatcaatcgcccaagttccatacgtaccgggatattctgaagattaggctctgtgctgctgatcctgccggttgcagtaatggtctggttaaaggtagaatggattctgccatccttatcgatcataccggcaagaccatctgcatatgtggacttcagttttgccagctgcctgtattccaggatatctttaataatgggctgctgttctgccagcttctccaacacatctgcagctgtggaataaccggttttggtcttctttccgcctttgatctccattttctcgaaaaggaccactcccagctgttttggtgaattaatattgaattcttctcctgcctgctggtaaatagcctgttccagttcatggatcctgactgccagtctgtccccataagcctttagttcctctccctttacctgaattcctgttttctccatggaatcaagagtaaaaataagaggcagctcgatctgggtatataccttccacattcctgtttcttccaatgcctgctttaaaggctccatacaagaaagcacagtttctgctgtatagcaggcataggaggaaagcccttcctggtcctcctcccaggcctttctaaaggatgcctttccaagaagttcttccctggagggtatcatcttccctccttcatactccctcgccagatcctcgcaagtgtaggtggatttcaatggattcagaaggtaagctgccacacctgcatcaaaaacctggtgttcttcttccaggttcacatgcttcaacattgtttttatatctatggcgcagatcctggtatttaacgcaagatctgcgatctttccgcataaataggggcctgtaataaaattggccactggaatataatatatttcctgctcagtgatggcaagtcccagtccgtaaacctcttccttgtcagataaaagagctgttcctacaaccttttgcttccctgctttttcaaaaagggcttcacatccggacagatcctcacaggtaaaaaattcttttacttctgtaagctcctgggacattgtctgatcaaacctggtcaacagattcttaaaatcaagccttttgcaaagggcaaatgcttcttttgtatacagatcgcccagtctggctttttcataggagaaatccactggactttctgtattaatggttgcaagtgtttttgacaactgagccaggttataatgctcccgcagggattctctggccttatttggcttgatttcttccacatgctgataagcattctcaatggaaccgtattcaacgatcagcttagtggcagtcttttcgcccacgccaggaatccctgggatattgtctgcagaatctcccattaatgctttcagttcaatgatctgtgcaggtgttacctgatacttttctattacctgctgtgcatgataatcctctatggtagtcttgccacgtactgtcttcggaaggcgaatcatcactttttcggttgccagctgaagcaggtccctgtcaccggacagaatagttacatccataccctttgcttcactttgttttgcaagagttcctaacagatcatctgcttcatatccttctttggacacgatctccacgcccattgcctgcagcatctctttgatcagtggaacctgttcccgcaattcctgcggcataggcttacgtgtgcctttatatgcttcatatatcttatgccgaaaggtaggtgcatgcaggtcaaatgctaccgtcagatactttggcttctcttcttctaggattcttaaaataatattcaggaaaccatagacagctcctgtatgcagcccttctgaattggtcagatccggaagaccgtaaaatgccctgttcagaatactgtgcccatctatcagcaatattttttcactcatctgtctgtctcctttcctacaatagctgcgtgactgcataaaacagaaatcctgccagccctgccgcaagaatacagatccccacgccttcaacagtcctgaaaaacttctttttcaggatatatcttctgcttttacggatatcctcttccagcaattcccgaaaatccagaatctggtcttttccgttttcatccagctgctccatcgccttatggacaataaaataggtttccagttcatcatagcaggaagaacactcctctacatgttccagaaagctctctaattcatttacacttaatgtatggtcaatatatcgattcaccatactttccgcagtgctgcagtccataatgccagtctcctttcagccctatatcagaggtattataacggataatccgcaaaaaaacaagggaccgactcccgcagatcaaaaatctgtgtgtcagtccctctttagcgtggtatattatgcccctgcagatacagatgatccattcaggattttcataaactcttctcctgtaatcgtctcctgctcatacaggaatttggccaattcgtgaagcttgtcaatattctcagtaagaattctggttgctttctcatgttgtctgcgtaccagctcaacaacctttttgtccagaagggtctgggtctcaaaggaacaggtaagacttgaatctccgcccagatactgattgctcatgctttccatggcaaccatgtcaaaatcatcactcataccataccgggtgatcattgccctggcaatcttggtcgcctgctctatatcattagaagctccagtggtaatgctatggaagatcagctcttctgctgcacgtcctcctgtaaaagtagcaatcttattctccagttcttccttggacataagataatgctccttttcatccacctgcatggtgtatcctaatgcaccggaagtacgtggaataatagtgatcttgtgtacaggtgcagaatctgtctgcttggcagctaccagggcatgaccaatctcatgataggaaacgatcagcttctccttgttagaaagaacccggttctttttctgatatcctgcaataactacctcaatgctttcttcaaaatctgcctgagtggcaaatcttctgccatcacgtactgcacgtaaagctgcctcattcacaatattggcaagctctgctcctgatgcgcctgctgctgccttagcaatctcatcaaaccgcactgaatcagagatcttgatcttctttgcatgtaccttcaggatctcttcccggccctgaagatctggaagttctaccgggatcctccgatcaaaacgtcccggccttaaaagtgcaggatccagggaatccggacggttggtagctgcaaggatcactacacccttagatccatcaaatccgtccatctctgtaagaagctgattcagtgtctgctcacgctcatcattacctccggagaagccagctccatcacgcttcttaccaatggtgtcgatctcatcaataaatacaatacatggagctttttcattggcctgcttaaacagatcccttaccttggcagctcccataccaacaaacatctccacaaactcagaacctgaaatggaaaagaagggaacctcagcctcccctgccactgctttagcaagaagagtcttaccagtacccggagggcctacaagaagcgctcccttaggcatagacgcaccaatatctgcatatttgtgaggattatggagataatccacgatctctgtaagaagttcctttgcctcatcctcaccggctacatctgcgaacttgatcccattggtggacttcacatataccttggcattgcttttaccaaaggacatcatcccgccagggcctccgtttcccatagaattcatcatcttcttgctgatccatctgcccagaagtacaaagatcagaatcgggatcagataacctgccagaatgttcagaagtatagatggcttctgcggctctaccacttccatgctggtgccggcctcatacaaacggtctaccagctgtggatcctccatccgcactgtcctgcacaccgtcttggtgccatctttctctaccacataataaatataactgtcctgtatctcagccttagtaacattgccactatccacattcttcaggaaggtggtataatcggtcttctccacacttctcccctggatcatgggaagtactaacatgttcagaaccaggatcacaaccactactgccagtgtatatacatataatggacgtttgcctggctttttatcattcagactcatgctttttcctccgttttgtgttgtatacctgatgctatcactatttattctgaatatcaacagacccggatcatatttcataaactttttagaattaaagttactgttcactccgttcacagcaacttggtcaaaatcccatcctcggggaacattttttgcgtaacagaaacattgcaaagtgatttcgtattgcataaaaaaagccctgatctctcagagcttgaaaaagtgccggcagtgggacttgaacccacacgtagttgcctacaacagattttgagtctgcctcgtctgccattccgacatgccggcgcttgaaacaaaaattatcttatcacaaaaggcccgcttatgcaagccttttatgatagatactgaaatatttttatgaaccacttatgatgaatactgaaatattttatgatagatactgaattattttatttttcagaatttatctgcatcttccaaaagcttttcataaatgggaaagcagtcaaaagtagcaaaataatcctttggcgtttctgccctgcggatcatctcaaaggatccgtcttctttcagaagaatctcggaagacttcagctttccgttgtaattgtatcccatggaaaagccatgagcgcctgtgtcgtggatcaccaacagatctcccttagaaatctccggaagataacggtcaatagcaaatttatcattattttcgcaaagagaaccggtaatatcatacatatgatcacagggagcattctcttttcccataacagtaatatggtgatatgccccatacattgcaggacgcatcagattgactgcacatgcatccacaccaatatactccttatgggtatgcttctcatggatggcttttgttaccaggcagccatagggacccatcataaaacggccaagttctgtgtaaatagccacatctcccataccagccggtatcagcacttcttcataaactttgcgtaccccctctccgatcaccttgatgtcgttgggggtctgctccggacggtaaggaatgccaataccaccggacaggttgataaacttcacatgcgcacctgtttctttctgaagctttacagccagctcaaacattacttttgccagcatcggataatattcattggtaacagtattacttgcaaggaatgcatggataccaaaattctctgcacctttttctttcaggatacggaaagcctggaagatctgctccgtagtcattccatactttgcatcacccgggttgtccataatatcattgctgatcttaaatacaccacctgggttgtaacggcagctgatggtctttggaatactgccaactgcacgctccacactttcaatgtgggtaatatcatccagattgatgataccgccgatctcatccgcatatttaaactccttctccggcgtatcattagaagaaaacataatgtctccttccttacatccaatggcctttgaaagcatcagttctgtcatggaagaacagtcacatccacagccatattcctgaaggatcttgatcagatatgggttgggcgtagcttttactgcaaaaaactccttaaatcctttgttccacgcaaatgcttcctttaaagcttttgcattatcacggatccctttttcatcataaagatgaaaaggagtaggatattttgcagtgatctcctgcagcttttcaagggtaacaaacggttttttcttcataataatcttctccttatgcctggctattttgtctcaatgatgtgcatcatatttgtcactgcaccttctgtagtcatgtttgttgcagggtctcctgctgtaaatacaagaagatctcctttcttaacgtgttcttttgctttaacaacattcatggcctgggaaatgatatgctctgttgaatccttatgatagcccttcagaggacagactccccatgcaagctgcagcttgtgctgaacacgctcattaggtgtaatggcataaataggaacctctgggcggtagttggaaatcaaaagtgcagtctttccggtcatggtaggcgttacaacagcaactgccttcagatcccttgcagcctgtactgcagcaagtcctactgcgcttgaaacaaagccttgtctaaacatgttcctgtcttttctgtgaagggtgttattaagatgtggctctgtagtctcagcaatctccaccatcatcttcactgcacgtaccggatatttacctgctgcagtctcaccggacagcatgattgcatctgtgccgtcataaatagcatttgccacgtctgccacctcagccctggtaggtctgggattacgaatcatagaatccagcatctgtgtggcagtgatcacaatggcataattctcattacacttctggataatccttttctggatatggggaacctggctggcaggtatctccacgcctagatctcccctggccaccataatgccatctgcctcctggataatggaatcaatattatccacaccctctgcattctctatcttggcaatgatgccgatatcgcttccgccattctcatcaagaagcttacggatatcacggatcacctgtgcattacgcacaaaagaagctgccacatagtcaaatccctgttcaatcccgaaaagaatatcctttttatcctgttctgtgatccccggaagattcacctttacgtaaggaacattcactccctttcgttctcccagttcaccaccatttaagacacggcaaataatatcttttccttcgatcttctcgatctccaaaccgatcagtccgtcatcgatcaggatcttaccgcctggcttcacatccttgtataactcttcataagtgatcgccaccttgtgctcatcaccttcaaaatctccgactgaaagaataaactgacttcctgaagttaacgtaactttcctgccgtcttttagaagctttgtacggatctcaggtccttttgtatccaggagcatggctaccggcacatccagttcttcccgcaaagacttgaccagttccactctgtccttatgttcctcatggtccccatgtgaaaagttaaatctggcaatatccattccagccaggatcatttccctcataatctcccggctgctgctggctggaccaagcgtacaaatgatttttgttctcttcatgacaattctccctctaagtaaaacgcaatgctgttgtaaaaagtgtccctgtcatttcacatgtgtatgggtaaacaaatgatcctgacagtattcataattgccattgcatttggaacagaaacgaaattccagatttggatcatcctgctcagttctgccgcagatggcacatttatgctttgtaatggcaccattctgcccggtacggctctttggctccatagcacggcgaaattcgttgcgtctgtgaacctctttgggattataacgttgaagatcccgcgttcccagaaaataaataacaaaattcagaagggatgcaacgatcaatacagccataaaccaggcacccatacggatatagctgatcatctcgtatatgatcatcactccgtagaaaatggacatccagctcatcttgatcggaataataaaatacagcattacccgcatattggggaaagaaacaccgtatgccaggaatacagatacactgatataataggtggtaaaataattccagacaccatcactgaccccgtcgtatcccaatccgtaaactgcgatcagatacagggcaaatgctccgataatggtaaataccatacctgaagcaatataaatagtatacctaagactcccccaggtatgctccagagatgtgccaataggataatacaaaaacagaactgcgatcacaaaccagaatacgcctccgttggacggtggcagaaatatccaggtcacaagccgccagatctgtccgtgcaggatcttctcaggatttaatgtaaaccaggtaaggaagccggaattcacaatactgatgatatatccgatcacgtaacaaatgataacatacagggtcagattattgatcccgccgtatttaccgtattttctttcaagtttatcaatccacttcatttccttgtgtgtcctccatcagaaaaatttcttttttgataatatgacagctgcgataatactaactgctatagataaaagaataatgatcaaaaaaccataggtagtaaaagaaaatggcattccatgtgcattcagattcatcccgtaagcgctgaaaataatcgttggaatactcatcacgatcgttatcacggaaagtaccttcataactacattcagattattggagataacagacgcaaaggtacccatcatactgctcaggatcccactgtatatattggccatctcgattgcctgcttattctctatgataacatcctccagaaggtctgtatcctctggatactgcttgatggtatctactttcaaaagcttttccagcacaacttcattagatctgagcgaagtggtaaaatacaccagcgacttctccaattccagaagctccatcagttcctgattacgtgtggacatgtgaagcttttcctccacctgctcgcttttcttgtcaatgatacgcagataccgcaggtacatactggcattcctgtacaggatctgcaggataaacctggtcttcatgtaggtaaaaaagttccgcacacgtccttccataaagcgtgccagaacctgtgtatcctccagacaaatggtaaagatcatcttttttgtaacaatgatacctaaggggatggtgccataccagtctttgtcatttctttcttctatcataggaatatcaaccaggatcagggtataattatcctctgcctctatacgggcgcgctcttcctcatccaaaggcgccctcagatcatctgcttctatgccaaactgctcggagatctgaaaaatctctgtagctgatggattggtaagtgctacccagcagccctcttccggctcgttgatttcatgaatggagctgtcgatggttttaaaaatcctgatcatgattttcctcccttcctgtccctttgaagccaaatggacaagttcaatttattataaattgtgccggaatttttgtcaattctattggtttcggtttacaaatttttaacacctgtctataataaagaaatccggaaacatcattgtcccggacagaccacaaaaaggagacaacttatgagcagatcatcttttggaaatagatttacagtaaccacctggggagaatcccatgggaaagcccttggtgctgtagtagacggctgcccagcagggcttcccctacaggaaagtgatatccagtactttctggacagacgcaagccaggtcagagccgttataccacctcccggcaggagggtgatcaggtagcgatcctttccggtgtatttcagggacgcaccaccggaactcccatatccatgatcgtatggaataaggatcaacggtcaaaagactatgggaatctggcctatacctaccgcccaggccatgcagacttcggttttgaccagaaatacggcttccgtgattaccgtggcggtggacgttcttccggccgtgaaactataggccgtgtagccgccggagccatcgcctccaggattctttccgaaatgggcatctctttgtgcacttatacccgttccatcggggaaatccagatccaaagctttgatccacaagccatcaataaaaatcctctctatatgccggatcctttggcagcagacaaagccagtgcttatctggaagaatgtatgaaaaatcaggatagtgcaggcggtgtgatcgaatgcaggataagcgatgttccttctggtcttggagaaccggtatttgacaagctggatgcaatgcttgcccaggccataatgtccattggtgctgtaaaagcagtggaaatcggcgatggtgctgctgtttctaccatgaaaggctccacagataatgacggctttaccgtaaaagacggtcatattaccaaaagcaccaatcatgcaggcgggatcctgggcgggatcagtgatggaagtcagatccttcttcgggcacatataaaacccaccccgtccatcagccagccacagaatactgtaaccaaagataaagagcctatatcccttgaaatccatggacgccatgatcctgtgatcgtaccaagagcagtagtcgtagtggaatccatggctgctcttgtgcttacagatgcactttttaccaatatgagctgtcagatggataaaatcaaaaccttctacaatcggtaaaatcagctttgaaagaaaaaactgctgcagacacttcttctcacttatctgataaatgggaagctgaatctgcagcagctttattttttaaagtatttattaaccattacaccgcttttgaagctttcagttatggtccggtatatcctctccgtccggtaccggccagataccgatacagttaggtgtctcgatctttcttggtttgcctttcataacgataatattcttctcatagtccacagtaaacatggtgatggaattacttgaatgattggcaatggctatatgcttattatccgggaaaatagccagatccttaggataatccccactaatgggaagggtaaacttcttggtgagaagacctgtctgttcatcgatctcatacatggaaactgtattctcccctgcagtagtgctgaacaaatgtctgccatccggcgcaagagccagacctgaggctgcattatgtgatacatctgtgtcacccttctgaagggtggaaacgctctgcagcaattcaaactccggtgcatttccgctgccgtcatagctgtaaaccttgatctcattgctcagttcaaaaagaagatatgcatatctgccgtctgcgctgaaccgaatgatccttggaccgctctctcttgggcaacgcaaaatatctaccagttccagcttatctgttctcttgttgattctgtatatctttacctggtcaatcccattatctactgcacaaagatacttgttatccggtgtaggacgtacacaattcacatgcggccggaaattacgctccgcaacactgccaaggcctgtatggaaaaccccatccataacactgccaaggcttccatcctgatgggtatgtaccactgtaaccttcccgtcatggtagccagccacataaagatatctgccatccacatccgtagccagaaaacagcctctcataccatcaatgtccacactgttgatccttgtaaggtctccgttctcatccctttgaaaaacagcaactccctcatcctctatggaataaagaaacttgccattcttggagactgccgtataggatgcattgcttacctgcacctcactgcgctctgtcagtgttccatcttccacattcacatcatacacctggatccctttactggttccatgagtgtaagttccaacataagccacgtatttctttttccccattgttctgtcaacctcctaaagtcatctctcatatcccgaggtaactaacagttactgttcactccgttctcagcaacaccctctggttgattataccatatcgtggtctttgtaacaagcatcagtcacaactattcgtccgctgctttccatttttttgtaagccttgtaagcacctgatctgtctcttctctcagctcccgctttctggctgtgtctgtactgccggtctggatcccgatcacagaatcatctgcaatacaaagtcctggaaaatagaaatcactttcttctttatctccggatacattcacatagatgccttcttccttacataccttacagatctgctcattcagcttccagtcctgtgatgctgcgatcaccatatatgcattatcgaaatctgaccgcctgatgggacgaagctggatattgactctgcctgcctttcccatttcctgaagctcctgcgtcatccgaggtgcgatcaccgtaatatttcttgtaaataaaaggagacatttggtcctttgaagggctgtcttgccgccccctgccacaacgatgtttttatctgataaatccacgaacattggaaaataccgactgtttttcattagttatctcctgcttcctttgtgtttcctgctcatggataacattttaatcgtgaaagaatggaatgtcaatacagcggtgaagggatgggtgccagatatagaaaaatcatcacttggcaaatcttatacatatacttattgcattatgcaaaaaagatagggttatatatcagggcttcgttttcggatttctctcgtgcgcttattatctctgtcatttgccaaactcgcacttacgtgctcaaacacggcaaataacagagaagctagcacgaatcgaaatctacaaaagcctcgcatgatatatacccctattcttttatgcaatgcaatgaatcacatcgctgatttaccaataataattttactatattcagtctgcggagtagatgcggacacgtaacgggataccaagggaatctgccaaatcctggcttttgcgtacattttcttctccgatacagtctacaactgtaaatcttacatcatccagatattttctgcagtcgcaggcaaatttcagcatagcatcaaaggacttctccccataagcaggacgtaccacttcattataggattttgcgtccggcatgttcaggctgatggaaacacagtctacagccttacagatctcttctgccgtagatcttccgtggatcaggtcacttaatccgttggtatttaaccgcagacggaagtcatattttttccttacgtattcacttactgccaccagcttgtcaagtgccatggtaggctccccatacccacaaaatacagcttccctgcatccggtaaaatcaaacttatcaatggcagcaatgatctcctcaagagaaggttcatgggaaaaccacagattcccggattcccctactgtgtctccgttattccggatacagaaggtacatctgcatggacatttatttgtcagattaaaatacacctgatgattataatgatatacaatatctgtcatagtcctaatcctcccataatgtatataggtatttttcaaagcaaactccgtcgtttcggtccgtaccttcctttactgcgtccaggatggcccttccaagaaaacggactgctttattaacaagtgcttccataccaatcccctgcaccattcctccacataaaacagatgcaaaaagatcccctgtgcctgaatagctgcctcctgttttttcagaaaagatccaggtctcttttccattttcccagataagattaccgatctgctgcttttcttcctgctgatcatctacacctgtgatcactatcccaggtacctgatatctttcatgaagcataccgcccagcttctctatttcttccaggtatgccctgccagaaagctgctgcagggaaagccatttcttttccatttcctcttttccatataataaaagcaatgcctctgtcaaattaggagtgatcacctgggcttgagatatcagggctctcattttctcacaaagctgtggggaataaatatcataagcccttccctggtctcccatcaccgggtctaccagaaccttcgtgtctgatgaagcaaatcgatgaataaactcaagaattttgtctgcttgtttctctcctgccagaaatcctgtatagattccatctggacgaaaccctcgtttctcccactcatccataatcgcatccatatgctgtgtataatcgtcacaataatatgaggcatatccggtttgattgctaagaattgctgtaggcagaggacaggcctgcacacccatggcagagatcaccggaatggctgctgtcagagaacattttccaagtccggacagatcgtttaatatagctattttcttcaaagcttgatctctccttgtatttttatttattgtgttatagaataacatctaagtgtatcttaataaatatccaaatttaattatttttgagaggacagttatgattcagttagataaaaaagaaaccaacgaccacttatatctggaagtgtaccgatattaccgtgacctgatccaaaacggtaaaatgctgccaggcagcaaaatgccttccctgcgaaaatgtgcccaggaattgaaattaagcagaactaccatagaaaatgcttatcttcagctggctgcagacggatacatccttgccaaagcccaaagtggatactatgtaactgaaatctctgttcatcaacgccaaaaggccagttccaggtacagccagagcgtaaatgtccggtttgacttctcctctgcaggcgtagacagagaaagcttccgtttcgacctttggagcaggtatatcaaaagtgccctgcggcaggatcagcgaatgctgacctacggcgaagtacaaggggagcaggatctcagacaggtgctggctgactacacaagaaatcgccggaatattcaatgctcccccgatgatattgtggtaggtgccagtgtgcagtgtcttcttcaggtactgtgcccgcttctgaaaagcagataccactctgtttcttttcctaatccctcctttgtacaaggatctaccatatttcaggattttggatttcagctccattacagggataagaacagccaggtcatctacgtatccccggctcatatgaccaaatggggagagatcatgcccgtttccagacgcctggagctgcttgagtatgcaagccagcgagaaagcctgattatagaggatgattatgaaaatgagtttgtatatctgcaaaagccaacgccctccctgtttggtctttccggcggacagaatgtagtatatattggctctttttccagacttctccttccttccatccggatcagctttatggtccttcccccatctttgttggatgcttaccgaaaaaaagctgatttttacaatcagacagcctctaaagcagagcagatcgctttgtgccagtttatcagagacggtcatcttgcttcccagaccagaaagctgaagcgattatatgcccagaaaggaaagcagctgtgccagatactttccacagtttttggcaaagaatacagcataaaaatggggcctgcaggcacaagccttgccctgactctgccctgtggggtgagcaccgatgttgttcgcaaagaaacagaaaaaaaaggtcttcgtatccctgtgctgtctgaaacggcagatacaaaaaccttcctgttgtcctattcagctatggaagtccaggattttctcccggcttgtcatatactaaaagaaaccctgcaaagtctttcagtctcttgaattattgatcatatataaaagagcattcacaatacaggctgcaatatttgagccgccctttcttccctgggcaacaatatagggaatcggagctttcatgatcagctcctttgactggaccacatttacgaatcctaccggaacaccaatgatcagctcaggtttcaagaagccatcttcgatcagttcatacagcctcacaagagctgtaggtgcattcccaacagcaaagatcagcggctttgaaagtcctgctgccttgtccatacttgcagtggcacgggtggtaccgttttttttggcattctgtgccacatcctcatctgacataaaacagtacacttcaccgccataccgtgccaatgcctttttattgatcccggcttttgccatctgggtatctgttacaatacaggctccgtttttgattgcatccagggcatgctgtactgccccttctgaaaatttcagattctgtgcataatcaaaatccgcacttgtatggatacaccgtttaacgatcagctctgttcccggaaccagctgcacatctccaagctctgaggttatgatctcaaaactccgtttttcgatatccataggcttaacattttccagttccacctttatcataaattacaccccttcttccaatatgctgtatattttcttcatatccagatgctttctaagctccgcagccaggatgttatactgtgtttccttaaaggcagcaaaatcaatgcctgtcatagaagatacatctatcccttttctttctccaaggatccggatcaaagcctccacaacttcctctttatcaaacaccccatgtacataggttccacatacattttcatgaaaagcaccttctgtctttgtttcttccggctgatttccggccaccatcagctttgttgcaggcaatgtcccctcttttcttactgattctcccatatggatctcataaccttccaggcttactcctgacaatgcagcaaaggtacctggcattggaagaaactgccctgtaacacgggttcttgtttttttgctggcaaatactgtatccataggcaaaagacccataccccggatctttccgccagcctccacatgataagggtcacttaacgtatctcccagcatctggtatcctccgcagatcccaaatacgatacagcctgcagctgcagccttcagaacagctgcttccagaccgttttccctcatccacagcaaatcttccattgtgtttttcgttcctggaagaatgatcatatccggattcttcagttcagacacatgctgtacataacgcagggataccccttctacactttcaaaaggattaaaatccgtaaaattagaaatcctgggcacacggatcactgcaatatcgatcagacctgccgactgcttcctgtcaaaccgttccgtcaaactgtcttcatcctccacctggatattcatgtacggagcaactcctaccaccgggatgtggcttcgctcctccagcatcttcacgccaggatccagaatggtcttgtctccccggaatttgttgatgatcagcccctttaccatatcacgctcagaaggctccagaaggtctacagtaccgatcagctgggcaaacacaccgccccggtcgatatctcctacaagaagcactggtgcttttgccattttagccattcccatattaacaatatcatcatttttcagattgatctctgccggactgcctgcgccttcgatcacaataatatcgtattcatcagacaattcctgataagccttcataatgtccggcaccagtttctttttatatttaaaataatccctggcgctcatagtccccagcacttctccgtttacgatcacctgggagcccacatcattggtaggctttaaaaggatgggattcatctttacagaagggcggatccctgctgcctctgcctgcatcacctgggctctgcccatctccagaccttcctcagtgataaaggaattcaatgccatattctgtgatttaaagggggccaccgaatatccgtcctgccgaaagatccggcaaagtccagctgcaagaaggctttttcctgcatttgacatggttccctgtatcataatcgcttttgccatatttcctccaatgcttttaccagtatttcattctgtacatgctttttcacggcaatccggtaatatcccttagaaagaccgggataattgctgcaatcccggatcagcacttttttttgcaggcaggcctgaaaaagatcctccgggcccttaaaaaacagataattggccatcgatggatataccttaagtcctagcctggtaagtctctcccttaaatatgctttttccttaaaaaccagctgtcttccggcctccacatatgaattttccaaaagagctgccatccctgctgcctgggctggtgtagaaatattccatggctgattttcttctgtcattttttccagcagccttgtatttgcacaaagcccatacccaagtcttaagcctggcatcgcataccttttggtaaatgcctttataataaaaagattcctgtagtctcccagtactttcttcagcgtataaagtgccggctcttccacaaaatcaaggaagcattcatccactacaagaaaaatatccagttccctgcaccttttcagtatctccataagaaggcattgatccatcagaacacctgtaggattattaggattgcacagaaaaacaatatccagctccggccggagagctttcaaaaaatcccttttaactcgaaaatcttctgcctcttccagccaaaaatgatccacctcacatcccacaccttgcaatgcttgttcatattctgcaaaggaaggacctgtgaccagcgccttctttggctttcctgccctgcacacagaaaagatcacctcagctgccccattgccgcagatgatccagtcaggatctacctgctcatattttccgattgcctctttcaaaggctgatagcctacctgtggatactcatagattcgctccaaactatcccttgccgcagcctttacactttctggtgttcccagcggattacagtttgccgagaaatccaggcaatccctgtaatgataaacatctccgccatgcacatgattattcatctgttcctccaaatcttcaggctaatctaatcaggaatccaagcactgtaaaaactgccattccaagaacagcagtcccatacaggatacggtttgcccttggaatatcttcatattctacagtcctgtctggatcacctatagtgggcttttcatacagttttccaaaataaaacgcattgcctgccagctgtacacccagggctcctgccatagccgcttcggtctgggctgagttggggcttgcatgattacgcctgtcccttcggtagatccttgctgcattcttccagttaaagccggtcagtccacttgctgctaccatcagccatccggaaagccgggccgggataaaattcgccacatcatccagctttgcagcacatctgccaaaatacagatacttgtcatttttataaccaaccatagaatccatagtattgatgcctttgtacaaaaacataagcggtgcaccgccaatagccataaaaagcataggtgcgatcactccgtcagaagcgttttcagccactgtttccacagccgcctttgtaactcctgtatcacttaagctttccgtatcccgtccaacgatcatggaaaccgcatatctggcttcatccagggtgccatttaccagtctgtcatacaccttcatgctttcctgcttcagtgatctggctgcaagaagctgatagcaccagaaagtttcaagaagaaaagcagccacaggtacaaacttatataatatataaagaatggcaaagggcagaaaataacagactgcacataccataaaaaccatcacgatccctgcagtcagaagtccgcctggagtatccggaaaaatcttccgaagtcttttttccaatgtactgatcaaatcaccgatccagcataccggatgtctgatccaggatggatctccaaagatcagatccagaacgaatccaaggggaagtgcaagtattctcagcattttcattgatctcctttgtttttcagggatttttcctggcggaaggcaaggcacctttcaagaaaggcctgtggtatccgtggatttccataataatacaaatgaggaaatcctgcaagtattcggtcactgccccaaatacattcccagcctcttaagctttccggttttgatgcatgaaaggcttctccacagctgttggaatcaaaataatgaaattcatgggcaggtatgcttcccagatccgtatgtccaagcacagaaagcttctgttccagagtaatatagccaaacctggtaagccttggtgttctgtatgcctttccttttatcacatctgccatctgataaagcttcccatccataccttccatctgctgatgcaggtacataaagcctccacattctgcaagaaccggcatttgatcataaatggcttcccggatctgctgacgcatttcctggttttcctccagctgcttaccatacagttccggataaccgccgtacagtaaaagtccctgtatatccttcggaagcttcttgtcatgaattggtgaaaatggcaccagttctgctcccatttgctgaagaagtctgaaattatcctcataaaagaaacagaaggcttcatcctttgccagtccgatccgaagcttcttttctttctttggtaaactccatccaaaagaaggatccactttttccagtttatctggtacatcaatctttgatacttccacggcaagcttcaggatctcatcaatctccagggtatcattcaggatctgggaaagcttgtaaagccgctgtttcagtcctgggatctcctctggaaggatcaaaccaagatgacggctttcaatcaggcagtcctccaccattggcacatagccaagaacctggatccccagctgttcctgaaccagttttttcatccttggatacagcatggccgacatctggttaaagatcacgcctttaatgtggctgttctttttatattccagaaaccctttgatataggcaaccagagaaacactcattcctttgctgtttacaatcaggatcaccggagtatccgtaatatctgccagatcataagcactggcttttgtggtcgtgcctgccactccgtcataatatcccataacgccttccataacagccagatcacagtcctttgcattttcctgcagcagatatctggtaacatatggagatgtaaaaaaggtgtcaagatttctggatttggtaccgatcaccctgctgtggaacatgggatcaatataatcaggcccgcatttaaaggaagctgctctgatccctctgtttacaagcacctgtaaaaacccgcaggtgatcagggtttttccgcttccgctagcccctgctgcaaaaaggatcctggggatcttcatttcttttcctccctcttctgacaggtgatgatataaataggattttctcccatcatcatatggtaacgtccgatttctttggatcttgtagcgcttatctgcacaatgtctgtttctgtaaactgctggttctttatcacctgcaaagcctcccctacggtttccaaagtaatacagttgatcacgatccgtacttccggattcttttccataagcagatctacgatctgggaaagatttcctgaagaacctccgataaatacatgggtaggtgcaggcagacttttcagagcctccggtgcttctcccttgatcacttccaggttgtctgctgcaaatttcattttattttcatggatcagttctgctgcctcatcctttttttcgattgcatatacttctccatcaaaggcccttaaagccatttccacagacagggagcctgtacctgcccccacatcatagcatatggcatcctttggcagctgaagcttggaaagggaaactgtacggatctcttcttttgtcattggtgccttgccacggataaattcctcatcccggataccatgcaccaaaagcataggctttgccttcggattacaggcgcagactacacataaagcatccccttcatatccgatcagctctcctgctgtttttgcaaatattttttcctcaggataagaaagcttctctcctacatacagcatcacatctgacatgccataagaaaccagctttgcagccaggtttccgatttcccggccactgccaagaatagcaaaaacctttcggtaatggcaaatatagtggatcagattgcaattctttccatgtgcgcttaaaagctttgcgtcctcccaggacatgtggatcctggacataaaataaaccactgaggaaatcccgcagatcacctgtgtgtcactgccaagaccttccagaagctttttggctccactgtaaaatcccacatctccggataatacgatcagaatattttcaaattccggatgctcttcaatgtacttcaggatcgcttcgctgcggtactcatataccactttctggcctggcatccctacactgtctgccatccttctggctccgatcacaagatctgcttcctgaactgccctttttccctggatagtaagtgtttcttcagaacccatcccaatcccaagcacagtaacctttggctttgccacaatctggaaacgcttctgcaaaaaacgtttacattccagaacagtcagcccctgctcctttatgggacgcccaatgatcaccggaactgcatggcagtttaaagccgcatcgatcttttcctgaaagcctcctgccatcccggtatcctttgtgacaagaaaatcacattgaaactgtctgagcatagcttcatttaattctctggaaaaaggcccctgcataccgatcagatgctttccttcaaatcccatttccttgcatgcactgatcacggaaggaagggaaagtacacgtgcgtacacccgctccctataatccggaagtccggtaaatgctaaaagctccttgcttcctgtagtaagcagaatatttcccctggtgccttttaaatattccacagcatcctgaatgctttctgtataaaccgcctgatcctcatgttttccctgtgcccgcaggatccgtacatactccgtatttttattgtcacaggcttcccggatatttttcgtcacttctgctgcataaggatgagtggcgtccagcaccagttccggagacgtttcctggataaaggcctccatctgactttcatccatacgcccggcatgaagcgccacccctggcaattcccccggggagcgggtgccatattcggttgctacaagggcgcatacagaaatcttctgttttccaaggaacctgcaaagctcatatccttctgttgtacctgcaaacacaagaaccttatacatctttatatcctcttggagttaccattttgccgtttatcacctttgtctgagaattgccaataaatacagtggtaaacatgtccacctttgtatcacgcagttcttttaatgtcatgatcctggagttttccccttctcttgcaatatttgacacgatcccacacactgtatccggggatttgtatgtcatcatcaaatcacatgccttctgaagataatcatggcgcttatggctggatggattataaagacagatcacaaagtccgcctgggatgcgccaagaagccttgcctggatcttttcccagggggtaagaaggtcacttaagctgatcaggcagaaatcatggatcaaaggtgctccaagcacagaggctcctccaatggcagcagtgaccccgggaatgatctcaatttccacatccgaatatctttcactgatctcatagatcagtcctgccataccatatactcctgcatctccactgcagatcatagacacagtctgtcccttttttgcttcctcaaaagccatcacacaccggtccacttcttttctcatcggtgttgtcagaaagactttatcactaaaatgctcttttacaagatcgatatatactgtatatccaacgatcacatcactttgttcaagggctgccactgctgccccggtcatttcctggtatgcgccaggtccgatgcctaccacatagattttctgtttactcaaaatgaatcctccggtttccggctgccaaagctgctgtcacgccacctgccgcctgctttttttctatcagtaccccttcttccccacttgcaagaagggcgcttctttcacatacattgtctacccctacctgggcttttacaaaggatgagggtgtaaaatccccctgcacagcctgcagttcctcacttgtatatacctggaagggaatctcccactgctctgctaaagccacaaagcctggctcttcttttttgatatcaatgctggtcagggtctttaccccttctttgaaaatcccggccttttttaggatctcatttgctgcctgaagcacagcttcagactcttttccctttctgcagcccatgcctaaagctactgtttttggtactacataaacggtttcctcaaaaggagtatgctccttataaaccgttacactgattcccaaaagcagtccttttttctttgcttcctgcctgtctttacaataaaccagtccgggcggaagacttccttcccatgggaaatcgctgaaaaatcctgctttttccccagcaagaagggctgctgacacttcttttgcacccttcatattgagaatcccacagtcatttctctttgcaaaaacatccactgcaaaacactgatgaaggtctgtggcagttgttactaccggcatggcatccagtatttttgctgctgtcccagccagttcattggcccctcccagatgaccggaaagcagtgaaatcacaaatctgctgcattcatccactaccagaactgcaggatccgtttttttggatgctacaaaaggcgcaatactgcgtactgcaatcccacaagctccaataaatatcactgcctgagaatccagaaacctgtcgccggtccactgactacaagactcctttattgaatccggcagatatttgcttttcttccacagctgtacactgtgtcccagcttttccaggccttcttttaggcgaagccctgtactttctcctgtcaggctgtagcatatcatggctattttcatttcttatcacctggacatctctcttttcgttgattatctattacatggttttcgttcaagaatgcctcggcattcttgctgcgaggtgcgcgtcatgcaattgcatgacatacttctcctgcg

SEQ ID NO: 82 - DNA, 13045 bp, Unknown
  gut microbiota DNA sequence
gtactagttgcttctctgaattctgttgtaaatcccgggtcatacagcttggagcggtcatactttgcacccttcactgcatctccgatgatcatcaaagctgtctttgtaatattattttcttttgcagtttgtgccaaagttccaaccgtacaaatgaattttttctcatccggccaggttgccttgtatacaatagctgcaggagtttcagcttcatatcctccctcgatcagacggcggcttaattcttccagcattcctgtacttaaaaagataaccatagttgcatgatgagcagcaaaagactgaatgctctctctttccggaaccggtgtccttccctccattctggtaatgatcacactttgtgatatctccggaagtgtatattccaggttcagggcactggcagctccacaaaatgcactgactccgggacaatagtcataagcgatcttcttttcatccaaaatatccatctgttcacggatagctccataaatgcagggatctccagtatgcagtcggactgttgttttccctgctgcttctgccttttccatcacagagatcacatcctccagtgtcattttggcactgttataaatggtgcacacatcctttgtatagtccagaatctgcggatttacaagtgatcctgcatagatcaccacatctgcctcttccagatactgttttcctcttactgtgatcagatccgctgctcctgaacctgctccaacaaaatgtaccatagatcagtcctccttttatgtgtttgctttatgtgtttgctttatgtgtttgctttatcttttacaatgatcagcgaataatagccaggatcatccgggatcttttccacactatcaaagatctgctcgtcttccatgccacagttacggatcatcaccgcttcttcccccagctcctggatctgctgcctgacttctttcatcttatgtcctgccttcatcagcacctttgttcccggaagtttcagcccttcccggatctgataggaggccggaagcacatgaagctgctggcttgtttctaccagacctgtattcagccttgcgctgactgcacagaacgaagggataccacttatgatctgtgtgtcatatccctgatccgttaggatcctatgtacataaagatatgtggaataaacagtaggatctcccaaagtcagaaaagccacctttttcccttgctcaagaagtcttccaagaagctgtgcccctttttcatgattttccttcagctgctttttgtcctttgtcattggcataggcacagcaagcagttctttttccctgattccttcccatgcaccgtaaacgatccggtaggcaatgctttgctctgggatttctccaggcactgccaccacatctgcctcttttataattcttagggcttttagcgtaagcagttccgggtctcccggtcctactcctaccccgtataattttccggtcataattctcctttatactccttttgaatcttctggatcagacagggagcatcctctgtcattcccagatagccataaacattagaaaataccactgctcccagaaggatctgatcataagagcggtgattcagataaaactggatccgtttcatcacctgctccattgcaggctttaagattccgttctgttccaggatctgtaatgcctcatctgtagtattgcattccaggatcttacgggcacactccagatcagaccctgcacggatcccattggctgccagtacctccatccttccgtctgcattatgagaatgggtattcatgatccctgctgccacctttacaaacttcccaatatgtgccacaaaaagaatgccttttactcccatatcaatggccatatcaatagtttcccctacataattgctgcattttatatttttttcaaatggcagatccatatgatttttcaaatattctgccccataatttccaggggttacaagaagatattcctctccctgggtaaaatgctgtctcatctccacacgaatgctttcgataagtgccttctcgctcataggctccacgatcccactggtacctaaaatggaaatcccgccctctatgccaagccttggattaaaggttttctgggctgtcttttctccctcaggtacagaaataatgatcttaagaccaccttcataatcccattcctgggcagcctcttctgcttcttttttgatcatcgcccgcggaacaggattaatggcagcctctcctatttgctgggataatcctggctttgtcacccgtcctacaccgatccccccatcgataaggattcccggagtactaattttttctgccgaggcatacacaaggagcccgctggtggtatccggatcatctcccccatcctttcggatcgcacaggatgccttgtctttgtcaatacaaatatcctcaggaatcagagaaagccggatcccttttggcgtcataatcgatacctcttccacctttttcccggacagaagcatctttactgcagcctttgaagccgcagctgcacaggaacctgtggtatatccaaaacgcattttcttttgtcccttaatgacgtaataatcttccagacctgttttatgcatgccttttcctttcctgtgatatgattccttctttgaagctatattcagcctgtacgctcttatctgataacttttacacaccctatacaaccttatgtttcagccatttacggctgtggaaacgccaaataaagacgatgccgcggatggtccagtctgtaaacattccaaaccatacagccagtggtcccatgcctataacacggatcagaaataagcataaacagaaccgaaacacccacatgcttacacaagaggtgatcatagaaaaacgcacatcaccggcagcacgcattccatatgccgggataaaggataccacccatacaagcggcttgaccactgtgatccaggccatcatctgaaagcacatccttgcactttccggctccataccgccaagaatggtgataggctttgtaagggcaaataccagaaggcagcatccaatgatgatcatctcagccacacagctcagtttcttcacataataaacagcctcatcttccctgcctgctccgatacattctcctacaatggtcatcagcccgattccaactcccatagctgccgtaccatttaacatctccagattgttagtcattgcctgggctgcgatagctgttgtaccaagcgtggaaaccgtagactgtatagcaagctttccaagctgaaacatactgttctcaatcccggaaggaatcccaagtcccaggatcctgccgatcaatttacgatccggacgtatcttcagataatccctgactacaataggctgtctgtccttccttaactgccaaagtacaacaactgcacagaagatccttgaaaccagggttgcaatggcagctcctgccacccccatattaaatccccagatcagtatcgcattgccaacaatattcatcacattggagattactgaaatgatcagtggcccttttgtattttcctgtgctctgaaaatagatgcaccagagtcatacagtgcaataaaaggataggaagctgctgaaaacagaaagtaaacagaagatgcttccataacatctgcatctacttttccaaagataaaatgaagcagaggatctttaaaaagaaggcacaaaatagtaacagcagccgaaatggacagtatgatgaataatacctgtctggctgatttatttgccctttcataattacgctgtcccatatactgagcacagataatggttcctcctgctgcaagtgcagagaatgcctggatcaacaacacattaatggaatccacaagagaaactgcagaaatagctgcagatcctacattactcaccatcatggtatcagccgtacccataaaggaattcaacagctgttccagaatgaccggtaccagaatgctttttaacattttatttgaaaaaagatgtttctgctccatatatactcccttttcctctaatgaagctttgtattgactgtcttttatcctgaagtcttgttatttctttctgaaaatgctatgattctgtaattaaaaaatcatttagaaaggtaaccttatgtgtcgtacccttacatattctgttacagacaaagatgcagacgtagagatccttgattttctgcgaagccatggcttttctcgccatcttctgtcctcgatgaaaaatgacccaggctgcatccgtctaaatgaagaccgtggctttggtcataccctgttaaaagaaggggatatacttaccatcctccttcgggaaatggatcctccatctctgatctctcctgtaaaaatggatctgcagatccttttcgaggatcaagacctgcttgttttaaataaacctgcagatatgccggttcatccatctgcaggcaattatgaaaataccctggctaacggagtttcttattattttgcttccaaagagcagccctttgtatatcgttgtatcaaccgtctggatcgtgacacttccggagtccttgtgcttgccaaaaatgctctcagtgcagctgtactgtcccagcagatgaaagcccggcagatcaaaagaacttatcttgccattgtcacagggatcacacccgaacatggcaccatagatgctcccattgcccgcgaaaacggatctgccattaccagaattgtggacttccaaaatggagaaaaggcggtaacgcactatgagcgcctcgctgtccatgcaaagcgctcacttcttgctctccgactggacacaggccggacacatcagatccgggtccacatgaaatatctgggcttcccgctgccaggagattacttatacaatccggactaccggatcatccacagacagccgctccactcctatcagctggaattcacccatcctgtgaccggtagtccccttttatttactgcacctgttccacaggactttgcgtctgcctttacaaaggaactgtcatgaccaatgatacaatccccggcttctgccagatgaatcatttatttttgtcataaatgatcatcagccccttcaaaagaagatcctcatccagaacgatcttctttttgcaatagggaactatctttttggaaaggccgccggttgccactacaaagggttctttcccaagttcctctccgatccgctccacgattccgtccaaagcagcggcattgctgtagatcacaccgcttttcatacactcaatggtgtttttcccaatgatccttctaggtgcatcaatactgatcccactaagctgggatgctcgtgcagtgagggcatccaaggaaatgttgattcccggaaagatcatgccccctacataatgcttcttctcatccacaacgcttactgtactggcagtgcccatatcgataatggccagaggcagcggatattctgcaatccctgccacagcatttgccaccaggtctgcccccagtgagccggggttatccatcataatattcagtcctgttttcacgccagggcctaataccatcacttcttttttcaggatcttttcagcagccagcttcactgcgttggtgatctgaggcacaacagaagaaataatgcatccttcaatgtcattcttcttaatgtggtaaatgtccagaagcgttttaatgtcaactgcatattccaattctgtttttgttcttactgtagaaagcctttcaataaaataagtcttctccttatcaatacagccggctacaatatttgtgttgccaatatcgattgcaaaaatcatgtttcctcctggttacagccttacggcatctctttttactgcttctgtgccctcagttgctgtgccggggagcagtcttgccttataaagtgcagcgcctaccattccggtgatcacagtagaagagatcatctcacatacagcattaattccaacaaatgagcaaataaacacaatcacattctggccgcccatcagtccctgtatatactcactgttgccaaaaagaacaaccagcattgtcatgaaaaacagagtattaagaaatgcggaaaagaagcctgttacagagcaagaaaggtaaacattcttggatttcttacgggttcctctgaaaatatatccaagaagaataccatccagaaatcttggtacaaatctctgaataatagccaatgcaggatttatggcaaaaagtgtagcacccatggcactggagccgccaacgcctatacactgcagacagctggtaataccaaacactgcccctgcaacagctccgcctgcaggcccaagtacaatggcactgatagctaccggaatcacattaaaggtgatggcaagcgggccgatattcagatacccaaggggtgtgtaggccataagaagcaggatggcgatcatcaggccaagcatagtgatttgtgatgttttcagttgatttttcattttgtcctccttgttatcgttcccttttcgggatacaatacggtgctggatctgcggatattatgaatttgtccgcatcctttggttaatcagttacctcctggttcataatctccaggatcttatccaggatctttccggctgcatcctccttgctcatcagcgggagtaatacttcctcatcctgtgtaatcagagtcagcacattggtatctccctggaatccggctcctgccaccttcacattattggcagctaccatatccaggttcttcttctttagcttggctctggaattactgagcatatcgcgggtttccatagaaaatccgcacaaaaactgcccgggcaccttatgctcacccaggtatttcaaaatatcccttgttctttttagtggaatggacatctggtcatcctgttttttgagcttgtcctcacttactgtagcagggcaataatcagctactgctgcagccttgatgataatatgctggctgtcactgatactggtcacagcctcatacatatcctgggcagttacaacagggatcagctttacaaaagccggaggcttaatggcaaccggtccgctgaccagagttacctccgctccccttagcatagctgcctttgcaatggcatatcccatcttgccagaggaatgattcgtaatatagcgtaccgggtcaatgggctcctgggtaggtcctgctgttaccagaaccttctttcctctcagatcctttgctacaccgatctcctgtaaaatataagaaagaagcgtctcaggctccggcatcttgcctgcccctgtatccccacatgccagatgtcctactgcaggatcgatcacagagtatccatagcctgcaagaatctttaaattatcctgcacaatgggattctcaaacatattggtattcattgctggggaaataaatttcctgcatctgcacgccagaatcgtagtggtaagcatatcatctgcaatgccatgggccagcttgccgatcacattcgcacttgccggtgcgatcatcaccacatcagccttcttggcaacagatacatgctccacagaaaactgaaaattcctgtcaaaggtatccacaagacatttatttcctgtaagtgtttcaaaagtaataggatttataaaattacatgcattctttgtcataagcacatgtacatctgcatgaagctttacaagcgcactggcaagatatgcgattttatatgcagcaatgctgcctgtcactcccagaagcacagttttgtcttttaacatggaaataaatcgtcctcctctgtaaaatttcgatatgatgatgttactgtacacaggtaatatcctggtttattatacggcagggattaatggattgcaatggaattttttttacccatttggtaaaatagaaaaaaaagagcaatgaaaccatattgagaaaggaatgatcaccatgaaaaatatacagatcaccggctggtgcagccgttttatagaagaacaggtacaggaaggagacctgtgcatagatgccacagcaggaaacggctcagatacccttcttctttccaggctttgtggaaatacaggccatgtacttgcctttgatatccaaagggacgccctgaatcacacaaaggaaaagcttttgaaagaaagtccctttcagaactgcaaatgcatcctggattcccattccaacatggaagcatatgcatccccaaatacagtcaactgcattgtatttaacttcggctatcttccaggtggggatcataccatatctacaaggataaaaacaagtatgcccgctctttcttcttcgctgaagcttctgaaaaaaggcgggcttttgtctctttgtatctacagcgggggagatacaggctttgaagagcatgatgctgtccttagctggctgaaaagccttgatccccactgttatcttgttatcaaaagtgaattttataacaggcccaatcatccgccggtgcctgtgctggtgatccggctgaaataaacggatcagtccagaaccttgatgtactcgatcacaggctgctggtctgccgggatggtgccattgtcgtctgtaggcttggcatctttgcagatggcatctaccacatccataccagaggtaacttctccgaatgcagcataatctccgtccaggaaggtgctgtctgtctgcacgataaagaactgtgagctggcgctatccggatcactgctccttgccatagagatcacgcctctcttatgggagatgttattctccaccttgttgttcttgaactcccctttaatggtctgatcagaaccgccggtaccattgccaagaggatctcccccctggatcatgaagccgtccatgatcctgtgaaaggtaagtccatcataaaaattctcctgtacaagcttaataaaattagttactgtaataggtgctgtatctgcatccagttgtacatcgatggtgccataatcctttaccttgatctccacgtcatgagtaccggtaagggacttgcttacatccagtgtaactgcgtcctctgaagatccagtatctgccgctttctccggctcctgggaggtttcttctgcagcatcttctgcatcctctacaggctgtccgctctggccttcctcctggctgccctcctgtacatcttctgtatcagaaccatcagaaataccagcctcctctgcatccttttctgttccctgctgctcttcagacgcagtctttgcggtttccttattatctgtgtctttgtttccacaccctgtgaacatgcaggctgaaagcactgctgcacaaagcactgcaagatatttacgtttcatattcattatgcctcccagattacttttattataatgactgttttcctgtactcttatcgaatccgatcaggaaagcctacttttctctgaaccttacgcaaagtttttgttgcataatagtttgccttttctgcattttccttaataacagaatcaatatatgccttatcctttgaaagtctggcgaactcatcctgaagcggtttcagcacactgacaacagcttctccaactgcaggcttgaagtctccatatcccttaccctggaattccttcactgtttcatccggtgttttacctgtgcatgcactgtaaatatcgatcagattcttgattcccggctgctcatccctgtacaggatacatccttctgagtctgtaactgcacgtttgcactttctcataatagtatccggatcatccatcagataaatacttccattcgggttctcatcagatttggacatctttttggaaggatcctgaaggctcatgatctttgcacctaccttgccgatatacgcttccggaattgtaaatacatcgccgtaaatattattaaaacgctctgcaatgtttcttgttagttcaagatgctgcatctggtcaatccccaccggaaccacatctgcctgatacagaagaatatctgctgccatcagtaccggatatgtaaaaagtccgctgttaatattatccgcatgtttggctgctttgtccttaaactgagtcatacggtttaattctcccatataggtaaagcagtccaggatccatgccagttctgcatgaccggacacgtgagattgataatagatgcaatttttctttggatccagtcctgcagcaatataaagggtaagcagattcctggctcttttacggagcactgccggatcctggcgtatggtaatagagtgcatatctaccacactgtaaaagcattcatattcatcacataaagtcacccaattcttcagagcacccagataattacccagagtaagatttcctgttgcctgcatgccgctgaacaacactttatttccgtcgatcataatgatttctccttcttttttcattcctagtcagtttagcattctgtcatattaaagtcaatgttgcagttattttttatctgccgcttatatctacagatgatttttatctggtcttttatctgccagctgttttatattgcaaaactgtttttttctgttaaaattaaaaaagacagtatacagcctgttatcatttaaatcgaaagagaggatctgacatggaaaaaataaccagttttaccatagaccacatcaaattgcagcctggagtatatgtatccaggaaagacaaagcaggtgacagcgtgatcaccacctttgatatccgtatgacttcccctaatgaagagcctgtaatgaacactgctgagcttcataccatcgagcacctggctgctacttttttaagaaaccatcctgtatttggtcctaagatgatctactggggaccaatgggctgccgcaccggcaattatcttcttttaaatggagactacgaatccagggatattgttccccttatgattgaaacctttgaatttatccgcgattttgaaggagaagtacctggtgcttctgccagggattgtggcaactatttggatatgaatcttggcatggccaaatatctggcaaagaaatatctggagcaggttctttacgatatccgcccggatcgtctggtttatccagagtaatattttacacaagaaaaagaacagcacggtcatcaaatggctgtgctgttctttttttaattatattatttttgtaacgctctgtcttactgctgcacagtaccatctgatacagctgcatctgcctgtgtaccgtcacttacagccgcattaggatctgctgctgcattagggtctgctgctgcattaggatccgctgctgcattagggtctgctgccactgcagtcacataatctccggacgcatataatgtctgtccattatagttcacttcgatccatccattatcacatacaccagtgctggtaagctggacccctgcgccaactcctgtaacaagctctgcatctgtgcttgcatctgcacgaaggttcacttctgtattggtagtatatacaccgtcctgcttggtaacattaacaccgcttgctgtctgtacaataacaggctccggagtaggtgttacttctggggtaggtgtcacctctggagtaggtgttggctccggagtaggtgtgatctccacaactgttactgttgaaccggctccatcatcaaacccacatcctggaagcacaatagctgctcccagtacaagcaatgccaataatgtttttttcataatatatttcctcctgactcagctgcatgaatgcgctgattattcacatattagttattaaaattgtattacaactaatatacatgattatttcagaatatgcaacccattttcccaaaagattcttagagtatcatatcctttcaaacagcacatccacctgaccgccacagatcattccaagatttccctgttctgcattggacagattataagatacacattcaggagaaacaacttgtgtgcaataccggatcgcctcatattctaccctgccgcctccaatgctgccccaggtctttccatcatccccaaccagcattttgcttcccactcctctgggagatgagccagatttgcttatgatagtaaccattacacctgttcggccggcttccactgcatgctgtacatcctcatcacaatatgccatataatgctggtttttcacctttacgatctccgccataatactgactgcgatctctgccggcatctgccctcccagcggcaggccaatgggtgcatggactgactccagctgttccctggtatagccttcattttccagattctccatagtgatccgtaccttagtcctgcttccgatcataccaagataggtatagggccgatccagaatctgccgaacacagataccgtcacccgcatggcctcttgtaacgatcacataataagcatttgcatatgccgggatccttgcagacaattcttcaaaaggagccggtaccagtacatcagcatcgggaaacctgtcttttgtaagaaattcctctctttcatccataacagtaacatggaatcctagcatcttacctatctttgctgtaggacaggatacatggcctgctccaagaaggatcagtcttggattcttcatgtagatttccacaaaaacagatactccacagatctgcttgattccggtttcctctatctgatctaatgcctcttcataagggtgccagtcaaaccttggatccgtcccctgccatccaaggtccgtcctgtaagccttctgtccctgatgctctccatccaggatcaaaactgttttcagttttccctgtttttcaagtacacggtatatttctctgtacatttcctgtgcctccggctatatgtgttttcaagtcgagcaaccgcgagacttggcgcgtgattctggtcagcgtaagctgacatattctttacagaatcactgcgcatcct

SEQ ID NO: 83 - DNA, 4577 bp, Unknown
  gut microbiota DNA sequence
agctgtttttatccctgtggatataagttccctgtttttccctgagcagcctgccgcctgatacgcataaggttcctctaaggaaaacactgtcaatatcgccatgaagtgcaaagccttcaaatggggtattgtctgtattgcaagcatgtgtctttgctgaaatactgctttctttttccgggtcaaatattacaatatctgcatcgcttcccggtgcaagcacaccttttcttgggtatacaccataaagctttgcaggattttcacataacaggctgcacatctgctcctggctgatccttccttctcgtactccataggtgtacagcaagcttcctcttgtctgtattcccggaagccctcctgggatctttgtaaaatcatcctttccaagagccctctgctccaaggtaaaactgcaatgatctgtggcaactgtctggacctgtccgtttgccagtgccttccataagcattcctgatcttcttttttacgaagaggaggagcacatacatatctggctccttcaaaatccggcagtgaatacttactatcatctagcaacagataatgtggacaggtttccacatatacgatctgtcctcttgccctggctgccataacttcctgataagctttccgatttgtaagatggacgatcataacaggtgctccagccgcttctgcgattaccagcaaacggtgcacagcttctgcctccatagtatccggccgcaccaacggatgattctcaggtcccagtctgcctgctgcctttgcttcctgggacagtgcatcgatcacttctgcattctcgcagtgtactcctgcaaaacatccttctttatttagtttcttaatgattttgtaaatatccccatcccctaccatcattgccggataagtcatatacagcttaaagctggtgatcccggcatcgatcatatcctggatctctttttctgtttcttcattccattccacgatagacatatggaatgaataatcacaggagcatttaccgtctgcctttttgtgccatttttccagaccttcttttaatgtatggccgcctttatcctgtgacgcataatccaccaccatggtggtgcctccaagaagagccgcttttgtaccagtttcaaaatcatccgctgtaacagtccccgctacctccaaatcaagatgggtatgtccgtcaataaatccgggaaacaaaagctttcctgttacatccataacgcttgctccatcttccggaagtttctctccgacagcaaggatcttctctccatctgtcagtacatctgcttttattgacttttctcctgacacaaccgttccgttcttaagtaaatatctcatagtgatacctccttatcattcaggttttatgattccactgtcccggggactggccccattttgaacatgttgccctaaggcatcatatccgtttgcttcaatatagcacttttgtacagattattccatacatatcctttaattttacaattttttttagctttccacattttttttgtaaaaatcctttttatttttttgcgcctgtgatatactatgattacagtatcaacaggtctgagaccacctgtgcatacacaaggaggacaagcgaccatttgcctggcagccgtaaaggcactaagcagttaccattattttatagaaagggaggcagcttttatgggacgtctgactgtcttaaaacaaatcgcccaggatctggcttcagaattcgggcctgactgtgaggttgtgatccatgacctgaaaaccaaggatcctgaacactctattgtttatatcgtaaacggccatgttacaggacgcagcattggggacgggccttcagatgcagtgtttgatgtaattcgcaaccggaaccgcaaaggcagcgaaccttctgaccactctggttatctgatgaaaaccagtgacggcaagattctgaaatgcagcacatcctatatccgtgatgatgatggatctctccattatgtatttgggatcaattatgatattaccaagcttaccatgatcgagaatgcgctccacgcactgatcaccccacagaataaggaagaaaagccaaagcagatttctcacaatgtgaatgatttgctggatcgcttgattgaggagtccgtagcacttgcaggcaagccagttgcattgatgaataaggatgacaaagtaaaagccatccagttcctaaatgattcaggggcatttcttattacaaagtcaggagataaggtagccaattatttcggcatttccaaatatacgctatacagctatattgatgttaataagtaattttccaaagaaaaggcctgcggcctggaagagatttcacttttcttccagagcgcaggcttctttataaatttcacaggcgccgctgtttacgcatcttttataagcacagtccataaatgtcagctttttctttccatctgtgatctcatattcacagcataccgtattacttccattcatggtcctgcaaaatcctgaaataaattcctcttccacttctctcccctccttgaaattccctgtcaaaacagctatactgtaatcataaaacaacctataaggaggccattatgaatcaggaaatgtacgaagaagcagtccgctctaatatattatccagacagctgatcgaagaacttctcaacagcctggactataccggtatctcattcatcaattcaaccattgaagtcctaaaagtactccgaacccgcctggaacgaggtgacaggatcacagatgaagtatccgggatcacatataccatggacagcttttataaatttgtcaaagaccatttttcttcttatatcctgagccaggtttttgacgacccggctcatgcagaaaaagtctatttttcactggaggcctgcgatggcggctataatctggtcatggcagactcttctcacaacaagacttatgagtggatctcctccctaagcgagcggttctccctggtgcatatgatctctacagggatcgtatatctgaaggatgttaagaccaatacataccagcccttcatctccggcaacggcaaatactgccgctatgataaaaaggccggacatttggtagagctttaatctttcagcttgtggataaagatcccactgcgaagctttggttcaaaccaggtagacttgggtggcatcagcttaccctcatcagcgatctgcatcagatcctcaacagaggtgggatacatgacaaatgcaatcccaccttcttcttttgccatttctcccagctgtttcaggcttcgattgcctcctacaaagcgtatcctgggatcccgcctttcatctttgatccctaggacaggtgccagcactttgtcatgaaggatctgcacatccaactgccccacaatatccttcttttcatatacatccggccatgccttcaaatggaaccactgtccgcctatatacaggccgatgcaatgcttctccacaggcttacatggaaatccgggcatagccactaattcaaaattaaacttcaggcttgcaaggaatgcctgttctgtcagaccattcagatcctttacgatcctgttgtaaggaaggatggtaagctggtcaaagggaaaaacaacagaaaggaaaaagttaaattcttcctcacctgtatagtctggatactcctgtcttctcttctgccctaccttcacagcagatgcagccctgtgatggccatctgcaatataaaaggcagggatatcaccaaactcctgtgaaatcttcctgatagtatcctcatcatcaatcacccacactctgtggattacttcatcctctgccgtaaaatcataaactgccttgtgggattctttccattgctccatcagagaaagaagctgctgtgtatatctgcaggcaagataaataggacctgtattggcatcacacacatctacgtggcggatacggtccagttccttatcttcccttgtaagctcatgctttttcactacaccattcatatagtcatcaatggatgcacaacctgcaatcccggtctgggtcctgcctttacggaccagttcataaatataatagcagggatcaggatcctggatcatagttcctgtttcttccattttttccagattttcttttgccttctgataaacagaagggtcatacagatctacatccggcggcaggtccatctcagccctatccacatgcagaaaggaatccggatttacttttcctatcgccctggcttcttcacggttcaccacatcatacggaagtgcagccacctttgccgccttctccggtacaggacgaagggcacgaaaagcccttaatatggccataataatctctcctctcatttctaagtacagttatctgcagaataatttacccaaaaacatcagtttattttaccacagtttccaccccatgacaatgaacctaatttttttttgaaatgcctaaatatttttgcatatttctattgtaaattatttattttatgatattat

SEQ ID NO: 84 - DNA, 15824 bp, Unknown
  gut microbiota DNA sequence
aaaatatgctccctcctaagtgacaagtttttattatttcacttgtctacctagaagggagcatatcaaaacgtagacagccatttccttttatttttctttttcatttcttttcctttctacattcaagaatgcctcggcatttatggttaatacccctgattgccgcttatcgaagcttctctccctttttcatcatacaacctttacagtaggtgatgctcaccaccatccagacaatggccagcattacgattgccatgatccctgtattccagatcatctgaaataccatcgccaacgctgtcaggatgggaagcagcctgataatacacatataggccttgtaactgccctggtatatggcttccttttcggcttcgtcacaactctcaagccattgccgggcaaacttcctggatgccggatctcccttcttctgaggataaatcctctggatacgcttaattaccctgatctggccaataccaatatataaaaaagtaattacaaaaactaccatccctgctaaccaaaaatatgcctgccagtcttccactgtatcaatataatgagcggaatagctagtgcttaaaatcagaatgtccaggatcataaaaatattatgtacaatattggtaatgccatagatccggtccaggtcatactccaaccggtcattctcatcttcttcctccacgccttccagccgctgttcgattgctttcatctgatgcagtgcccattcattccagataatacaaacaacaaacaggatcagaaggataaaaaacatcctttcacggattcccaaaaccagcatctgtgctgcatcctggatggtttgtcccaatgacgcaccatgattcagatagctcatcccgccgccaagaaaacctccgaagatcattgccgccagcatgatcagcccatatttcaaataggtattcatctttcttttatttactttatctttcttcatcttcatcctccaaatagctgaatatatcctccacctgaacctgacagatctgtgccagcttcagggcaagtgttaccgatggggaatagtcgcctctttcgatcaggctgatggtctgtcgggatactcctgcaagcttccccatttgcgcctgattgatcccaagtctggctctttgttccttcaggtgattcaccaacggcatttatattcctcccttccttttcctttgttggtctgttggtcttttgttcttttgttccttttgttgtcttctatacatgacttgtatttttgtcattttgacaacttttcttgtcatccaatataacattgacaaatatacttgtcaacagattttaaaaagattttaaaaaggtttctttatgcagcattttgcatctgactctcccatataattatggacagctgttacagatttttctgtagcataaaactcaaagatatggtaagataaatctatgaatctgcataaactgaaataaagcacagattctatcactcaatcatgagatatggcagacggatcatagccgatgttctctgccaatacatcactcaatgtttaataaaatggaggtagctatgaaaaaaatgaaaaaaatagcagcattggcttctgctgcaatccttggcatttccacagtaccgtacaatgtacttgctgcagattcctacgctgacgccgaaaaatcagcactggataatgcccttgaaactttccgtgcggtttatgacaagagcctggagtcaagcaaaaaagcttacgaaggacagggcgtggatttctccctgaagttagaagatggggcaaagtcacttctcagtgcatttttacctgtagatctttcctggctggattccatcggtattaatggcgatgttacccttgaagcatcaaggttaggagaagaccttaccttaaaggtaaacgacaaagaaatctgctctgcacagttatatatggatatgtccacaatggacatatatatgagcattccggaacttattgatggttatatcaaagtcaatgccaacagtgctgcccaggaagaagcagaagcagccgaagacgtagcagacgacctggatatttctgtaacagacgatcttccggtagatgctgagaaccttactgaatacctggatgctatgatgaaattccaggagtccatgcctgaagctgacacaatttccaatatgatcgataaatatctgtctattgctgtagatcacgcagcagaagcagaaagcggaagtgagaccctttctgttgatactgtcagcgtagactgcactaccatggaaggcactatttccggagagaatcttctccctgctttaacagatatagtagaaacgctgaaggatgacgaagatttcaaatctatttttgaatctgcagctattcttgcaccagatgcagactatacatatgacgatttccagagcagtctggatgaagttctggatgctcttcagtctgaggatatgtcaacagaggatatcacccagagctttacctccaaaatctggattgacagtgatgataatgtagtgggacatgagctttcctatactgatgaagagggctcacatccatttttcctgtatcagactccaacagatggagacaatgcaggataccgtttacatgcaggtttggacgacagcagtatcgacatcgtaggaagcggtcaggtaacagatggtaccttgactggttactatgagctttctgttgactctcagccgatccttggcattactgtttcagactatgatacagaatccctgaaaaccgaaggtcttgttcatggttcttatgacctttccattttccagggcgacatggatgattctacttatgagactgtcagcgctttcggtatcaaactgactttagacggtatgaactttgcgctggatctttccatgagcggtactcctctggctaccctgtctgcccaggttcatgatgcagatcctgtgacctttgtagatccttctgagatggatcctatctatgatgtagacaatgatgaagacggtgatgcatttgcttcctctatgagccttgataccattttgcagaacctgacagatgcaggaatgccagctgatttctttgacactctggtaaatggctcttctgataccacagatgcagatactgacactatggatgatacttttgaagatgacaccgcagcagacgatgatactgcaattggtgacactgctgaataaatatttctgtagggaaatgcagtatatagattcataagcaataatgcagattactactatatttgtgttttcccacaaatattaaaagatcctgacatgtacagagattattatccctgtgctccgtgcaggatctttttttatatcactgattatcccctaatctgactgacatcaaatcagaaatgtgtcttatttttctggaaacatttttgtaaaaataaagcggatcaatggcccacaatacatgagctgccagaaaaaagctactggaaaattcataaaggttgtctgtatccatacagcaataaactgggatccggcatttttaaataatattgtagcgattaagctcataattggacacataatgcaaataatcataatagaaatcgcaattgtgataacaatcggtctatcctttggtgttacaatacggaatgcaagcacatgcgccagattatccacaataaaaaattccaacacaaatgcaactggccacatgattttcatttcgccgaaagccataagaaatacctgattactcattccaccgatattcagagaaatgttgtagcagatcatgacatataccatgagaaaggccatcatgagagtaaaaataacattttgaaactttgttttaggcataaaattgttctccttttttaattttgggcacaaaaaagacacttgtgttgttcgttatcaagcatacacttgtgtcgtttccaattttataccagtgctgtttcgttattagattagacagcaatgttacctgtcggccacattaccaagaaactattatatcagacaattaaaaaaatgcaaccccaaaagcagagtgccaaagcaatgcaatacataaaataagccttggtaaatgacagtgataataactgcccgaggaacatctgaaatcgaagtcctgatatataacatatcctttgtgaataatgcggcctgaacaaataacttcaagtcgagcagccgcgagacttggcgcgtgattctggtcagcgtaagctgacatattctttacagaatcactgcgcatcctcgcggagcatttatctcagtcggagattggactcccactgagacgaacttgctgatactcaccacctgaaagaggtgggagtcttctcgactgagataaatcaattacttctactccgtccagatatcggaatccacagcagcccgctccaccggaatgcccttcagataccgctccatgaaacgattatatccttctataccttccggatccggagcaagggtggtgcccatattccctgcaaataccttctggtccaggaagtcctccagtgtttcacgctctttcttatggatcaggtaagatgccagaactgcaattccccaggctcctccctctcctgctgtatccataacagaaaccggtgctcctacagcatctgccaggatctgctggcctacgcccttggtcttgaacagcccgccatgacccaaaagacgactcaccttcacatcctccttcttgaagaggatatccagccctacacgcatagctcccaggcaggtgtaaagattggtgcgcataaaattcgccagggtaaaatggctctccggagatcttacaaacaaaggccgtccttcttcaaatccggtcatatgttcaccggaatagtaacagtaagacagaagtccaccgccgtctttgtctccctccagagcctttctgtataaggtgccataaagctggttcatatctacttccatccccatagcttgggcaaactctttgaaaatgcccacccatgcattcagatctgtggtgcagttattagaatgtgccatagccaccggatgaccggatggtgtagcaaccatatcaatctccttataaggggcagataattccttctccagtacaatagatgcaaatacagaagtacctgctgaaacgttccctgtacgcatagcaacgctgttagtggcaaccatgccagtgcctgcatccccttccggcggacacataggaatcccggcctgcaatctgccgctcacatccagaagtcttgcaccctcttctgtcagacagccagcttcctgtcctgccaccagacatctgggcataatatcccgaagcttccagccaaatccatatggctggaccagctgatcaaactgctggatcatggtctcattataatcctttgtctcacagtctaccgggaacatacctgccacatccccgatcccaagcactctttgcccggtaagcttccagtgcacataagcctcaagagtagtaatataatcaatatcctttacatgaggctcgcctttcagaatggcctggtataaatgagcaatgctccatctctggggaacgttataatgaaaaagctctgaaagcttctcgctggcttccccagtaatattattgcgccaggtacgaaaaggaaccagcagattcccctctttatcaaaaggcatataaccatgcatcatggcactgatacctatagcacctgttctggtaagctctgtctctgcaccatacttctctttaatgtccacaagaaggctctgatagcacccctgaagcccgctccatacatcctcaagactgtaggtccatactccatgttcataacgattctcccattcatgtcctccggatgctatcggctcattctgttcattgatcagcacagccttgatcctggtagacccaagctcaatcccaagagcagtcctgccctccaggattgcctgcctgttctctgcaatactcattataaaatcctcccttttccctttcttaatctgtctgcatacctcttatttggaaatacctatcatctccgtcgaaataaaaaagatatcacatacacccctaatgctatcataacaagagacggcataatacgcccgatcattcggatcagcacacttaaaatccccacaaagatcacaagagagatcagcttctcataccagggcttatcctgaaaactgtgaacctgtctcttgtcttcgctatagctatcctcggaaaagccagaatcttctgtagaatactcctcataggatatattgccattatccgtatctgtatccagaagagtcctggcgatcagcctgggatctccaagttcgttcaacacatcctgctctgatcttcccttcatcacctgggactgtatataatcctcataataccttaaatgtgcagcaatcttcccttcatgcatctgcccggtcagctgactctccaaaatgtctaaaaatcctcttcgatccatgctgtatccaacctctcgttccgtatcgtaattgggacaattcctaacattatggcttcattttatcataaaggacagggatatcctatatactttttctaaaatttctataatcttttcatcatgcgatttctattacttcacgccggtaatctgaaaaggactctgttccatcagcggttatcataaatccatcttctatacgcaatcctatttcatttttgtcatcaccaagataaatgcatgtacaaaatgtcatattttcttccaaaagataatcagagttcgattcaatccatggatactcgccttccattaacccagtaccatgacacggaccgtaaagaatacaggactcatatccaagattctttaatgtatcgaaatgtactttgctaacttctgatgcattcactcctgcttttgcagtttgaaggatagctttctgggcagcaagtgcagcttctatcatcttcttctgtccgtcagttgctttgcccataacaattgctctgcccatagtagatgcatatccttcatatctggcaccaacctgtacttgaatcatatctcctggctcaatcactttatttctacagcggctgattgcctggttagaatttttaccagttaaaatccagaaaggatatgcttctccttcgccaccctcctgataaataactgacatagcaactccttttagctgattttcagtcatccctacatgaacattttctaccactgctttcattgcagcctgggtaatacgataagcttcacgaagacatgctatttctgccggggatttatctgcacgcagtttagcaactaacatatctgccttcaccagttccggatttccaatttcgtgaagactttcaagtaaagcttcataaatcacatgcgtgatcaagcatcctcctacaacacctattctgtttactttcttttccttgctaacttcttttatcacagatgcaaaagtttccaattttgctcctggatactctggttcagatgactctcgaaataccagtactcttctgattttctcgattctggaaacatggctggcaaaagtttcactttcagggccaataattaaaaccggatctccttctaaaggaatcaatactcctgcagattcaaatgatggccagtaatcgctataataacgtacatactgaggctctgcttcatttccatatgcaaacaatacatcaattccttctttttccatttctttctgagttctaagtattctctccttaaattccttatcttcaattctgattttcatatgattatccttcccattcttcacaacatttggcaataaatggagaaagcgattccgcttcaccatcagttataacaaatccctcttcaattcgatttgatcctcccggtaagccgaacaaactaatatctgtattcacagtcattccaacttgaaaagtttcttctgtttctgcgtctggatatggagactctgcttccgcacatccaattccatgaagaggtgggtatacatcatattttgaaagcccttcttccaggaacacactcttaaccgcctgtacaaacattttcataggaattcctgctttaaggtacggtttacctttttttaaagctcgtaccagtacatcaataacatacttagtatcctgattgtaatttcctactgcaaaaggcatttcacaagttgcaacatatccctcgtactgcactgcaagggcacacataatcatatccccatcttcgatcactttactgcttggacgacctacaattctatgagtccgctcaccacttccataaatttgaaaaataatatgctcggcaccttctgcccttgctgctgcttctgcgattcctgcagcttccaattcagtttttccaataagttctgattgcatcatggttttgaaccctatgtcagcaattcttgctgcttcccgtaaacatgccacttcctcagcacttttttcccgacgcaattcatacaaaatcgcattacaatctactatttctacccgaaaaccatctctgattttctcataaaggtctacggacattgcatccaatcctacaattcctaatttttctagttttccattcaagcgcagttcttctgctaatgcagaaaagctagtataatgagccaacggatagtcaatctcatccggaactgtcacacataaaaaatccggtgaaagtcgaatatcaggccatatactcatttcttctgccaccttctggccttcaggtgcacatataactatcggtttcccatttctacccagcagcatggcaccgcgttcaaaaatcggccagtaatttgatacatatcgtaaattctcttttcgatactcatctccataaatcaaaatagcatcaatatcatttttctccagatacatccgtatctttgaaattcgcctttcaaattcttgttttgttattttaggtttcatttttccctcctattaaaatggactgtctgaaaataacagacagtccagagttttatgtttcctacgtcaaaatgtatcagaaatcaaaatcatccacgttttctgtcgtaatatctaacaattctgtcataatgatctgatcatcttttacttctactactcctacttctggtatatccataccatctgttattttttctccatccagcagtgcttttgctgtataaactgccaaatagccaagttttccgggatgccaaatatttgcctcttgcatggaaccatcttccagatatgatttagcagcagatgcttccactacacctgtaacgattatctcgccatttttccctgcttctccaactgcctgagctgcagctggtggtgccggtgtagtcaccccaagcacacctttcaaatccggatatgccgtcattaagttctgggtaatagcataggcttttgactgatcatcatcacatggttcataagcaactcgtgtcatatccggataattttcttcctgatattctgtcgcatattttgcccatgctgagcagttttgtgctgtcaaaacgcttgtaatgatagcatattctccttcttcccccatatattcagcaaaacgctgcatcagatgttcgccaagtactttttcagaacagcagtttacatatgcctctctgagggacgtatctgtaacatctgaatcccaagtaatgaccttaattccttcttcttttgcctgctttaatacaggttcaattgcacttgcatccaacggagaaatcgcaatacaatctaccccttttgtaatcatatcctgtacaatgttagcctgcgctgccgcatcgccagtggtcgggcctgtatagataacttcacacccaagatcttctcctgctttagttccccaaacatttgaagtttcaaaataagggatacccacctgctgaggaatcaatgcaattgtatattgctctgctccatatgtggttactcccatcccaattatcattgttgctcctactcctaaaagtgccagttttttcatcataattacccttctcctttttttctttgtctatattgaaaagcgtcacacttttctgctcttaactttatatttctgcatttctatcacacggttaaataccactaccaaaacaaggatgcttccagtagcgagctgttgccagaatgacgaaatacccacaagattcataatattaccaatcatggcaaagatcagaattcctacaatcgtacctgcaattcctccacttcctccattgatactggttcctcccaatactactgctgaaatacatgtcatcaaaaatgccgatcccatatccgctcttgctgtagccacacgtgaaacttgtatattaccagcgatacaacacattaccgagcacataatatatgtaaaaaacaacactcttgtcgttctgatgccagaaaaaagagaggctttcatattatttcccatggcataaatgtgctgtccagtcatcgttctccgtaacataatgatcaaaaatgcagccaaaataaataatagaatcatctgaagcggcattcccagaactttatcctgtcccaagaaataaaagttttcaggtataccggaaatagaatttccctgactaagtactaatgcaacacctaaaaagaacatttgtgttccaagggttgctatcattggtggaatgcggatgattgccactagtatactgttaataattccacataatacagccactccaacactaacaagtaaagaaattccaacccccattcccttagtaagacataatcctgaacaaactgcacataatcccattgtcgttcctgctgataaatccattcctccagtgagaattaccagtgtcaaacccatggccataattcccatctcagacatttgctgaaataaagacaagatatttctcaaagacagaaaattctcattggaaaaagtaccgatcagaaagataagaaggaatgctcctgccagcacaatttcatgtaatgtaaatttattttttaacttttccttcatttcatgcctcctaatcaacatctatcgtttgtttttgagaatctgcataatttcttctaatcacatcaaatgtaaccgttacaattatgatcagaccatacaccaatttctgccaatatgtaggaatatgcgcaactacaagtccattctctatcacacccatcattacaacgccaatcactgtaccaacaatcgttccagatcctcctaaaatattggttccgccaatgactgccgctgcaatggcattcatctcccagccatttgatccagatggctggcagtttcccaggatagcatctaaaacaaaccctgcaaatccacataaaaggccagcataaaaataggttaaaaaaatggttttcttaatatcaactcctacataacgtgctgcattttcatttcctcctactgcatatactgatcttccaaaataagtatgctttaaaatccatgctgtcaaaacaaaaataactattgcataaataataggaagaggaatgttaaaatacgtttttccaagcgatgtaaaccacttcggaatgttcataatccatcgtccattggtatataccagaataatacctcgatagatgctggcagtaccaagtgtaataataatcggcggtattgaaaaacaggcaattaaaagtccattaattgcacctgttacagcaccaagcagcagtgctaaaatcaatacagtagcaggatttgctaaaggactgctctgagaaaaaatagccagccatgttgcactgaacatcatttgagatgctactgaaacatcaatgcctgcagtaattagaaccagcgtcataccagtcgccataatgcctaccggtacactatttaccagaacattctttatatttgtatatgagagaaagctcggagaatataaactcaacccaaaacaaagcagtaccaagattaaaaataccccggtttctcgtttttccaatattttcttcatttaatttccccctaaaatggctttttccatcatcagatcctgatttcctgttgctgtattatcttcatgtacaatccgtccatgacgcattaccaataccctgtcgctgagagcaaaaacttcctgccactcagaagaaaccataatgattgccattccttcttttgctaattctttcaataatttatgaatctctgttttagacgcaatatctactccatgagtgggttcatcaataatcagaatatccggttttgaaaccaaccatttggcaactgcaatcttctgctgatttccaccgctgaaattctgtgctaatttgtcaatctgtgaaggacgtatactgagcttcttcacatactcctctgccacccgatcaacctcgtgtctgttaataaatcgtaacggagacaggatcctctttaaaacaggcaaggtaacattatctttcattgacattgcaagaatcagaccttcttcatgtcgatcttccggaataaaagcaatcttattctcaatggcttgcgaaacattttttatatcaatcttcttgtcatgtaaatagatttctccggaatcgggcggatttaatccgaaaagggctttaacagtctcgctcctgcctgctcctactaatccagttaatgcaagaatctcacctctatgcaaagtaaaggaaatatctttaaaatttccacgcttagataaattctttacttccaaaatcttttctccagcataggattcaccattcagtgccgcataagcaacagatcgtcccaccatcatctgaactaaacgattttcatcaagttcatgaatttctttacatcctacatactcaccatcttttagcactgtcactcggtcagacacttcaaatacctcatccaacttatgactaataaacaatattgcaatattttgtttcttcagcttttcaataatggaatagagcatctttacttcactgaatgataatgtagatgttggttcatccataatcagtagtcgagatttaaaagaaattgctcttgcaattgcaaccagctgttgttttgccatactaagattactaagttgctcttgtacatccatggcaatacccaatacttctatcgcctcttcagcaatcctggtacattccttccaatcaacttttccatttttggaacgccccaagtaaatattttccgctacggaaagatttggaaataaacttaaatcctgatgaattgcattgattccgtgtttaatactgtcacttactccagaaaaacttacttcctttccatcgatcaaaatcttagatcctgtatctggtttctgcactcctgacagaattttgatcaaagtagattttccagctccattttctcccatcagcgcatgtacttcgccttcgcgcacatctaatctaacattattaagtgctttaacaccaggaaatgtcatgcttacattctccatttgcagaaatacttttcccgccatgtcatgttctcccttctatatactcgagtaacctttgatttaattctaatatactcgtgtatatttgtcaataactttttgttaattaaaatatttattgttgaaaatccacaaaaagcaggactttactttgtatataaaaacacccctataaaaatatctttctattcgatcgattgagtattcctgtcgaaccaatttccggttcagcccacataatatgcggaagcaccatgctctttgcatttttattatggatcaggcaagacaactgcttataagccatacgtgcaatttccttctctggccaagacgcaatcagcatatgatttttttcaagattagatcctgcaaaatcatcaaacccagccaaaggaacatcaaaatgcagttcctgcaatgcctgcttaacgccatataccacataatttgtgcttaatataatgccatcaaaaaatacgccttgctctcttacaagacgaagaatacactcgtaagcctgtttttcattgtatatatgataacagatctgtctttcttcaaatccatatccggctgcttctaatgcatgttgaaagccacggacacgataacatattgtgtaatcttggtccgatgttgcaataaataacggtttttttactcctcttttaatcatacactccgtcattgtacgaactgcttcttcattatctgagatgatataattaatatctttgccttctaccttacggtcaaaacaaacaacatttaatccttccacatcttttaaagattccgtataagatattggtgaaataatgatgccatctaccatcttacttcgaagcattaccagaatattattttctttttccagtttctcttctgcaatgcatataatcaaattataaccatcctcagccgctgccctttcaatttcttttacaatattgatataataaggattagcaaagtctggaactaccactgcaattgtcttcgtcatacccgtttttaaagattgtgcaatagtatttgatacatatcccatttcatctgctgttttcaatactaaatctattgtttcctttttgtatgatttattttttaattttccatttaatatgttggacactgtacatctggaaatatttaatctttctgctatatctttcattgtcaccatacaatagtcacctccctgccaataatatactcgagtatattattggcgtcaagtattatttttgattttttaccaaaaaaatatcatctgtatcctttttttatgaattttgcacaaatttaactgttatttttctatcaattaacattgataaatacttgacaatctcattcacttatgctaaagtgatttcatcagttgaaaagcttctgaatactgacggattcgtggaattgaccacagggatttcagaagttggacacagccgaccgtctgggcagtatttgatctcatcagatactgcccttttttaacaggatgatggcattgtacccatcctgtggtccggcagcaatgttcccggagagtaaaggcagaatattcccggaaggctatcaatatttattcagaatcaggaggagaaatttatgggattcaaaactgacattgagatcgcacaggagtgcactatgcagccgatcactgagatcgcagaaaaagcagggattgatgacaaatacctggagcagtacggaaagtacaaagcaaaaatcgattacaatcttttaaaagaatctgacaaagagaatggaaagctgatccttgtgactgctatcaaccctacaccggctggtgaaggtaagacaacaactactgttggtctggctgatgcaatgcagaaaatgggcaaaaatgttatggtagctctccgcgagccatcccttggaccggtattcggcgttaaaggcggcgcagcaggcggcggatatgcacaggttgttcctatggaggatatcaaccttcactttacaggtgatttccatgccatcggtgcagcgaataacctgctggcagcaatgatcgacaaccatattttccagggaaatgcactgaacattgacccacgtaagatcacctggagaagatgtgtagatatgaatgaccgtcagcttcgtaatgtcgtagacggccttggcggaagaacaaacggtatgcctcgtgaagacggatacgatatcacggttgcatctgagatcatggctgttctttgccttgcaagcgacatcaaagacctgaaagaacgtc

SEQ ID NO: 85 - DNA, 1949 bp, Unknown
  gut microbiota DNA sequence
aaattttatgtttttatatgtacttgtctgtaatagtgtggtatactaaaagaaaaaggatttttttaccatgtatattgcaatcacaggcagcaaaaacaataaagatgtatatatttatcgttcctttcgcaaagagaacggaaaagtctcttcatgtatttataaaaaacttgggaagtacaatgctcttctgaaacagtttgatggcaatgaatccaaacttataacatgggcaaaagaacaggcggctaaagaaactgaactttataaacagcataccggaaaagtatctgtagaattttcccaagctgcaactatccctatgaatgaacgtcgttctttcaatgtgggttatctgttccttcaggaactgtgcactcagctccgcttagataaagtctgcaggacaatcaaaagcaggcataaatttaaatatgatctgaatgcgatactcacagatctcgtctatgctagaatcctttcccctgccagtaaactggccagctatgaatactgccagtttttgttggagccgcctaaatacagcctccaggatatttatcgttctctttccataattgcaggagaatcggatttcatacagagtgaactttataaaaattcaaacttcctccatccaagaaataatcgtgttctttattatgactgtacgaattattactttgaaattgaagaggaagatagtcttcggcgttatggtaaaagtaaagaaaaccgccctgatccaatagtaactatgggattatttatggatgcagacggtctccctcttgcctttgatatcttttcaggtaaccagaacgaacaaacaactttaaaacctttagagtctaaaatccttcaggattttaactgcagcgaatttatatactgttctgattcgggacttggaagtacaggtaatcggagattcaattctttaggaaaccgagcttatatcatcacgcattctttgaaaaaaatgaaaaaggaagatcgtgagattgctctgaacacaactcagttccgcaaaattggatccgataaatttatagatatccgtacactggacgaatcggatgaagaagtttataacacaatctactacaaggaagtgcctgttgttacaggtgatatggatgagactttaattgttacttactcccctaagtacaaagcataccaaagaaaaatccgtgcccggcagattgaacgggctgaacagataatcacaacacccggacgcaaaagaaaagggaaaaaccaaaatgaccctatgcggtttgtaaaaaagacttccgttactgctgatggagaggttgctaaaaaacaagtttatgatcttgatgaagaacagattcagaaggaagaaatgtatgatgggttttatgcagttatcacaaacctggaaggagatgtttcagagatcataaagatcaacaaacaacgctgggaaatcgaagaaaactttcggatcatgaaaacagaattcgaagcaagaccggtatatgtcagaagagaagaccggataaaagcccatttcatgacttgctatatcagcctccttctctaccgtttactggaaaagaaactcggaaatatttatacaacggagcagatactggaaactttacgttctatgcatgtgacacttctgagcaaagcgagtggatatattccctcttatacaagaaccgaattaactgatgcattacataaaacatttggttttagaacggattacgaattcattactaaagcagatatgcgaactcttatcaaggatacaaaacagataaaatcaaaataagaaaaatatagtacatatcgctgcaaaaagaaaaacagctacaatgcccatatttactgggtttgtagccgttttgttaccttacaactgtcaaagatgggattataccctataatccaggaaaatcaacaatcat

SEQ ID NO: 86 - DNA, 1917 bp, Unknown
  gut microbiota DNA sequence
cactgaagtaacgagaatgcgacgcgcacctcttcaagttgcctctggaagccagttcttcattgtcaatggaaatgaggtcttttacagaatcattgatgcgttccttctgctcttctgttaattcctttgtatcttcatcaatgttttccagaatttcttccagcgtactgtcgatttcatccatcttatcccctatttggtcttctgactgatattcatgaatgttgacagttccaatatctgtgcagatcaaatgctggtcatccggatcaattcctacaacaaatcccccgttaaacccaacataataggtgatcccctctgtcaggttatatcttacagtacaatcggaagtgttcactatttcccgctgagctacaggctttttgccttccatagcatagataaccggccgcagtgccggatcaaacacatacgcacctgtgtgatccggtgtgaaggtataccaggcattacgatactgtaatggattttttatattttcgttggtgcccatttttaaagtgccaagaaccatctgatctacaggcaatacctggatcatgcagtcttcttcattttcgatggtcagctgatcaaaggtattgacataaatcactgctttataagttcctgcaggatagtgtgcggaagaatctgtatccacactaacttgctgcagccgcagatcatagctattgcctgatatatcctgattatcctcattggtgcggatctctacatcctctgttttgccatcctgatatgtaacatgtaagataccaaacagatagaacatatctatatactcagctatcttgttttccagtttccactctatagaagcctttttcacttctttcaggtatgtgatcttcagattgaaaacattggtatacatctcatcgctttcatcgtcatagccaagaaataccctgccgctaaagccaatataataggttgtaccctgcaccagattgtaggttttatacccttctgcattcatttccggagcgagcagatcctcaaagtcatccagaaactggaagacacttactgtgcccatttcagcatcctcatcttctgtattaatcccaagtttgaatttcccggatgccggtgctgtaaatctgtaccagcaatatttacctgcagggctgttcactccattattgatccctaccgtaagctctgcaagctgtgaaactgctttcacctggaaggtgtatgtctgatccatggttgtgatctgctttccgttgcagcttataaggatcttataggttcctgcctccaggctgttcccaggtgccacttctatgccatcttccacatcacatctttgcagcttataggtataaacatatccataatcttcgtcaactgcttccttcttattccaaccatcaaaagtaaattctttctcaacatcattttcataatgaaccgtgaatgtaccactcaaatacacatcgtccagtcgctctgtatagttcatttcgccaaactccaggctagcagactgaatcgccggtgcatcctctttcttcgtgatggtaagatcacatactgtctcggtcacatccatccagtcatatcccaggcctatgtaataggttttatttccttcaagggtataaacctgatctccatcatcggtttttccccaggcaagatccgtgtaatcatttccataatcttcacggactacagaagaaacctctttgctgccatggatcacataatttcctgcatcctttgttgtaaaacgataccatacacattcctgattgttaccgctggtcttattatattttacttctttatttactccttcatgaagctctgtcagctcatccagtgcacttacatgaatagtatatcagctgggagatgactcctacctctataggt

SEQ ID NO: 87 - DNA, 63618 bp, Unknown
  gut microbiota DNA sequence
taaatatctactgtgttagagtaaattccaccgcataagcgggcggtggaatttaaagtttcattttaggaaatataatttttccaaaaaaccatttgacaaccactcatttatatggtaacatatgtcttgtccttgagacaaacaataacaaatgcgatagtggcgtagttggtaacgcgcgaccttgccaaggtcgagaccgcgggttcgagccccgtctatcgctcttgatgccggaagattttcttccggttttttttgtttagaatcttccagtcaattgctgcatcctgcggagcgtttttatgcaaggaaacattatggagtaatttcctgttacataaaaaaataacagcaaaacttcctgctatacgctaagaagtcctgctgtcttattactatatttaaagctctgctttctttaaaatcaattaatggtggaacagacggattccggtaaatgccataaccattccatagctgtcacaggtagcgatcacatctgcatctcttacagatccaccaggctgtgcaatatacttcacaccacttttatgtgcacgctcaatattgtcgctgaatgggaagaatgcatcagaaccaagtgttacatctgtcatctgatccagccatgcacgtttctcctgggctgtaaaaatctccggtttctgtgtaaaggttttctcccacttaccgtcagccagaacatccatgtattcctcaccaatatacacatcaatggcattgtctcgttctgctcttgaaatctcctttttaaaaggcaagttcagcaccttcggactctgacgaaggaaccagttatcagccttctgtcctgccagtcttgtacaatgcacacgggactgctgtcctgcaccaacaccaatagcctgtccgtcttttacgtagcatacagaattggactgagtatacttcaagacgataagagccactttcatatctctttttgcttcttctgaaagatctttcttaatagtcacaatattggagatcagctgatcatcaatagccagctcctgtcttccctgttcaaaagtaacaccatatacctgcttatgttctacaggtgcaggcacaaagtccggatcgatctggatcacattgtagttgccttttttcttctgctgaaggatctccaatgcctcctgtgtatatccaggtgcgatcacaccgtcagatacctctctcttgatcaaaagggctgtatctttatcacacacatcagaaagggaaatgaaatctccaaaggatgacatacggtctgcacctcttgctcttgcatatgcacatgccagcggtgaaaagttcttccaatccatatcctctacccagtagatctttgcaagagtctctgtcagcggaaggccaatggaagcccctgcaggtgaaacatgcttgaaagatgtggcagctgggagaccggtagctttcttcagatcgcgtaccagctgccatccgttaaatgcatccagaaaattaatgtatccaggtcttcctgaaagaaccttgattggaagttctgatccatcctccatgtaaatcctggaaggtttctgatttgggttgcatccatattttaactctaattctttcattattgtctcctccttcttctgattactgattcttgtttacgatctttgatacatagctgcctgttgcaatatcaatgtaccttacaaacagagatactttgttgtcaggattcaggctgttccacaacaactctgcaaatgcatccatatcatccgggatggctaccagcttaggctctccttcgaagcttggaagcggattcccgtcgcacttgtatgtgtggataaaatgtccttctcctgcttttgcatttgaataggcaaaggtatatctgttgcaagaagatggatccccattattgcttttcaaaatagacattgcatagctgtaggaaccattttccacatgcataacaccggaaatacgaggcgtatagtttggtccatctggctcaaattctctgctgcgaagggactgttcaaatgtaagctgatgatccattccctcatagatggtgtctgtctgatcaccatttgtaacaatcgtcttattgcccagaacacgtaccggagcataaatgatcaaacttggatcaaccagtttggaagggtcaaaggcctgtgtacggatcccctctccttcttctacaaaaatacggtttctgctgttttcacttctgcccatgataaaatatgctgttacagcctttgttccatctgcagaccgtccgatcacgatccctctgccaggataagaattttctttcagttctttttccagtgacaacatttccataatctttgctcctttgctttaccttttctcttttttgtgtacaaaaaaacctgggaagccctcttaccaggctgcccaggcggtcgacattttcatatactgcactccctgtaggtttgccctacgatccgccagttgtgcagctcttttttactatacaatagatttttcctattttcaagcccccaaaaatatttggtgttgaaaaacctattcacttcaagattcacagacattctactgcaaggctttatcctcctgaatgcgagcctgtatatcagccttcatctgctcccaggcctgaggattatccacataatatttagggcattctttccctgttacatcataatgccggatcactgcctcctgatccagtccaaaacgcacacaaagccaggctgccagttttacgcaagattcataagtggtatcattaaacttcccggtctcgtctggatggcagcactcaatagacaaagtgtctacgttcctggaattggtggcataggacatctcagaagatggaatacactggatcacctcgccctccagtccaatcacgaaatgactgcttacctttgtctcatgggtccaggacagattctcaaaataatccctgttgtcctgtgcagaggctcctggattagctgtataatgaatggcaatataattaacctgtgtaatgggcagctgcggcctggaatactcattaggggtaagcagctgcacatcaatatacggtgctccctgttcctgccactgctgagggccatcggaagtaccttctgcactggatgcattctgactggtcatttcctctgactgatctgctgtatactttctgttgaacagccagatcatgcagacaaggatcaacagcaaaaggctgcacgcaaggatcagccgccggttacgctgccgtatccgctgcctttttccaggtattgttcttttctttttatgtaaatcaggccgccttggaaaagacggcctgggagatttatctgtcatatttatttatcatctacactgtagttcggtgcttcttttgtgatgtggatatcatgaggatgagactctttcagagatgcagcggagatcttaacaaatctgccggttgtcttcagtatctcaatattctcagcaccacagtatcccatacctgaacgaaggccgcccattaactggaatacagtatcttccaaatggcccttgtatgctacacgaccctcaacaccttcaggaacaagcttcttggcattctcctggaaataacgatccttgctgccgttctccatagctgcaatagatcccataccacgatataccttgtactttcttccctgatataattcaaatgttcccggactctcatcgcatcctgcgaacatgcttcccatcatacacacattagcgcctgctgcgatcgccttggtaatatcaccggaatacttaataccaccatctgcaatgatagggatatcataacggcttgccacttcgtagcagtccataactgctgtgatctgcggaacaccaataccagcaaccacacgggtagtacaaatagatccaggtccgataccaactttaacagcatccactcctgcatcgatcagagcctttgtagctgctcctgtagctacattccctgcaatcacctgaagctccggatatgctgccttgatctcccgaacagcacggaggatattctcagaatggccgtgggctgaatcgatcacgatcacatctacgttagctgcaaccagtgcctctacacgtgcaagtacattagctgtaatacctacagctgcaccacagagcagacgtccctgggaatccttcgctgccagcggatatttgatctgcttctcaatatccttaatagtgatcagtccctttaagttgaagtcatcatcaacaatgggaagcttctctttacgggacttggcaagaatcttctttgcatcttcaagagtgatcccttcttttgcagtgatcagtccttcagaagtcatgcattctttaatcttcctggaaaagtctgtctcaaacttaaggtcacggttggtaatgatacctaccagctttctcccttctgtgatcggaacacctgaaatacggaattttgccatcaggtcgttggcatccttcaatgtgtgctctggggacaaatagaatgggtctgtgataacgccgttctcggaacgcttaactttatctacctcatcagcctgcgcctcgatagacatattcttgtgaataataccaataccaccctgtctggccatggcaatcgccattctgtgctctgtaacggtatccatacctgcactcatcagtggtatgtttaattttactttcttggtcagatacgtggttacatcaacctgattcggaattacctttgaatacgccggaactaaaagaacatcatcaaatgtaatgccctctccaatgatagtacccattgcatttcctcccttgttaaatgttttgtgttttattttttatatattgttccatagtttagcaaaaaaaataatcagtgtcaataccaggttagcctgaaaagttcttagcatgacacactgggtcaggccggaaaaaccttgctatgacacactgggtcaggcccaaaagaccttgtcacaacctgtttactcagtccagaaagaccttgcttggcgcactgctccgaatcgcctggatcatcttctcatccggctccaggatcactttacaggactctccattatctctgatgatcatggcaaaacgcttgtgctcagcatttccagaagaaaaatcgtacaccttcatcttctggttattgttgtaataatccatcctgtgggaggtaaggggagctaccagatctgcattcttaatatccagatttttaactctttttctcttagatttggccatgatcttgtcaatgtccagttcaccgttcacataaagatactcatactccaggtctgtccttggaaacagtataaaataccctgccagaccaagaaccagtgccagaagcagagcaaagggtgtgataaacaaacctgccacaacaaaaagtgccgtaaatcctatcactgcgatccggactgcagaatccgctgctgtgcgctctttctttaccagatgctcctgatataagtcactcataacatcttctcctatttctttttttgtttttaatttttgtaattgtcagaaagctcaattcaagtcgagcagtgcttccagtacatcttctactattcctgacatttttttcagtatatcacaaaacagggccagcgtctatgacgccgaccccaatttatactttctttatgatgtacctctttataatgtggctgggattacatcatacccattccctgtccgccagccggtactgccggtgcatcttctttgatgtttgcaacaacagactctgttgtaagcagtgtagatgcaacgcttgtagcgttctgaagggcacttctggtaacttttgcaggatcaaggatacctgcactaaccatatccacatatttctcattcagagcatcaaaaccaattcctggctcagactcttttactttattgatgatcacagatccctcaagtcctgcatttgcagaaatacggaacagaggagcctccagtgctttcaggatgatgttggcaccggtcttctcatctccctcaagagatgcagccagctcactaacctctttggtagcatggatgtaagcagaaccgccacctgcgataatgccttcctcaacagctgctcttgtagctgccagagcgtcttccatacgaagttttgcttctttcatctctgtctcagttgcagcaccaacacggatcacagctacaccgccagacagttttgcaagtctttcctgaagcttctctctgtcgaaatcagattttgtctcctcaatctgagcacggatctgtgcaacacggtttgcaatatcttctttctttccaagaccgtcaacgataacggtattctcttttgcaactttaacggattttgcacggcctaactgagccattgtagcatccttcagttccagaccaacctcatcagagatcactgtaccacctgtaaggattgcaatatcctgaagcatttcttttcttctgtcaccatagccaggagctttaacagctactacctggaaggttcctcttaatttgtttacgatcagagtagtaagagcctcaccctcaacatcctctgcaatgatcagaagctttgctcctgcctgaacgatctgctccagaagcggaagaacttcctggatattgctgatcttcttatctgtgatcaggatatatggatcttccagtgttgcttccattttctccatatctgtggacatatatgctgaaatatatccacggtcaaactgcataccttctaccaggtcaagctctgtatgcatagtcttggattcttctacagtgataacaccatcattggaaaccttctccatagcatcagctaccagcttaccaacctcttcatcacttgcagaaattgctgctacatttgcgatctgggatttgccgcttactttctggctcatcttcttgattgcttctacagcaacatctgtagctttcttcataccttttctcataatgatcgggtttgcacctgctgccaggtttctcattccctcatgtaccattgcctgagcaagtactgtagcagttgtagtaccatcacctgcaacatcgttggttttagatgctacttctttaatcagctgtgcacccatattttcaaatgcatcctcaagctcgatctctttcgcaatggtaacaccatcgttagtgatcagcggagcaccgaactgtttatcaagaactacgtttcttcctttcggtccaagtgttactcttactgcatcagctaatttattcacaccagcttcaagtgctgctctggcttctgcgccatatttaatctcttttgccatgatcatcaatcctcctgtttttatttaataacagctaaaatatcgccctgttttacaacaatatattcttcgttttcaagtttcacttctgttcctgcatatttggagtagataaccttatctcctacagcaacttccatttttacttctttgccatcaacaacgccgccaggacctacagcaataacctctgcctgctgtggtttttcctgtgcctgaccaggaagaacaataccggactttgtagtttcttctgcttctaactgttttaatacaaccctgtcacctaatggtactaacttcatgatttatgtcctcctttattattgcaatgctcttcatttctaatttgctagcactcaattaatatgagtgctaatcactgtccctatattattgaatttatcgcttttctgcaactcttttcacgcttatagattacagtgtattcttttaaaatcttatttattctttatttttctcttgttttctaatttttttatttttataaaaaaatgatgtaaatatagcagcaagagaaacagccagcaagccaagccagaatcctacagatacagtatacacaaagcccatcattgcgatgcatttttagcaataagaaccttacggaataatttcctgattacggaacaaagcgaacaagtccgcttcaaactccctgtatccctcaatctttgagggacttgttacgctttgcgcgccagatgcagtctgctttagcagacatattcctcatgcatctggtcgcatcctcgcggagcgtttttatgtaataggaacattacggagtaatttcctattacataaaaaagactgttgcaatctctgcaacagccttctgatcatctgatatcccagccctgttcaggctttcttgttattcttctgggctttgatctcctccagttcatcgaagatcacttcattcaaaaccttaatataagttcccttcatacctgaagaacgtgattcgatcacacctgcactttcaaatttgcgaagtgcattcacaataacggaacgggtgatccctactctgtcagcaatcttgctggcaaccagtatcccctcatccccattcagttcatcaaagatatggatgatggcttccaattccgaaaatgataaagtattaaaagcggacttcacaacctgcttcttacggtcttcctccgcattctcttcatgaaccgcccgcatcatctccagccctacaacagtagtgccgtattcgctgacaataatatcttctatatcatatggccggtccttacggtacataaataccgtgccaagtctctcacctgcaatgtcaatgggattgataatcccctggtagcttgcagatacatgctcaaacccaagcgtctggagatttacattttctttggtagacagaacgcccagaaacctttcattcaacattccatccacatagccgccaactttatcttcaatcagttctgtgatttcctcaactccaggacataagcttatacctaataccttacccttcttactaagtacaagaatgttggagcttagagtctccatcagaacctggcagatatcattaaataccaccttgctggagctgctgttgtgaagaagcttgttaatcttccttgttctatccagtaactgaacgctcatattgtcctcctttcacttcttttatgaagcaatcctgtaatctgatataatcatactacacgttttgcaggatatttacaagacattttttactatttttttattttacccgatttttcaggaaatatatcttattaataaatattgactgaaaaaagcattatttatcctcatcatcggttgttttctgttccacatatccacaggtttcctggctgcataccagtttattgcctttttccaccatataattaccgcattttgggcatttcttcttagacggcttctgccaggacataaaatcacattccggattgttctcacagccgtaatattttctgccctttttggtctttttcagcacaacctcaccgccacacttaggacactgtacaccaatcttttcataatatggcttagtgtttctgcactctgggaatccagggcatgcaagaaatctgccatggggaccatatttgatcaccatatgacgtccgcagttatcgcagatcacatctgtaacttcgtcctggatatctactttttccagctccttctgtgcagcatccacatctgctttcagatccggatagaaattacggacaactgtcttccactgtactgtccctgcttccacgcagtccagaagaccttccatggtagctgtaaaattcacatctacaatacttggaaatgcctgtttcataatattatttacaacttcacccagttcggttacataaaggttcttctgctctttggacacataccttctgctaataatcgtggtaatggtaggcgcataagtacttgggcgtccgattcccagttcttccatggtttttacaagggaagcctctgtataatgagccggcggctgtgtaaaatgctgctgtggctttaattcctttaaggaaagcttcatgcccttttccagactctggcttaatacattgcccttcttctcatcatcttcctgggtgtatacacacataaaaccgtcaaaggccaccttggaagctgcaactgtgaaggtatattcccctgcccggatcttcacagatgtggtctcatacttggctgctgccatccggctggctgcaaagcgtttccagatcagctgataaagcctgaactgatctcttgaaagggagtccttgatcatctgaggagtcctgctgatatctgtaggtcggattgcttcatgggcatcctggatcttctgtccctttttcactgctttttcgaaatgggaaacatactgctcaccataattgtctccaatataagcccttgcagcactgtcagcctcttcagagatcctggtagaatctgtacgcagataagtgatcacacctactgtgccgttgcccttgatatccacaccttcatacagctgctgcgccagacgcatagttttctgtgtagaaaaattcaatgttttggcagcctcctgctgaagagtactggtagtaaaaggaagtggcgcattcttggtgcgttctcctttctttacctcggaaatctcatactcctgcccctccagagccttcagtacctggtccatctcctgcttattatggatctccatccgcttgtctgtgccgtagaatctggcttccagtggctttttctctccatttacaatgaagtctccgtccaggctccagtattcttccggaataaaggaattaatctcatcctctctgtcgcagatgatacgtaaagctacagactgtacccttcctgcacttaagcctctcttcacctttacccataaaagaggactgatggtataacccaccatacgatccagcatacgccttgcctgctgtgcgtccaccaggttcagatttagttctcttggatgcttcagcgaatcctttactgcagtctttgtgatctcattaaaggtgatcctgtgcattttctttggatcctctttcagagcctgtgataaatgccaggaaatagcctctccctcacggtcagggtccgttgcaagatagatcttatctgctttcttcgctgccttacgaagcttggcaagcaattctccctttccacggatggttatatatttcggttcaaaatcattatccacatcaatgccaaactgactctttgggaaatcccgtacatgtccgtttgatgcctctacttcataatttgcccccaaaaacttcttaattgtctttacctttgcaggtgactcaactatcaccagatactttgccatgataactctcctaagctaaatcataatgtagtcacatgttacttacatctaacataatgctgtctgcccacctcactggcaagccccaatacctgaagctgcatcagcagcccgcttgtttttcctgctgaaaatcctgttttttgaataaaataatccaggttttcaggtcgtaaatcgagacaactatacaccaattccaaatctcttgcaagtcctaagttctttttttctcctgctgtttccttcttttcaggaaaaatcccccattccccaagcaggatttccggacaccaggcaatgcctgccccatcaaaaatcagctgattacagccctgtgaaagagtctgatccacctgtcccggaagggcatacactgcctttccctgatcaagagcaaaacctgcagtgatcaaagatccgcttcgttctctggcttccacgatcagcaccacatctgccagggcactgatgatcctgtttcttgcaggaaaatgtcctgcctttggcggcatcccgggaggaaattcactgatgatccctcctccggtttccaggatctgattgtaaagcttccggttggctgcaggataacacacatccacgccgctgcccagcactgcataagttggcttttgtgcctccaatgcgcccaaatgtccctgggtatcgatccccaatgccataccgcttatcacctggatcccgtattctgccagtacctttgcataacaatgagcctgcctttttccataggcgctgcacattctggcccctaccacagctgctgtgggtgcattgtcttccggcagatttcctattacataaagttcttttggcatacctgacagcttcttaagacgcttgggatattccttactgtttatggtgatctttcttatttctgtttgttttccttccatataaaatacctcactgtttcttcatttatacccagtattttttgtcaaatgcacgataggataaagcctgcgaaatgtgggaaacatgtatcttatcctcctgctccatatccgcaatggttctggccactttcagtattctgtgatacgctctgccactaagttccattttccggaatgcctgttcaagaagcctgtttccttcttctgtaaccccgcagtatttctggatctgtctgccggaaagctctccgttaaagcatatgttttccttttgatatctttccagctggatctgcctggttcgctctactctttcccggatcgtatcagaggattctccttccggcgcgccattcatctgctgaaaagatacaggcgatacctccgtacaaagatcgatccggtcaagcaaaggattgctgatcttccccagatagtgactcacttctccaggagtgcagcggcacctgttcatatccggaaaaaagccgcatggacaagggttcatggctgctgccagcataaagcctgccggaaatgtaaaggtcccgctggctcttgaaagctggatcactttatcttccatgggctgccgcaggatttccaggcttctccttgaaaattccggcatttcatcaagaaaaagcacacctctgtgtgccagggtcacctctcccggaccaggaatcctgcctcctcctgccattgcctgggcagaactggtatggtgaggacttcgataaggtctttgacagatcaacggactgtcagcagacaacaatccagcaatactgtagatcctggtcagctccaggctttcttcaaaagtaagctgtggcataatggtgggaagccgctttgccaacatagttttgccggctccaggagggccgataaacagaatattgtgaaatccgctcactgcgatctcacaggctcttttggctccttcctgaccatggatatccagaaaatccaccctggtcttgcactcattttctgtttctttagggcttggtctgtcaggattttctttatgaaaatcttccggatttttcagatatcggatcagttctttcagatcctttacgccgatcactggcatatcttttacaagcctggcctcctgaagattaccatagggaaccatacaatatctgcactttaattcccttgctttgatcactctggcaagaatacccggcacaggataaatctctccgttcaggctgatctccccggcaagcatcacgccttcaagcaggcttggatgaaggatccctgccgcagataatacagctgcagctacaggtatatcaaatcctgccccttcttttttgatatctgccggtacaaagttcacggttactcttttaggtggcagactgatcccattattgcggagagcagtacggacccggtcctgagcctcttttacctgagctgacggataccccaccattgtgaaggatggaagaccgtcacttacatctgcttccacttgaatgggacacacttccattcctaaaatactggctgacaatacacttgcaaacatgatttcctttctgcaaaaagcgctgccccgacctgtgtttttgcctttttaaaataaaattctcatggatttttgtagatgattttcagaatactgcacatgaattccagactgtttttgaacagatagatagattttagtatagcccattatgctcctatttgcaatagtttaattggttctgttttatactgcgaatagacgttttcatagaaatacaaaagaaaaaaatcggaaaggagaaatactgtatgagatttcagcgcattcaggatctgcgtacggatgctgacctttctcagaaacaaatcagcgaaatcctgcatatcagccagcgatcctattcccattatgaaacaggatccaggaatataccaattgaaatgctcatccgacttgcaaactattataatacaagcattgattatctggttggccgtaccgataacaaaaagctgtatcactaaaaaacatgcattgtatgcttcccggaagctgatccagctcccaggcacacacaatgcatgttttgttttagttttatggaacaattattctacaccattccagcaataagtgcacagcttacatggctcaatatcaatggatgcttccagatcatccagacgatggtacttcagggaagtgaaattcagttctttacgaatctcttccagcatttccttatagttctgtgaatccggatttgcataatctgcaagtactttcggatccacatgatccccttctctttttgccacgatccgccttgtgatcagatccatttctgatttggatctggagaaattcagatacttgcagccataaagcagtggcggacatgcaggacggatatgcacctctcttgccccattattataaagaaattctgtagtttcacgaagctgtgtaccacgaacgatggaatcatcaatcatcagcaggcttttccctttgatcagcttatgtacagggatcagtttcatcctggcgatcagattacgctggctttgctgagtaggcataaaagaacggggccaggttggtgtgtatttaataaatggtcgtgcaaaaggcactccggaacgattggcatatccaatggcatgggcaatacctgaatccggcacacctgctacaatatccggtgaaatctcccctgcatctctgcctgccagaatgtctccgcatttgtaccgcatttcttctacattgactccttcataggtagaagttggatacccataatatacccagaggaaagagcagatgcgcattttatcccctggcttttgcagcacttccaccccttcaggtgtaaggaaatctacctcgcccgggcctaattccttataatcttcataacccagattaatgtacgcatggctttcaaaagaagcacagcaggctccttctttcctgccgatcactaaaggtgtccttcccagacggtcacgggctgcatacagtccttccggtgtcaggatcagcatagtcatagatccctggatcacttcctgtgcatagcggatcccgtccaggatactgcccttctgattaatcagagctgccaccatttccgtaggatttacgctgcctccgctcatctcaaggaaatgtgagcatccgtttttgaaacagttctgtaccagttcctccagattgttgatcttaccaactgtggtgatggcaaaattccccaggtgggaacgtacaagcaaaggctgaggctcattatcagaaatacagccgattcctacatttccgtgcagttcctccacatcccgatcaaactttgtcctgaatggtgaattctcgatattatggattgccctgttaaagccttcttccctatcataaacagccattccacctctgcgcgttcccagatgtgaatgataatcgattccgaaaaacaaatccattacacaactgttttttgaaactactccaaaaattccacccattttttcgattctcctctgtttttatttgccctgatggacttttatatagaaatcaatgcctgatcctttaatggttcagtcactttttctctttgataatacctctcctgtaggcttccagaagccattttaattcactgatccgctccttcagtgcctttccattgtctgtatccccaaccaggcgccgtctggaagtataatgaactgccacacggtttgaaacaatgtcctgttctctgatcactgcatcctctgcagaagtaaaaggctcatgggcagtcagtgccagaccataggaattatagatcagggtatatccggcgatccccgtaactttccgataagctttggaaaaaccgccatcgatcacgatcaccttcccaccacacttcacaggattctctccctctagctgatgcacaggtacatggccgttaatgatcctgccctctgctccgtccaatccaaattcttccaaaatatgatcaactactttttcattctcaagaaggcggtaataagcatttttattctcctgatgagttcccggatcttctatatagtaccgttcaaaagtagtcatcttatcttttccgaaaagcggtgaattaggtgctgcccagatgtaccacagtatatccctgcttttttccagttccttatcgtccaattcataaaaagcccgtcttgcataggattccagggtatcataaagggcttttcctttgtatatgttcccatagatctgtacttccttaaaggatccgtcttcatttaatggaatgcttccatgaaacagcagattcccattatataccctataaagccctcctttgtcaagaagaaaacgcatatgctgttgaagctttgcacaattaacaaaaccggaagtaagccgttccatcactgtttgttcttctttagtaagctgataaggatgtgtccagtccacagtgggaaaacaattatccaaaagtggatattcttttccgtcaggaagtgtaatcgttcctttttccggatggattcgatgaagcaggaggcgatcctccatatcaaagtccggatggttcatgatcagctgcccctccagcttaaactggatcactgcaatggccttatgcattttccggctatattctttttccattgcattgtaattagatggactggaaatccctgaaaaagctatgcagggatcatccctgtatgcttccattgcaaaggctgccagcggcatcatgttaatcccatagccatcctccaaaatatccagattgccatatcggacactattacgtatcacagtggcaatacatgcctgctgtcctgcagcagctcccatccatactacatcatggttcccccactggatatccagggaatggtaggacatcaatcggtccataatgaaatgggggccaggtcctctgtcataaatatctccaaggatatgcaaatgatccactaccagcctttggatcagttcgcacaaagcaataataaagttctctgccctgccgatctgaatgatggtttctacaatcgcatcataataggcttccttgtccagaacctctgccttttcagtgatcagttcttcaatcacataagcaaaatctgcaggaagggcttttcttactttggatcttgtatatttggaggctgttgttttacatacctcgatcagacggtataaagtgatcttataccagttttccatatcctcttcctgtttttttaccagttcaatcttctctttcggataataaatcagcgttgccagtgatcgtttatcctgattgcttagggtatggccaaacacgtcatccaccttcttacggactgcccctgagccatttctcagcacatgggaaaaagcctgatattccccatgaatatcagaaagaaaatgctctgtacctttcggcaggttcagaatagactgaagattgatgatctctgtggatgcctttccaatcgttggataaagttctgcaagccgctgcagatagcgcaattcttctgtggtcatagtccctccctacaccgcattttttgagaaatcaaacagtgaaatctggttagactgaggaatatccccaaataaccccagatcgtccatcagatcgatcactgtcttgcttaccttcgtcctgtcacggaaatcatcctttgacaggaactttccttttgctgctgcttctacaacagcgtctgctgccttgtcccccaaaccgtcaatggtatccagcgcaggcatcagcttctgatccatgatctgaaacctgtgggcctttgccttgtaaaggtctataggcacaaagtcaaaccctcttgcatacatctcctgtacgatcctcatatccttcagggttgcctgctccttctgggtagccagatcccctttcttacggatctctgccatatagtattccagtctttctttacccatacacatcagttcataggaaaatgatgtggcacggatactgaagtaagctgcatagtaagccagtggctggaaaaccttaaaccaggcaatacggtaagccatcataacgtaggctgctgcatgggcttttgggaacatgtacttaatctttttacaggaccagatataccagtccggaaccccgtgctctttcatggttgtgatccattcatcacgcaggccttttcctttacgtacactttccatgatggtaaatgccagaccgctttccacaccctgtccgatcagatagatcataatatcatccctggtacagatagcagtggaaatagtggcctttccttcttcgatcaaggtctgtgcattgccaagccacacatccgttccgtgagatagtcctgcaatacggacaagatcagagaaatactttggttttgtatcaatcagcatctgcatggcaaagtctgtaccaaactcaggaatacccagacatcccagcttacagcctccgatatcctctggcttgatcttcaatgcctctgtgctggcaaacaaagacatcactgccttgtcatccagcggaaccttcctggcagaaagacctgtcagatcctccagcatacggatcatggtaggatcatcatgccccagtatatccagcttcagaagattaccgtcaatagagtgataatcaaaatgagtggtgataaaaccactgctggaatcatttgccgggtactgtacaggtgtaaatttctcaatctcctcgccttttggaagaacaatgatccctccaggatgctgtcctgtggtacggcgtactccggtacagccctgcacgatcctattgatctcacagtaccgcttatgctggcctcgctcttcaaaataattctttacataaccaaacgctgttttatcagccagggtaccaatggtgccggccttaaaggtctggccttttccaaaaatcacctctgtatatttatgtgcatttgtctgatattcaccggaaaagttcaggtcaatatccggctccttgtctcccttgaatccaaggaatgtttcaaatggaatatcaaaaccctgttttgtcatctttgtaccacacttaggacagatccggtccggcatgtcacagcctgccattccggcaaattccttgatttcaggagaatcaaaatcactgtatttgcattccggattagggcacaggtaatggggaggcagaggattgacctctgtgataccggacatagtggctgcaagcgaggagccaaccgatccacgggaaccaaccagatacccatcctcattggacttccataccagtttctgtgcaatgatatacatcaccgcatatccattggaaataatagaatgcagttctttctccagccgatcctccacaatggccggcagcgtttccccgtacatttcgtgagctttcttgaaacatatatccttcagatccctgtcggaattttcaataacaggcggaaatttatccggatggataggagaaattttctcaatcatgtctgcgatcttattggtgttggtgattaccacctcttctgccttttcgctgccaagataagaaaattcttccagcatttcctctgtagtacgaaggtacagaggtgcctgattgtctgcgtccttaaagccattgccagccatgatgatccgtctgtagatctcatcctgaggatccataaaatgcacatcacaggtagccactaccggcttattaaactgctctcccagcttaacgatcttcttattgatctggatcaagtcttccttagagtggatggtatcattcttctcatcctcgatcataaaccagttatttcccaaaggctggatttccagataatcataaaaattcacaagtcttgcaatctccggctccggtgcattccgaagcaatgcctggtaaagctcaccggcctcgcaggcgcttccaatgagcagtccatccctgtgtgcttcaaatacacttttgggaactcttggcttatggttaaaatatttgatatgggactggcttaccagcttgtacagattgatcctgcctgtttcattacgcataaagatcacggcatgataagtgggcagctttttgatggtgtctgtagaaacctttccttgttcattcaactgatccacatcaaaaatatctctttctctgcacatttccacaaatttctcgaaaatacgtgccgtacactctgcatcatccactgctctgtggtgatgatccagagacacgccagctgcctttgccacagtatccagcttgaaacggttcaaggcaggaagaaggaacctggccatgccaactgtatccacataagtaaaatcatgggctattcccagccggttgcagttttcaataataaagctcatatcaaaatcagcattatgggctaccatggtagctccctcacaaaattccagaaattttggcaaaacttcctggatctttggtgcttccataaccattgcatcattaatactggtaagctgctcgatacgaaatgggataggcacctccggatttacaaaggtggaaaaacggtctgtgatctttcctccttctaccagcactgcaccgatctctatgattctgcaggtaagaggtgaaaatccggtagtctctatatcaaaaacaacaaaacgtccatccagagtctgaccctttggatttgtaaccatacctttcaagtcatctaccagataggcctccatgccatacaatactttaaaatccgagtccttgggtacgcatccgccccagctgtcaaaacaatgatttgcttcaggaaatgcctgcactacaccatgatccgtaatggcaatcgccgggtgtccccattcatatgcccgtttcaccagtgccttggcctcggtaacaccgtccatatcactcatcttggtatgacaatgcagttccacccttttctgtggtgctgtatccatccttgtgctgcggaaatctccaatcttcttgatcccacttacagaaccaatggtcagctcactgtcaaaacggtcaatggtggtaacacctttcagcttaataaaggctccctttttcaaatgctctgttacttccggcacctgttcatttcgcaggaacatttttacagtgatggagtctgtaaaatccgtcacagggaagatcagaatggtcttttcatttcggatctctcttgcctccacatccattacctgaccacgaatggtcacctctcccacaacttccacaatggattccagaggaacaggatcattctccacatcccttccatagataacatccggatttggatccttgcgatagcttccacggtcgccccatttaccttttttctcaaatggcttcttctccttaggagcctgcacggttttgccttttgttgtttcaccggatgcggtctcttcctggccggaatcagctgtctgtttcttttcctggctttcgctttttgttttctcatcatccagcttggcatggcgaagcacattctccacctcctgctggatctgcagggctgcgtttttacggtatttgctttctcctgtctcaataaaatcaatgtctgctttcaggttcataccacaccgttcgcagaaaaccttatgaaaatactccagcaggatctcacttttttccctggcgatcacagaatccggcagctgcagctgcatcgtttccgcttccggaaaggtgatctgtgcccgcttgaacagattgtattccagcatattataatttttaagctcaagctccatgctggaacggtaaacctccataaaattctcaggagtgtactgctctgacaaatagaaccgttcgatcaaagtaacacccatgacgatccctgggaagcactgtctctggatctgctcttccaactcaaaaatatgtttcttatggatccagcggctgcttttaatgtatactcgcagctgtgtctttccagcattacaggatacctttgtgactattacatcctcaagcagcgcctgaagctctgtctttaatttcagtcctggaaatacatcaaaaaaagacttttccattattcactccaattcattagctcttcccgaagaacagccagaagctggtcctccggtatcttacgtacaacttctccttttttgatcaggagtccaactccatctccgcctgcaataccgatatctgcttccttggcctctccagggccatttaccacacagcccataactgctactttaatatccagtggaatatcctgaaccatagtctctacctggttggcaagaccgatcaaatcgatcctggtacgtccgcaggtaggacatgatactacttccaccccgccttttctaagacccagcgtcttcaggatacgctttgccgacttcacttcttctaaaggtgctcctgtgagagatacacgtatcgtatctcctataccctgatataaaatgatcccaagtccgatggctgacttgatatttcccgaataaagagtacctgcctctgtgatccccacatgcaaaggatatctggtcttttgtacgatcagctcatgagccctggcgcacatctgtacatctgatgacttaatactgatcaccagattgtcatatccaagatcttctatgatatgcaccttatccagtgcgctttccacaagcccctctgctgtcaccccgtggtatttctctaccagatccttttccagggaaccactgtttacgcctacacggatggggatattcctctcttttgccacatctactactgctttgatcctctggatgcttccaatatttcccgggttgatccggatcttatcagcaccgctttccatagctgcaatggccagtctgtaatcaaaatggatatctgccaccaacgggatatggatctgttttttgatctcctttaatgccagtgcagcttccatggtaggtacagcacaacggataatatcacatcctgctttttccagggcaaggatctgtgctgtggttgcctgtacatcttctgtcttggtattggtcatggactggatcagtataggatttcctccaccgatcttcctgttcccaatctgtattacttttgtatgctctctatatgtgctcatttttatctgcctttctgaacaaagcggacaagtccgcttcaaactcccaggacctctcaatttttgaggaacctgttacgctttgtgcgtccagaaaggggctgctgcatatatgtgccacaacccctttccggataatgaatgattacttacggatctccaaaagcttgctcttaagctctgcttccatacgctgcatctcaacctctgcctgctgacgcttgatcctgccttctttctggatcctcatcacatcatccagagtctggatcagatctgcatttgttttctttaatgtttctatatcaacgatcccgcgctcagattcttttgctgtctccacagatgccatatgaagggcttccgcattcttcttcaaaagctcattggtcaggtctgtcactttccgctgtgcatttgctgcttctgtagaatgggcaataccaagtgccagcaccatctggctcttccataagggaatggtatttacaatggtagtctgtatcttctcaaccatagtggtatcgttattttgtaccagacggatctgtggtgcagtctgcattgaaatggttcttgtaagctccaggtcatgcagcttcttctcaaaccggttacatttactatccaaatcctttgcttcctgggcatcctgggcagatccgctgatctgagccttggtttccagctgtgacagccggccgttccgcacttcctccagcttcttcttacctgccaggatatacatggtaagctctttataatagttcaggttctgctgatacatcttatccagcatagcagaatccttcataagacggatctggtgctcctggagggaatcaacgatcttctgtacattcacctctgccttagcataacggttcttcattgcctcaatcttattgctctgtttcttgaaaaagccgaaaatccctttctcctcagtggcgtcaaaatcacgcagttctcctactacctctgcgatcagatctcctgcttctcccagctcctgggtctttacatttgcaagggctgcatctgaaaaatccgccatcttcttctgggtacctgcaccatactgaaggatctggttggtattctcaatatcgatcctggctgcaaaatcagccaccagcttttgttcttccggtgtaagaatcgtctcctccatctctttctttactgcagcttctgcaggctctttctcctctttcggtgtctcttcctgtccgaaatccggctccagtgtcagtgttggtgcttctgtttcaaaatctttaaaatctttttccattacgttctcctctttccttttactttttgaatgccttgtatatctccgacttccggcaaaaaacataccaaaactcttggtcggatactacctgccagataattacagtgcatcttttttccgcatctttgtaaattcatcctctgtcaggccttcctgtgccaacaccgtatgtaatacggaaatatcactggacacatccatggctgtatcttcaaaaatagaatccaacagcttctcaaaagctgtattcagggtatcaatagtcttctcgatctcaaacttggagttctggatattctctccctggacaggctggctgtccatatcctcatatgcatccagcagcttcactgtggtaggaagataataatccatcatccttttcagatctgggatcacctccggatgttcctgcacccgctcaaagatcttgcggacgatcagttccatacgggagatcttggctgatatttcttctcctgggatagcatcattactcctgtggatcttgtcaataaacttattcccccgatcaagcacctcctgcacctgggcgcttactgccccggctgacgccttcttctcttcttccttccgtgctgaagctgcccgctcttcaagagcctgctgggtctgtatatactgctgataagtttcatcgctagtgatcagacaagtctgctgctgatccacatgaccttccaggaaccatcctttaccgatcatcttcttaatgtctttttttacgtattttacaggcttgcctgcgatcctggccagctggtcaaaattgcagtatgttctctgaccaagggcacggatatacttgttgaaacgtccaaccctgccgatccggctacatccttccttaagaagcactacaccagctgcggtaaaggcaccaagggtcactgcagtgctcatcgtaactgctgctcctgctgctgccgcaatttctgctacaagaaaagcaacaccaaagccggcagtaaaaacaccgccgaaaacagtcatcaggatccctttggcgcgctcacccccggtcttcctgtaaagccctggcatggataagccatatccgctttgtttgtgcattctcggtgggatcccctgagatctgccaaaaggcggctgctggtatccatggtctttatgcgtctcataggctctggcattatgctccgggttctcatttgtccggtaatcctgcgtctgactgcctccgaaagcaccgttcagtacaccctttaatgcctcgctgccggaatcaatagccttatttactgtctgattaatattcctgctgagctttcggtaatcctgctcgttcactgcactgttaataatgtcctggatctttgcgcccagatcatcccactcctgatgttccatgtattcctccaatcaggctttcctgtttctccacgttgcctgtatgattttcattatagcgaaatcaataaaaaaaaacaagagagcgaacatgaaattacagttttgctattgaatttgacacgtaaaagttttacaatgtgaaagaataaacacagtatcattcttttaatgaaagacaaaggcagggaactgtgaatttgtattaagaggaggctctttggttatggaaaaaaagaacatcgactggggcaatcttggcttcggttatgtaaaaaccgattatcgttatgtatctaactttaaaaacggcgcatgggatgagggtggtctgatcacagatgatactgtcaccatcagcgaatgtgcaggtgtacttcagtatgcacagactgtttttgaaggtatgaaagcttatactacagaagacggccatatcgttactttccgtcctgacttaaacggagaacgtatggagaattccgccagaagactggaaatgccggttttcccaaaagaccgttttgtaaaggctgttgttgagacgatcaaagccaatgctgcttatgttccgccttatggttcaggcgctactttatatgtacgtccttatatgttcggttccaacgcagtgatcggtgtaaagccggctgacgaatatcagttccgtgtattcaccacacctgttggtccatacttcaagggcggtgcaaagcctatcaccatccgtgtcagtgattttgaccgtgctgcaccatgcggtacaggccatatcaaagcaggactgaactatgcaatgagcttacatgccattgtagatgcccacaaacaaggatttgatgagaatatgtacctggattccaaaacacgtaccaaggttgaggagaccggcggagcaaactttatctttgtcacaaaagacggaaaggtagttactcctaagtctgacagcattcttccttccatcacacgccgttccctgatctatgttgcacagcattatcttggactggaagcagaagaaagagagatttactttgatgaagtgaaagatttcgcagaatgtggtctttgcggtactgctgcagtgatctctcctgtaggaaaaatcgtagaccatggcaaagagatctgcttcccaagcggaatggaaaaaatgggacctgttacccagaaactgtatgaaacactgacaggtatccagatgggccggatcgaagctccagaaggctggatccaggtgatcgaataagcccatatataattccaatatatgcatacaaaaaggagccgtacggctccttttttgctggttttatttacatctttcgtaacggacaaaacgatattccagatcaaagtatgtctgctcttcgctttctgctgccacctgccactggggcatctcgtccagattgggaaaatacctgtctgcttcataagcaaagtcaatcttcgtcacctgagcagtatcacaatatggcagaagcattttgtatacactgtcaccgccgatgcagtaaacctgatcctttggatatttctttatttcctccagaagctcctgaaggctgtgcacaacaatagcaccttttacctgataatccggatttccggaaaggacaatattagtacggttctttaatggcagtcctccaggaaagctttccagagtcttccttcccattacaactaccttgccggaagtctccgtacggaacattttcatgtctgccggaatactgaccagaagatcattattctttcctattccccagtttttatctactgcaacaatcattttcatgataacttttcctcctgtgataattattatatggcaatcggtatattcttgatctgcggccaggtctgataattctccacgatcaggtcatctgtagtaaaatcataaaaatctttgatctcaggattcagtttaactgtaggcgccggatatggagtcctggcgatcagttccttaactacaggaatatgccgatcataaatatgacagtcagcgatcacatgtaccaattctcctgcctccatatcacatacctgagcgatcatcatcagcaaaatagaatactggcatacattccagttattggcagccagaatatcctgggatctctgattcagcactgcattcagagtgagcctgtccttgcctggctccttggtcacattaaaggtcatggaataagcacatggatatagattcatctcatgaagatcctggtgtacataaatattggtcatgatcctgcggctgtaaggattattcttaagatcatacagtacacgatctacctgatccatcatcccctctttgtactggtgcttcacacccagctgataaccataagccttgccaatggatccgttctcatctgcccaactgtcccagatatggctgtgaagatccttaatattattagatttcttctgccagatccacaggatttcatccatagcacttttcagtgcagtcttacgaagggtcagtgcagggaattccctgcgaagatcgtaccggttcactacgccaaatcgtttaatagtgtaagcggacgtaccgtcttcccatacaggacgtaccttttccccttctgtgctggtaccattctggatcacatcctgacacatctttataaacacttcatctgcataactcatcttcatatacctccagatcctctgcttatgtcacacatatcattcatttaagcctggtatcattatataaaaaaaggcggtacagttcaacataattctttacatctgatttatcaggtgttatattaatagccatgaaaaagctgatgattactttactgaagcccctttcttttcttccggcgatcctaatgatgtatgtaatctattctttctccgcccagaccggggaggtgtccgggcaattaagctacaagatttcatacaagatcgttgaaacaaagaatcagcttctgaatgagaacaaaagcagtgcagagcttgccgtttctgcagatactatccatttttatgtacgtaaggcaggtcatatgaccgaatatttcctacttgctgtagccatctccttcccgctttacgtttacggtgtgcgtgggatctggctggtgatcctggcaggcattatatgcgtaggctttgcaggcctggatgaataccaccaatcctttgtggctgaccgtggtccttccctgcgggatgtagggatcgacagcataggcgcattgattggaatcctgatggtgcaggctttttgctggtcaaccctgcacaatccccaaaaaagaacatagcccaaatgcaaagatgctgtatctttacagtccccaaaggttctgtaaagatacagcatcttttttacttccaggattccggatggcatccagggcagagtatgtctgcctttgttcttccggtcattcttcagtcttttcctgttcctgctcttctggctgtgcttcagtttctgcctcttcattcagatctttcaccagattggctctgtctgaaatggattttttggcatttcctgctgcagcagcttcttttgcaagacgggccttttcttcggcttcttttgcacgcttttctttgtcatctttgatcacgtttttaccgccgtagaaaagcatacctgccccgatcaccaggaatgcaatacctgcaaccataaagtaccaggcacccccatctacgccatcaatgacatttttacacaacttgtagcctgtataaagcaggtatatacctgccagacacatcagcatacagcttcgcacaggcagaccactttgattctggttttcttcgcctgtattttggttttcctcttttcttggttcttccaatcctttatcctcctttatttatgacacagcgaactgactttcatacagacctgcatagaatcctccctttgcaagcagttcttcatgtctgccctgctcaatgatgtttccatctttcattacaaggatcctgtctgcttcctgtatggtggacagacggtgtgcaacaataaaacttgttcttccttccatcagttctgcaaaagcctgctggacctttatctctgtacgcgtatcgatagatgaggtagcctcatccaggatcagcatagtaggacgcatcaacatgacgcgggcaatgcacagaagctgcttctgtccctgagaaatattaccaccatcttctgtgatcacagtatcgtacccctggggcatacgcttaataaaactatgggcatgggcatgctttgcagcttggatcacttcctccatagatgcatccggcttaccatatgcaatattctcacgaatcgtacctgcttttaaccaggtctcctgaagtaccataccaaaattcctgcgaaggctgtctctggtaagttctcttataggatggccgcttactacgatctgtcctttgtccacatcataaaatctcataagaagattgatcatcgtagtctttccacatccggtaggtcctacaatggcaatcctctgtcctggctttacatcaatggaaatattctgaagaagcggaacttcttttctgtaggaaaaagaaacattctccacatttacacttccatctgctttttccaattctacagcgtcagccacatctggctcctgtgccggtgtatcaataaaatcaaaaatcctttttgcacaggcaagagcattttccagctctgttaccacacctgaaatctcattaaaaggctttgtgtactgattggcataattcaggaagctggtcagctgtcccacactcataccaccacgcataaccacaaaagctccaaaaatccctacgctggtgtataccaggccatttacaaaacgggtagatggatttgtaatggatgaaaagaaaatagccttgatcccacatacacgaagttcttcatttacttttccaaaacgttccctggcacgctcctcgtaggaaaaagcctgtaccaccttctggttccccacaagttcttccacaagggaggtcatctcagcccgcttctcagactgctctttaaacatctgaaaggtcctgcctgcaataaagctggcaacaaataaagaaaccggtgtaagcaaaataacaatcaaagaaatcttcacactgatggacatcataaaaccaatggttcctaaaatggtgatcacacctgtaaaaaactgggtaaagcccataagaagaccatcggaaaactgacttacatctgcaacgatcctgcttaaaatatcaccaggctggttgctgtcaatataggaaaccggcacctcctgcaaatgggaaaatgcctggctgcggatatcctgtaccactccataggttacctggtttgtaagaagattcatgatccactgagtgacagccgttccaagtacaaccattgccaaagtaccaaggatcctgagcaatgcttttgttttgatattcccgggcccgataatggtatcaactccctcaccgatcagaataggtgtatacagggtaaaagccactgtaaaaagagccatgagaagcatcaggatgatctttcctttgtaaggactgataaacttcagcacccttctcattgtatctttgttctttcccattatcggttcacctcctgttctgataactgtgacagacagatctctcggtaaacctgacaggattccatcaattctttgtgcgttcctacaccagccaatgctccatcatccagcaccaggatcttgtcagcctgtttgatggatgttgctctctgtgaaacaataaatactgtcatcccctttgtctgctcatgaattgcatgacgaagggctgcatctgtggcaaaatcaagagcagaggcactgtcgtccataaccaggatctcaggcttccctacaagggcacgggcaatcgtcagcctctgcctctggcctccggaaaggttggcaccaccctggctgatcatggtatccaatttttcaggcttactatctacaaaatcctttgcctgggcaatagaaagagccagatcgatctgctggtctgttgcgtctgctttgccccatttcatattatcacggatggttcctttaaacaacactgcatgctgaggaaccattcctacctttgtgcgaagctgtgcaaaaggatatgactttacagaattaccatcgatcaggatttctccctgtgttacatcataaaatctgggaatcagattcacaagggtagactttccacagcctgtaccgccaatgatacctatggtttccccaggctttgctgtaaaggaaatccctgttaacgctggtacctgactgccggcataggtaaaggtcacattgcgaaactcaacccttgctgtatctgccttatccttctgtacactggtgccctcatctgtaagcgtagaccgggtatccagcacctcattaatacgtacagcagaagccatggcctttgtcactgcaacgatcagattggctagtgcgatcagtgcgatcaggatctggttcatgtaatttacaagagccactacctcaccctgactgataatcccgtttcctacttcgatcccaccgtaccacaaaatagcaataatcgcaaaattcatgatcacagttgttgccggattcagaagtgcggaaatctttcctgcacggatctgaatggctgtatactggtcatttacttctgagaaatctttgttttcttcatgctgtcgtccaaaggcacgaactaccctggcacctacatgattctccctggtgatcagcgaaatccggtccaggaaagcctgtgcctttttataaataggtaccgtccatttcatgatcaggtagatcacaatggagatcacaggtactgcgatcagaaaaataaccccaatccttacattaatagtaaaggacatgatcactgctcccaccacaataaaaggtgagcgcaggaacagacgcagaaccatatttacaccagtctgtgcctgattaatatcactggtgatcctggttacaagcgtaggtgtaccaagccggtcaagttcccggtatgaaaggctgctgatatgggaaaacatctccctgcgaagagccgtactaaaacctgtggctgcctttgcagcaaaatactgtgctgtaagtgcacacacaagtccgatcatgcctaacagcaccatgatcacgcactgatgccaaatataggcagaatctctattcttgatccctatgtccatgatcccggccaccaccaacggaacaatcagttcaaaggtagcttccagcatcttaaacaaaggagccagaaaagtttccttcccatagcctttcaaaaaccgtattaatttcttcattcttttttattgctcctggattcttccataaatttttgtcatccggcgcatacgtttgatggtctcttcatcaaactgaccttttgtcagtctccatttccagttgttgcctaaagtagatggagtattcatccttgcttcattgcccaggcaaagataatcctgtaccggaatcaccgccagatctgccacacaggacatagcttcacggatcatcccccatacacactcatcggcacttttccctttgcatcctgtatattccctggcaaaagctgcatcatgacgacttaagtcacggtaccagccctttgtagtctcattatcatgagtacctgtatacaccacacaattatgatcatacttataagtaagataatcgctattctcacttttgtcaaatgcaaattgtaaaaccttcatgccgggaaaaccggatttcttcaacatctgaagaacggtatctgtcaggtatcccagatcctctgcgatcacattcagatgacggatgtttttcctgaggactttaaacagttccagtccaggaccctgctcccactttccgaattctgcggtagaatcaccatatggaatcgcataatattcatcaaagccacggaaatgatcaatcctgaccatatcataaatttccatacaatggctcattctctggatccaccactgatatcctgtctctttatgataaccccagttataaagaggatttccccacaactgacctgttgcggaaaaagcatccggtggacagccagctaccgctaccggctgattctcttcatcaaactggaacagcaatggattggcccatgcatctgccccatcaaaggctacatagattggcagatctccgatgatctctacgccctttttgttggcataagtcttcagtgcactccactgtttgtaaaaccagtactgctggaaacggtagaactggatctcatctgccagacgctcctttgcctgctccatggcctgcggatcacgtacctttaactcccttggccattcattccagccaatattgtcctgcttatttttaatagccatataaagacagtagtcctcaagccaaaagctatgcttctttacaaattcctggaaatctgcgtcttcttcacagttatatttctcgtatgcttttctcagcagacgaaaacgagaattgtacatcttttcataatctacgtaactttcacttccgccccagtcgcagctgctgcattcctcttctgtaagaagtccaagagagataaatgcttcaagatctataaaataaggatttcctgcaaatgtggaaaaggcctgatatggggaatctccatatccggtaggtcccaacggcaggatctgccagtatttctgtcctccttttacaatctggtctacaaattcataagcttcttttgaaaagcatccgatcccgtaatcggatggaatgctggatatcggaagtaatactccactggctctcatttgttgttcctcctgtttattaaaattgacataccgattaattataacaatcccatgattgcaggtcaatattgcgatttttaactttatgtaagaaatccatgaaactggggaacatgacaaatgcaggcagagggaaacctatcctctgcctgtgaccataccagctcgccctgcctgtcatcactggatgcttttttaccacagcttaccagaaaagctacacataccagcacaagaagcaggatccatccttttttcttcatctgttttccccttttggattgtttctataccttcattattggcaaacagatgtttctttattcattttaaaaaaagtttctttttgatatatacggaaatatcgtggtaaactttttcttttcctttttcattaaggatctcatgacgcattcccggatatatttttccttttacatccagatacccggcgtgacgcatagcctgcacggattttgcaaaatgacgcacattgaccatacaaggatcatcccctccgctgataaacagtactggcattttaggctttctgcattcccaatgttttacatcgtaagcccgtttcattagttcaaataaagtaataaaaccatcatctgtaaaggtaaaaccgcagtagtctgactggtgataagcatcacatacttccttgtctgagcagatccagtccttacactgctcatctttcaggaattttgcataataagaagcaaaggacattgtctctaaaagcttgcttttatgatccatcccacaaagcttcccctctgcttttgctatggctgtgcctaatggcctggctgcatttttacttggagagccacatacgatcagcatatccatacaatcatcatgctctcttgtgtaagcacgtactgccagtgatcccatactgtgccccatcaggatcaggggcagatccggaaatctttctcttagtccctggttcacagtatgaatgtctgacaaaagtgcatctgcaccgccaccatacatatgccccaggtcttcttttctccgcacacttttcccatggcctctgtgatcatggatgatcgtcaaaaagccttgccgtgtcatgtattccataaatggaagatatcgttctttgtgttcggccatgccatggaccagctgcaggattcctttgtaagggtgtgcattcggaatcaaagcaagtaccgagatctccagcccgtctgcctgggaataaaagcttccttcatattttttgctcatgttcttcccctttctgcgccttgtgtagatattaattattataaaggtgctgcgttgccattgtcaacggattctggtataatggggcggcagggatacagtaaagtaacgattggcaagtgttacgttgagttatcgagacgtgtgtaataataaaataataatgcagaaaagatatgtcttatatatcagggcttcgttttcggatttctcccgtgcgcttattatctctgtcatttgccaaactcacgcctacggcgttcagacacggcaaataacagagaagctagcccggtcgaaatctgcgaaagcctcgcatgatatataatccatatgcttttctgcttataccaaacactactctgtatcaaatgttcagtttgccaatggttattttactgtatctgtggtatgatttgttgactgtgtaaattttatcaggaggtattatggacgataataaatacgatgagcagttaggtgatatggctgaggaggacaatatcgtcccggatattgaaaacaatgagaacaccccagatattgaagataacgagaacaccccagaggttaaagataacgagaacaccccagaggttgaagatgacgattacaccccagaggttaaagataacgagaacaccccagaggttgaagatgacgattacaccccagaggttgtggatgatgataacaccccggatgttgaagatgagactaaagaagctgacgccgaggataagggtgtaacggttgatgagccagttttatcggggcgaaagcgcaagaaaaagaagcgtactggtctgattttgtttttgctggttctgattctggcagctggcggggctgtcggttattatatgtatctgcgcactcagcctcaggaggctgtggaggaatatctgtcagctgttcaaaggcttgattttaccgcaatggagggtatgctgcagagcaatgacctttctgtactggatgatgctgatctgagaaatgaagcttatacggagtttttcaaaagcattaatgagaagatgactttcaagatcatccgtaatgatttcagcctgaataacggtactgcccggatcacagctcgtattcagtatattgacggcactgagatttataaggaaaccgtcatcgagtttcttcgtcagattgcttctaaggctctttccggcgaaagtcccactcaggaagatgctcagactcagcttgcttccatcctttgtgaaaaagtaaaaaccacaacaccggtttacagcgaaacagatattctttatccggtgatcaaaacggatgatacctggaagattgtttccctggatgatgcaacggtaaagcttatgtctgccaatgttaaaaatatagaaaatgagatcaaccagactctggacggctcagcgcaaaatacgtcagatgatcctgctgcttccggtaccgatggcagccagacagcttctattgacatgacaactactaatttccagatccgttataccagacatcagacaacaaatgattatgcaggaaatccctgcctgcttgtttactatgattacacaaacttgagttctgtaccttccagtgcaatggttgatgtttctcttagcgcttaccagaatgacactgttttgtccgctgctattccggataccaatgatgatgccattgaccattatatggctgagatccagcctggtgaaacggttagtgtgtgccaggctttttccctgaatgataccagtgatgttactctggttgccggagaaggtttaagcttcggcggcggtgctactacttcccaggttctaaagttgcaataattcaagtcgagcagctgttactcaccacctgaaagaggtgggagtcttctcgactgagataaaaagctgtggcttatctgattttttgagcaatatcagatcggtcacagctttttattctgtatgatattcttttagtttttttctgcaatttctgtagtctgggcagtatttttccacttcttcccaaaattgccgtgaatggtccatatgccgcctgtgggccagttcatggataactacatagtccagaagctcttccggcaggtaatacaataaataattaaaattcacattccctttagagctacagcttccccatcttgttttctgattgcggatggtgacctttcccacctgtacattcataattctgcagtaatattctactctctttgcaattttttccacaatatttttcttgtctgctgctgtcaggctggtaactggcggggccggcactttttcccctgaatctgtatttcttgtttccccatattttttaaagatccattcttcatgttcttttacaaagtgaaccagtttaggatctgacaaactgtagggaatccgcgcatatatattgcctgtctgtttcacttccaggccaatggtctttcgaccggaacgtactacctgaaccttcagtttttcattttgattttggatatatatttctgtaagcacgtttcctcctgtatatttctgtacatagtttcaccgagatccgggaatactgagagcaggaacgagtaaacctgcctcgttacagaaaggatggtatttatgggtaataaatttatgcaatatttttctctgactttagtagtgatcggtgccattaactggggattgatcggattctttgacattaacctggtggcattgctgtttggaagcatgtcctggctttccaggatcgtatatgcattggtaggcctttgcggcctgtatctgctgaacttctacagcttggttgccacagaaggccaggaaggttgaaataagtaatagattcaagtcgagcatcacttataaaatctgccatacaattcaaaaatgcatctacaggattccaattttcaaagactgaatcctgcagatgcgttttttcttgtagtaatctttgtttcaaagtataactatcaagtctaatcaaacggatattctgcaattcctttcgctacttgctcataataacaagaacagggcagaaattcaactactactctgttttctaccctgctcaaatgcttatttatacattaccaaacagattctatacttttcaaatacaacttcgccatcagatgatgtggatccagttgcaatgtttctttcaggcactcaactgctttcttagtatttccaagacccatatttccaagacccataaggaaatagcaatgagctttgttttttttggtaaaatcttctttaaaaattaacagatccggatatgatactgcaaagtaatccattttaactttgtcataaatatgtgcctcaccgtagctaatcaatttgtaaaacctggagttcgatgctgccttctctcccagttccaaaagagccataccttggaacattatcatgtctgctggctgatcattgtagaacatcatacctgccggttcagaagtacctgtgctggctttatcaaacaattctttggatttttcaacattaccaagtgccttctccgccagtcccatataataataaatatgattatcttttgttccttccagtttaccttctccaagattttccggataagtaattgctttttccaaaagtgcttttgcactatcataattttcgtttgcgatcgctttttttgccagttctaccaaagaagtggtatattgagttgtaacttttccttccccaccttcccatggatggaacttacgtcccatcaaaagttcatatgccttttcatgatgacctgcaaaattctgcatcgtaatatattcaataaacacatcatctcttttcgcaaacgtttccgaatatttttcataaaatgcaatcctgttttccacagaataaccaagtttcttatataactgatccagttccaggaaaatacgtgcatctgtagtatccagcaaaaaggctttttccaatacttcttttgctttttccggcatgttgctctgattataataaaccagggacaaatttcgtagtactgtcggataagtacaatccagctttgcggaagtctcccatgcatcctgtgcttctccatactgacgcttgtcataccagatatttccgatgtaataatacgcttttgggagctgtggctgtaattttattgctaattccagtaccgcaatatcttccaaactatttggaaaacagcaaaatggatttattttatcagcgataatcacctttttctttgcagcttctgtatttcccatatccatcagacaagcagctctataataatctaacattggccattgtgcaccacacagattcagaataccaagtgcttcttcaaagcatccgctttctctataatcaatggctgcccgaataaagttctgtggaaaattacgcatccgaatcttcaatgtctgctcttttatagctttttcttctccttcggtcagaagaactgcttcataaccggatatatagtcaaatggatctatcttgaagttttccttgatccactgttttgcttcttcgatctttccaagctttcttagaatcgttgccttcaatccgcgtgccttaacattatggcaattctttaccagtcctttttcaacaaactccaatgcctgcaaaaagtcttctttttttgctgaaatagcagcaaggaaatagaaagacatctcctgctgttcattggaccaagtagccttgaagaatgcatcgtaagcctcatcataacgtctttgatagaataatgtcagcccaagaccataataagcttcactattgtaagggttgggatttttccaggtcatacgctccagggctttgcgaaaatacttctcactctctgtcagcaggccacggcggaacagaagcatgccataggcagtatttagacggatatctccttcatcacgtttcagaccttccagataatagtcgtcagggagataggttgcgtggcggtactgttcgatgtgcagtcctgtcagatacagttcttcgcaggtttggatttctttcgggtcttttgctgcttttgcaggctcagggatctttgcaatcttttcttccagtggagtaaattctacaagttctctgccatctgcattgaacacacggacagtaatgtctgtcttattttctactggaaggctgagtttcttctcatatacagctacaggagaaatatctgcgatttcctcgaatacctcttcacccttcttctccagaactattcttgcattcttttccgctcctgttgcataaacacacaaagatatttcatcgttttcaatttccatgtttatcattgcatcaatagtggcgttctttacataacccactttcttgtatggcataaagtactgcttaaatgtcttttcttcaaatggttttaaccaggaaaaatctggctggttgtctgtgtaaacaccggtcatcaactcaatatacggaccatcttcatctgtaagattgcgatcccaggcttttccaaaatcaccgcatccccatgtccactgtttcttaccaggagaaatatgatggtctgctacatgaagaattcctgcttcttctctgtaatcatatcctcctacgaaatcaaagttagatttctctgccatgtaagatgtaggaaccggaatatttttatatctggaaatatccacacctgcactgtagtcatgtttataatatacacccgtagcgattggaaatttagatacatcacgttttccatgatccataacagcatgtacatctggtggaaaaacagattgtgtatagtcgtttacaggtactgccgggttcgcccaccacaggaaagtttgcgccattggtgtacggttgtaaagctgtccgcgaatctcaatatatgctttgtccggatataaagtaaaggatgtgatacctttagttccatacatttgatccacatcgttgaccatcacggtcttgctgccatcctcgtgttctgtcatggtataatctaccggcagatacgtcgttggacggtgatgctgcggccaattaaactcaattcctccggaaatccatggtcctgtcaggccaaccagtgctggtttaatcacatgattataatatacaaaatcataattattggtcttatcataggcccgctgaattcttcctcccagctgtggcaacaccattaccttcaaatattgattttccagatataacgctttccagatcttatcatgtttttcatcttctattgtttcaattactggatacgggtacactctccctgaactaccctgataaactcgtttttctgaaaaaataggattcttctctgccacaccaatttcataagtaggaatgagcacatcttcctcccagatttttactgtttccataggaacctccttatctttgctatacttcgtttcttttataactactgacataacacaaattcgcaatgtaccaataatgcataatacatattcattaataaaaaggatcttcctgtaagattggtattgcatcttgccaaatataagcaaaccaaccaaaagaagatcctctgtcatgaattgcatgtgaaacaaacctgtaggtaaatagtatttacataatccacttattctttaaagattcttttctagagcgaacaagtttattatatttataaatacacgaactcttcaagctatttcaatcatgcatgtttttattatgtaacacttcttatatcgtaggaaattctctgtatacatattccaagtgttgctccaaaagtgacaatgtctgtttgtccggataatttcccggctgccgacatacagcatttttcataatccctctccgctttaaaatgattttttcaagagcaacaaaggattctatatctctttgcataaagtgaatgtggggcaaatatttattaaaaagctcaaaagctttttctttctctccattttcaaatgcatcataaatcatacgatatgggcgaattaatgccgctcccggcattacagcacaggcgccacgaagtagtgcttcatacatgcattcacctccattacctactatgatatcatatttgttattcgttgctgttcttaatgctgtaatcgctggtcctgtaggagatgcttccagcttaatatacaactctccagaatgatgttcactgatttcctcaaatgtctgaagcgaaatcgccattccatttaaagcaggtgcgtactgaataataattggaatttttacattttctgatatttctcttaaatggtttactaacattcccgatgttggtgatgcataactaggtggcataatattcaatgctgccgctccctttttctcatagtaagtagcttctcttattgctaaaacagtagcatgactacttacagttgcaataatcggaacccttcctctatttgcctgaatggctctctggaacagttcttttctttcatccattgttagcttataaaattctgcaccagcagcaaatagacaaattgcatgcgctccatcccttattgctatgtctactatatcttcaaaattgccataatctacatatttaccatcatcagtaaaaggagttggtatgaccggaataacaccttttagttttcccattaaactacctcctgtcaaaaattttaaaatcatgggaaggatatatcatcacaggcttccatgccctgattttttcaaatacagtttcacattctttaccgtttacgcataaacccacaggtatttcctcctgtaagttcttttctgtcattactacatcaccagtaataacgccatatccttcttccatattaacaatcaccatctgagagccatatgtatgcccacctatatattgtatatagattcccggaattatttcctgtgcactttccccttgaattaaatgtactctgtccctgttctttttcagccaggaaaaccactcctccggatattcctccggatgattttccgctcgattccattccttttcatgacaatagtattgggcatttgtaaaacattcagcatttccagcatgatcccaatgaagatgcgtaaaaataactgcctctacttctttcggtttcacagatgcttctttaaaaatatcttccaaggattgactacgttttacacttaactgaagtttttctgcacataccgatggatctccaaagcctgtatctactaccactaaatgtccacaagtttctaaaagaaacattacagagggcacatacccctggttttctggttttccatttctatacttaatatcatctctgaccattccaaaacttccagtcaaaacaggagttattttccaaatctgcttttccttttccacagttctctccttatttaatacaatgggacaaattctcctttattcaccgcatcaatatcattatatgcatatttctttattgtttcttctttcagttctactcccagtccaggtaaatcctgtattagctccacatacccatttttatataaaataggctttatcagaagttcctctctaagaggatttaaagtctggtcatgttccatgataaaggcttctggttcagatgccataaaatgcatgttcgccataaatcctaccccgcttccaaaaatatgcggtgccattctcatatgatgtgctgatgcgattgcagcaattctcttacactcagatattcctcctgagcgcgtcacatctggctgtatcatatccacagcatgtcctgtgatcaaaggtgcaaaaccataccttgtaaattcattttcacctgcaacaatgggaatgcttgtattcgcagttagacgtttaaatccttctacatcatcgggatgaagtggctcttccagccaaaaaaggtcacaattttctagttttttacatacacgatatgctgtatcataagtccaaggaaagttcgtataacattgacctgcatctacaagaagcgctggtttaggtcctactctttttctcaattcctgaattaattcaatatcttcctctggatcttcatttccaattctaaccttaaatccaaaatatccttttgaaatatatccaagagcttcttcagccagagaatcgacagattttgccattcccccactagcatatgccttgaattttgttctatattttccaccaatcaaatcataaacaggtctttgaagtatttttcctataacatcatataaagcaatatcaatgccgctaatgattgttgcaattactcctcgccttccataatgtgcagactgaacatagagttttctccatattttttcaatattaaatggatcttctcccagaatcatctttttaaatcgtgtatttatcatcgtttctattgctctcggaagatacgctgactcaccaatttctccaaggccagtatatttatcatccacggtaatacgtactaacacacaatttctttggagtgtagcaccccctgaccacttccacttttcatcctgttcatatctgtagcataataaaattgtttccacatccgttatcttcattacattccctccacaactactttttcgttaattgcttttacaattgctttatgaagtaagcaaacctttttcgcatcctccattgtggaaatcggttgttttccctctaaaatacatttctcaacaaaccatttcatctcttcattaaacatttcctggtacaaactttgttcatattcaacatccgttttttccataaaatctcttctggaaaaactcatacatcctttatttcctataattttgattttaaatgtccacggttctgacgaacaatcctcggccgcccatgtcacaaaaatttgtacaatcgtaccctgagcatattccaacattaccgaaacctgagcaccatctgtctcattttcctttccctctatacatgtacgaaatgctgttgtccgcattggcatacctaaaaatgccaaacagagatacaattgatgacaaaggacatccgtttctggtcctgtatactttaccgccaattctttcggcatataatacatctctgataaataaacgtatgcaggaactcccagtctttttccttcaagagcacgtttcatccgtattagttctggcaaataaatataactatgtccaggcatacaaaccactttatttttcttggctgctatggacatctcttctatttctctatcagaaaaactcacaggtttttctaccaaaacatgttttcccgcttcaatacctttcatcgcatatatataatgaaactccggaggtgtaagaatgcacaaagcatctacaagagaggattcacagatttcatctcctgacaaaacaggaactcctagtctttctccaagttcttgagcatgtcttccccctgaaactgctgtaatttctgcccattcgcactctttaatcgccaaaatatgattttccgctactcgtccgcaccctatcagacctattttaattttattcttcattttcactccttaactgctcccatagtaaatccctgcaccagatatttttctagatacgtaaataacaataatcctggtaaacatgccagtactgatccggccattatctgtccccaatttacactaccatgttgtccttgcataagagctattcctacggtaattgttctcataccttcagtcctggcaaacgtaagcgcatacatatattcctgccatgaaagaataaatgcaaacatggcaactgtcactattcccggagcagccaaaggcacaataatcccaaacagtattctcaaacgactacacccgtcaattctcgccgcttcttcaagtgatactggaatcgtatcaaaatatccctttatcatccatgcacaaaaaggcatggcaaaagttgtatatgctataatcatggacaaatgtgtattcaagagtcccaatttgctcatgatcatatacattggaattaaaagaagcatagaaggaaacatctgcactacaatcaacaatgctgaaaaaaagaatctgccgtggaaacgaaaacgggatatcccatatcctgcgaacatggcaactacaagcgatacccccatagttgcaaaagaaactatgagcgagttaacaaaataagttttaaaatatcctctattccatatttctccgtaatttttaaaactaaattctgatggcaaccactttggtatctcctgaaaaatttcatctgcttctttaaaagaagtagaaaccatccataaaaatggcaaaatcaaaacaactgttaaaatcaaaattacaaaagtatatcctattttactatattgtctcttttgtgcccgtgtcatttactcactccttcaataatttcttcacatacacaatacatggaacaatcagcacaagcatcatgataacggctgctgccgaagcatagcttgtttggaatgtttgcatgaacaaacggtatatatatacaggaagagataacgtagcttctcctggtcctccctttgttacaacttgtataatttccaactgattaaaattccatatggatgtaagaattgatgtaatcaacatgatgctttttaacataggaatcgtaacaaaacgaaaacactgacttcctcttgcgccgtctacttttgccgcttcatacaaatcaccaggtattgcctgaattccagcaagtaatgtaatcgcaacaaaaggaatgctcttccatataatgaccataacaactgatacagcagccaatttctcatcagatagccacgaaagattatgtgaaataatccctatacttttcaaaatataattcatcattccaaaagattcattcaaaaaccatttccatataatacctgctatggcatttggaataatccatggaatcaaaaccaaacatcgaaataatttcttgcaataaatatctttgtttaagagtaccgcaaacaataggccaaaaaacaattcaaatacaagaataacaagtgtccataaaacagaacgtcttaatgcatccaagaacatcgaatccgttaataatgatttataattatccagtgctacaaattctggttgtacaggacgaatcagactttcattataaaagctgttaataattcctgacaaaacaggataaattaaaataaccaaaatcaaagcagcacatggaaaaagaaataaataaggtgttgctgttgtcttaatttttgtttttattctttttttcatccaatgtctccctcgcaaattgaatccgagagtgctttttcagcactcccgcttcaattatgaccatcactctccgtgaaattcctttaacttttcatcaagcatatgaatcccctcgtcaactgaaacacttcccatcagcatctgctgcactgtagaattgccatacatactggtaagggattgccatgaaggatcaagcggtggtatcatacagtaatctacttcatctaagaacggctgaagtttttcatcatagttttcctttgcatactgtataaagtcttcagaatacaacatacctcctgcagcattgcaaaaagctccagctatagttaatccctctatatcacttggtgtattataaaaataatctaaaaacttccatgcttcttctttatgctctgaagcttccaaaatattgaatgtattaggataacctctgtatacagtattatccggaccatcaaacataacggcggttccccatttaccatccaaatctggtcccttttctgcaacagatcccgtcacccatgctccgttctgcatcattgcaacttctcctgatacaaaagcatttgttactgcctcccagtcataatcaacaacactatcaggagttactttatgtgtctgtacaagatcaaccatcaattgggttccttttatcgctgtttcatcagaaagccttgattcccattttccctcgtcatatgttgagatatctgctccgcacatttgcataaactgtacccaataatcggaagcattctctgcctgtaccggccaagcatatccatactgatctattaccccatctccatctgtatcttttgtcaaagcttttgcatattccagaaattcatcatatgtttttggaggcttatttggatcaagtcctgcttcttcaaaaagatcttttctatagaacaatgcccagttacatccttcttgcggcagtccatcaatttttccatcttccgttgtaatcattgcttttgcacttggaagaaagctatttataagttcttccggtaccaatgtacttaaatctgctatcgctccaattcctctgtattctgcaagcatagatgtattgcacataatcaaatctggtgcatctccacttacaatagaagtcataatctgagatggtgcatctgtccagctactccgtgtttctataattttaatacccggatttttttcttcaaaatctgcaattgcacgttccaaaatttcaagctgtgcaggaacccacgctgtatgcagaaactgaatttctaccgtttcctctgctttagcttcataactcatggcaccaaacattcctatagatagtgctgcacagagaaacatacttacaaacctttttttcattaccaaaccctcctgttctattatacttttctttagctcatcctcaacttctgcaccaaaattgtcatctgctcaatccactgataacaaaatacatcgtttaaattataaaaatgacgctgtatttcacctgaatccacacctataacctttgataaaatacggtagttttccggaaatgaaatcccatccaaatgccttacaagctgtataatattcatttgaatctctgatgccctttccaaatttctttgatggtatgattccaacagttcattttcttctttatcaaacatccaactaagtgccgatatgcatcccgatactccaagagtaagcgctggcaaaaaacatgcatcttgtcctgtaaagacatgaaaatctggtcttttgtcttttaccacccccatcacctttgataaatacaaaatattaccactactatctttcaacccgataatatttggaatagtaagaagctcttccatatattgcaagggaatttcaggcgcacaaaacggaatattatacataagaatttttattcttggtggagcttttttagatatggttctataaaaatccaatacattttccggcgtctgaggaaaataatacggaggacatataagtgcatattgatatccgattttatccatatactttaaaagattcagcacactttcttccgtaggtgcacttgctcctccaattaaaatcttattttttccagccacctccatacctgctgcaagaacttgcttctgttgctcagcgttcatataaataaattctcccgttgagccacacataagaagacctttcacactcgtatttctgcaataaataagttcttgatatagtgcttccatatttaactgcccatcactgtcaaaagtagtcagtgtaactccatatattccccgttccatttaccctcctaactgttcttatatatgaacgttatttacatatccggattatgtttatataaatattatcataataaagttaagctgtcaatattcttattttcaccattttttttacatttattttgtctatatttcacatatattcaagtttgcttttatttataaaaaacactacatattatatatatgaacagatatttcacacctcacattcgaaatgttgtttcattccctttaaaataaatcacctacttgaaattttccccagttttatatattatatattgtatatatgaacagttttcatttatactattttaagtaattatagggaggattttcagtatggagcaaaaaaatcatcgacttttacaatgtgctttagaaatcatgaaatatatatcaaaacaaccaaagggtgtatcatttaaagaaatctgtaccattactgatttacccaaaagctctgtccataacctggtacagaccatgtgtaacatgaattttttgcaaaaaaaagaaaactataatgaatatcgaattggtttacagtgtttcgaagtcggcaatgcctatctttctacaaatcctttttattctgtagctaaagatattgtcgaaaatgtatctatacgttgtaatcaaacaacacattttggaattctgaacggtcatgacaccatttacctttataaattcgacagtaatcaaccgcttcgcattgtatcacatacaggtaagcgtattcccgctcatgctacagctattggaaaagctcttttatcaggactttctaaagcagaattagatgagttatatagaaattataaattagaagctataaccgaacacactattacttctttagatgaattggagaaacaaatagaagaagtacgaaaaacacatatagcctatgagtcggaggaatcttcaccatatgtacgctgtattgccgttcctatctgcaatcgtattggaaatgtaatcgctgccctttctgtatcttttcccatttaccaaaataccctaaacgcagatacatttaagcaggttctctttgacgcaaaaaggcaattagaagcagcattactcacattagacatgtaaaaaagccgaataataccctgcaaaaattttcgtattttatcttgatgattttgaactgaaatgtatcctggcatcctaataaaaaagaaatagcataaacaaaaagagcacggagaaactcatcagaatctctccatgctctttttacaaccattcattaatcatctttgaattaaaaaaagcgatagacggggctcgaacccgcggtctcgaccttggcaaggtcgcgcgttaccaactacgccactatcgcataagcgggtgatgggaatcgaacccacgtatccagcttggaaggctggtgttctaccattgaactacacccgcacactttgttatgtgcttttgtttaccgctgcaacgatgattagtatacccgataatcattcatttgtcaacactatttttgaatttttttatttttttatacaagtcaaaaaattcaccttaaccagacgtaaacgcagaacagaaggaacagggctgcagcacctataaacacaccgcctattacaagtccggcctttagtgacagccagatcacagcctttgtttctgcttttgtcaaaggctctttttcctctgtatctaattcctgatcctgtgcagaaaacttcttcctgcctgtattccagggcatcccatccacatccatgttagctactgtataatccggcaactcgtctttttgtctttttcccatcttctgcctcctgatcctatatgcataacataagtatacgccatggccatgaagccagctgcatgccagaatcttctctgacacacagcatagatccattgccggtatctttaatcgtaaagatgacagcgaaccatatgtccattccccatatcctttgcttctggtatcttagtcttacagatctccatacatttcctgcatctggtatggaatttacatcctgacggtggattagccggtgaagggatatttccttcaagaatgatccgatttctttgcagatccggatccggcattgggattgcggaaaacagtgcttcagtataaggatgaagcggctttgcaaaaatatcctctgtacttccggtttccaccagtcctcccagatacataacgccaatggtatctgaaatatgctcaaccacagacagatcgtgtgaaatgaacaaatacgtaaggtttcttttttcctgaagttcttttaacagattgatgatctgggcctgaacagacacgtccagagccgatacaggctcatcacatacaacaaattcaggattcagagccagtgctcttgctatacagatacgctgtctctgcccaccggaaaattcatggggatatctgtccttgtggtatgtctgtaacccacaatcatccatgattttatttaaatattcatcatactcttcctttggaaccagcttatgctccctgactgcctctccaatgatctctcctaccggaagtctaggagacaatgatgagtagggatcctggaaaatgatctgcatttttgtacgaagatcccgcagttccttatgatccatgctgtatatatcttttccatggaaaagtacggttccatctgttttggggataagccggagcagagtccttcctgtggtggattttccacagccggattctcctaccaatcccatggtggttcctctttttatgttgaaggaaacatcatctactgcttttacagcacctatctgctttccaaacatcccgcctttgatagggaaatatttcttcaaatgggatacctgcagaatataatcctgtttttctgttttctcactcattgatctttccctcctctccaggatgttcttttaccagccagccttcctccgggcggtcctggtagcgatagcagcttacttcatgagtaggactgaggcggatcactcccggataagagccctggcatttttcacaccgcagctcacatctgtcgcggaaataacagtaatccggcatgttgatcggattaggcaccttgccagggatactgtacagcttatccactttcttacctaccacaggcttggaacgcataaggccaatggtataaggatgagaaggtgtattgaagatctcccttgcagttcctttttccactactcttccggcgtacatgatcaccacgtaatctgccatttcagcgatcacgcccagatcatgtgtgatcagcataattgatgaattgatcttgtcctttaggtttctcataaggtcaaggatctgcgcctgtatagtcacatccagggctgtggtgggctcatccgcaatgatcagtcttggattacatgcaagccctatagcaatgcacacacgctggcgcataccacctgaaagttcatgtgggtacattttatagacgccctcacagtttgcgatcccaaccaatttcagcatttccagtgttctttcttttacctgggcttttggcatttccggattgtgaagcatagtgatctcgtccacctgctctccaatacgaaaaacaggattcagtgcagtcataggctcctgaaagatcattgccatctcattacctctcagcttctgcatcacgctggtaggtgtgttcacgatattgtaaaccttatcccctgtattaaacctgatctcaccttgcacggtctggccctgaggacgctgcaccagctgcatcagggaaaggctggtaacagactttccacagccggactcacctacgatccccaccgtctttccctgcggtacatcaaagctgactccgtctacagccttcacagtccctatatctgtaaagaaataggtgtgcacatcatcaaactctactacattctccggattcttcatctgagacagatattctgactccggaatattcttccgattccgtttcttttccatctcatctgtgatcttccgattttccctggaaatcctttttgtttctttagctgagatataatttgcgtttttctttttaaataatgccatactctctcacctaccgtttcatcttggggtcaaatgcatcccgaagtccatcgcctacaaagttaaatccaagaactgtaagcaagatcagacatccggccggaatccacacaaacgggaagtttgtaagtacataaacgtcattgaccgcatttacaatatttccccaggaggcgtaggggaatttaacaccaattccaaggaagctcaaggtagcctccataaggataacatctccaagccccatggttgcaaatacgataagctgtgggataacattggggatcagatgtctgaaaatacgtctggaaatccgaatacctgtagcctctgttgcaaccataaattcctgctcacgaagagacaggatctgaccacgaacgattctcgcaatagatggccatccgatcacacccagtattgcacaaagtgcataaatacggatacgcggatcaatcttgtaataatccattacagatccaatgataatatataaaggcattgccggaatacaaattactacatctaccagacgcatcagtatggtatccacccagcctccgaaataacctgaaataccaccaatgatcacacccagcactacttcaataatgactaccacaaatccaatcagaagtgaaatacgtcctccatacatcagccttgtaagcatgtccataccgtttccgtctgtaccggcccagtgtttactgtccggggagcggaatgtatcattaactgtagtctttttctggctgcgaaccacatactgtgtattctttctctgaagctgatatttctcttcctctcccttttcattcattgctgtaaaggtatcggctttctcaagaatagcctcttcaactgcttctttaaaaggaagtgaaaggaagctgccggctgtctggggggaaacaagaagggaagatatggttgcatatacctgtccttccttcaggatctccactgcctgtcctttcagagactgcatttcatactttgtatcctcatattcaaaagaagacttatcttctgcaagtgctctaagtgctgcctcctgaaaaccaaatcctggtgcatcctcctgagatacagcattaaaaaccttctttgtggctatgccgatcacaccggaaacagagatcatatcctgacgtccggcttttgtaatggaataagtcactccatccacttcaaagctatcttcgccagcctccaaagcctccgtatatccttccttgatctcatctgtaacaggtgtgctgccagcttctttataggatgattttccttttagtgtcagtactgtagccacaggctcagcagatgtgatctggtaataaacatctccttttttctccagtccatactctgcatcatttgtggcaaaggactcctgctcctgatttactgcaagaataaatttctgctgggcagcagccggaaaattcatcccttcttttacagtaaagatataagcatcgttgtctgtagcgcctgcataatccttccatacatattccgtcttacggaaaacctgactttctccatacggactgactacaccacctacaaacgaaaacaaaaacatggcgatcaggatcacaagtcctgccatagccagcttattacggaaaaatcgtttcattaccagcattccaggtgaaagaactttcacacgctgttcatcatccaacgcctgggaggtactgacatgctgatcaatctttttttcagaatctttgctcatgtttttcctcctaatttattcttactcttggatccgccactgcatagagaatatctgcgatcagatttcctgtcagtgtcaggaatgccagaaataccatataaaacatagtaaacggaatgtctccctgggtcagtgcctgataagaagtatatccgatccctgggatctgaaatagtgtttctgtgatcatagcacctgcgaacaggcttggaagtgtacttcccaaaattgtaataatcgggatcagagtattacggaatgcatgatgatagatcacctttttctccggaacaccttttgcccttgctgtacggatgtaatccgcgttcagtacttccagcatattggttcttgtataacgcatcaaagatcctacgcttacaatggtcagtgtaaccacaggaagaatcatatgctttgccatatccagaattttcccaacagatccgtagaattcatgcatacggcttacaattccgtacaggtctacccatttaagattaatggaaaagatatatttcaggatggtagcaaaaaagaatgaaggtaacgaaataccgatcagtgcaaaaacggtcactgcatagtccactctgctgtactgtttggtagctgacaatattcccaatgggatggcgataagaatctccaatagaaatgctgccagtcccagggcaaaggaataccagattaccttggaaaatttctgtgttaccggctgatggaagatccaggattctccaaattccccttttacagcctttgaaagccagctgaaatatccttccagcacaggcttgtccaaaccgtaagaagcatttaattctgccacaagctcatcataaggctttgccccctgtttcatggacatatctctggcacggccttctacataggaagtaggaaggcttctctctatagaataaatgataagggaaacgaagaacaagatcagcgctccaagaagtacacgccgtactacaaatttcttcattaaaactgtcctttctgattgtcattaaagcacgtctgcaaagaaaggggggcatctgcgcccccttcccaaatgctgcaaaaccttaattcatttccattgtctcaatatctttataccagtaatagaatgtacttacatcctttgtaaaggtatctgcattaagacgctcagggctgtagataatgcagttttgtctctgatatatcggaacctctactgcccagtcaaggataatatccagacactgtttgtagacagactttctgtattcctgatcagcagaagaacgggcatcaataatatcctgatccagagtagcatcgttaatgtgataatagttactctttacactgtcactatgatagatctgatacatatccggatcaacagttgcctgccatgcagctgcccacatttcagcagtacctgcatttaatttatcccacataatatttgcatctgttacgtcattgatctcaagagtaaatccaatcttctcaagagcctgttttgcatctgtaaggattgcaaagcttgggtgatcaccggagccggatgcaccaatagtcatctcataagtaagctttgctccttccggagctgctgtcagcttgccatcttctactgtgtaacctgctgcctcaaagtatccaagggatgcctgaagtgctgcgtcaaatttctcatcatctgtcatctcatctgtgtagatcggattgccttcaacatccacagaatatgccacctgataatctgcatcggacttctgaggtgctgcccaggaagtattggagatcggataattgatcacagatgcagcatctccgtagtaggaatcaatggatacgtctcgatatacggaaagaatggttgtgattgcttttctaaggttcttagaagcatcagaaccaggctcatttcctacgttaatggtagcagcattaagaccgatgtatccatatcccagcttgtctgtagtattggtcatgatcttgtcaccattcagactgccattaccattaatgctctcgatctgctcaaaagctgacttgcttcctgaaggatcagaaaggtcgatggtaccctgctgaacacctgcgatcttgtctgcctctgatgtttcacgccactgaagattcttgatcttaggagcgcctttgtaatagctttcatttgcctcaagataaactgtcttattctcgtatttcacaaacttgtacggacctgcgccaagaggagtatttcctttctcgcggatggaagaaagatctccctttgtgaaaccaaacttgttattgtcataatcataaagagaagtatctccatagtaatgcagcggctctacgatcacacccaggttgtacagggttgttgcagaaaatccgtctgttgttacctcaacttcataatcattgatcttcttgataccttcgatattagtaacttcttcgccttctcctgcagcagtcttctgctctaccagatattctgtagcaagattggtaatatcctcatcaaagtatgcttcatctccatatgcagcagcaagtgccttgtaatctgtgccgtactgatctgcaatatcgttaaggatggtatctcggtccttatcatctgcggagtaatcctggtcctttgcgtaaagcattacaaagaactcagctgcactgttcacctgataatcctctttataagactcccagtcactttcagcccagtcgtattcagaggaaagcagaggcatgatcaggtctgatttcaccttctcagccagctcatccggcatatcgtttaatacattctctacatcctcatctgtaatggaatctgctactgtagagttcagacggtaattcttcagtcctttaatattggtagaataaagggtagcaccgccatcataatcagtatctgcaaatacatacagagtaaagatcaggtcatccgctgtaagtggctcaccatctgaaaaggtaacatcatctctcagtttaaaattataaacagtagtatcctcattctgtgtaacagtaacatcggacaggcctgtataggtgtagtctgtaccattgtattcatgggtctcaccctcaataccattgtagatcactgcaccgcttctgtctgtatcaaacagatatgcaccaacaatatctgcaatctgctgatccggcactgcctcacagaaaaatccgctgaacttctcagagaaattcgtctgtccaacaacgagaggtgtgtcagaacctgtgtcctttccttctgtagctgtttctgtgtcagcttcttctgcaaatacaggaacactgaacattgttgctgccataactcctgatagcaacagagccattaacctttttttcctcatccttaatcctccttttgttatttgtaactatttaccaatattgaacatgtacgctggtattttttgttacgttttgaagtaaatccattgtaacatgtttttcttgattagcaaatagcaacttttctgtttttatccatcaattattaccatgattacctgattctggattcttaggaaagcttttcaaaactgccttttattttcctgttattgacagtgagaatgatcccaaacagaataagtacaaaggaatctgctgcaaataaatattcagcagatactgcacgctgcttcggatccaggaaaatgaagatcaggtcagacacaaagcttccacagccaaggatcaggattcccagactgcaccgccagggtctttttacctgtttttcataatctgccctgcttagatcctttttatgtgcctgcgggatctctaccaatgcagaagtattctctccattttggcggatccgcagatataaagcaccgctgccggcaattacataagcaactggtaaaagctggaatacaaacggcaaaagaacccaggcaacccggctgccgtcattattcaggcacataccgccaatataaaagcccagcgccaggatgcccaggatcatagaagacaaaactgtttttctcaggtcctgttctgaaagcctggttctgtaccactgtccggtatactcataacggtttccttttttccgataatcatttctgtatttcttcatgaatgtatgtctgtctcctttatcacaggtcaagctttttccggatctcatctacgatctttgaaatacatccctgttcaaacggtacgttaagcctggcttctttcagcagttccggatagaaacggcttgcagacatcttgcaaagcttcatgtaatctgcccatgcagctccatgatccttgtccattttgatcttaaactggaaagcacaaagctgtgccagaacataatcaatataataaaagggaagttcaaaaatatgatgctgtctctgccagtatgcacctttttccataaaaccgcagcctgtaatgtcaaggtgtggccagtattctttctccaactgcttccacgcatcccggcgttcttttggagtcatatccggattgccataaacaatatgttggaattcatctaccatggttccgtatggtacaaaggcaatggcatcctccagatgcatctgcttgtaatcattccctttttcaccaaaaaacagttcgatccatggttcagcaaaaaattccatagacatggaatggatttctgctgtttccatggtcagataccgattgtgctccgggataggatcctttgctgatacataatactgaaatgcgtgtccgcattcgtgagtgatcacatccacatctccgcttgtaccattaaaattagcaaaaatgaacggtactccgtaatcggaaatctctgtcatatatccaccggtagccttattcttccgtccaaatacgtcaaacagctcccagtccatcatcatattgaaaaagtctctggtctcctctgacatctcagaatacattttcctgccactctccaggatctcctgtggtgtgcctgttggtgccgggtctccctgcttgaaataaacacctgcatcatagtaagtcaggctgtccactccaagacgttccctacgcctttcatgcatttgggatgcaaaaggtacaaaagtcttcttgatctgctcacgcaggctggcaatgtcctcttttgtataagaattgcggttcatcctgcaatatcccatatcaatataattctcaaagccaagaagccttgcctgagcagtacgatttttcaccataagatcatagatctcatcgatctcatcctgttttccttcaaaaaatgcagagaatttatcccaggccttctttctggtgtccctgtcactggctttcatatatttctgaagcagggaaagattcagttcttctccttcccagtccacagatgcagaagcgatcagcttactatacctggtcgccagaacattttcctcctgcattaacgggatcagtttctcatcaaaagatttcatctcaagctccatagagcgaaatgctactgctcccagtttttcttccatataggatctgaaaggagttttgaaaagcaccttattatactcatccgtcagtgcctcgacctctggcattttctggtcataatattctttttctccttcgtaaaatgcgtttgttacatccccgtctcttcgtatcttagcaatcgtgtacatagtcattacatggtacagctttttccatatttcctggtgaatggcaaactgttcttccccactggctgcatgggcagccttctcgatcagcttcctgccttcttctaccacagccggaatgtccggtctttcataaggaatctcagaaaatctcatatttcacatctcctttgtcttttccagcccatgggcataggattctttttataataccataatgccatctggatttatggttattattctcctttttatagttaataatttacacgaaaggtacaaaaaaaggagcctatactacaacaggctcctaatcttaagatcatcataaacaacgccatcagttctcccagtcccatacattggtggccgtcatctgacttctgggcttcttgatcacaagctcaggactcttagcacttaccttagtattggcaggaatagactccgtaataaatgtatttcctccaatgatggtattctcaccgatcacagtctcaccacccaatacggtggaattggagtatatggtcacattgtccccaatagtgggatgtctcttaacatttgcaagctgctgacccattctggtggataaggcacccagagttacaccttgatatagttttacattattgccgatagtagtggtctctccgattaccacacctgttccatggtcaataaagaagtattctcctatagtcgcacctggattgatatcgatcccagtgctgctatgggcatactctgtcataatcctgggaataaagggtacttcacttgtataaaggatgtgtgccagccgatacacatagatagccagaaaaccgggataggagaaaataatctcctctctgctcttggctgcaggatccccatcaaatccagcctgaacatccttcaagagcatcttctgaacatgcggaagctccatgaaaaagctgccggtcacttctgctgctctctcatctgcctgctcttcgcccatatataaataagcgatcttgatctgtctttccagacgatcgtacagatcattcatcacgtgcccaagataatgttccggaaacatagctgctgccgaatcattcccgaaatatcctggaaagatcacagtttttaattctctcactatatcaactactgcagatctgtctggaagttcttttttgcttcttggcaaaaacagctcttcatcatggtaattcttggtaagatgttctaccgcacttagaatggatgtctttttgtcgttcatttcagcctcctcaagggatgtttctaaataagttactctctatcatattacaatacaccccttttcgtcaatccccagtcacccatataaaccatataaaaaataaaattcaagaatgccgaggcattc

SEQ ID NO: 88 - DNA, 84851 bp, Unknown
  gut microbiota DNA sequence
ggggagcggttcatttactggtggattgcttggattagctgtgggtgcagcaggcggtcttctgatggttaagatagcagatagaaacgacagtattagaaatggagacatgtggaccttcgtgctgaatattttgatcatgctgggggcaatttatgtcggtatgtttttacatattctggtacatgaaggaggtcatcttgtattcggcctgctcaccggatataagtttagttctttcaggataggaagcagggtcctgttaaaaacagagcagggatttcaatggaagaagctgtatatcccggggacagccgggcagtgtctgatgaatccgccggagttgatcaatgggaaaatgccgtatgcgttgtacaatctgggcggtgttttaatgaattttctggtgtccctgatctgtcttgtgatcggtctggcactttggaagccgcattcacatgcagcaggatgcttcctgatcattgccttaatggggtgcgcgtttctacttttgaatgggattcctgcagttatgggtggaatgcctaatgatggttataatgcctggacgatacgaaagtttccgagagctttacatgctttcagaatccagatgcagatcaaccaggaggtttccagaggcagaaggctgaaagaactgcctgaggaatggtttcagatgccgtcagatgaggatatgcaaaatcctttgtctgctacaattggggtttttgtatgcaaccggctgatggatgaacatagatttgaagaagcagatcagtatatagaaaagctgctacagactgaaaacgggatcattgacatgcacagaaagctgttagcttgtgatgggatcctgtgtcagctgttgggaaagagaaatgaagaagttctggatggacttctggacaaagaacagcagaagtttatgaaagcctttgggaaaagccttctgtctgtgacgcgcacccagtatggacttgcgcttttgaaggatcaggacactgaaaagggagaggagcttcggaagaggtttgaaaaacaggcaaaagtatatccatatgaatccgatattcagtctgaaagagaactgatggatcagatagatataagattcaaagagcaaacagggcagacgatcggcccggaaaaggagattacgtatgaaactggaagtaagagatcttagtaaaagctttggcgaaaatgaagtgctgcatggtatttctttttctgtggaaagcggaaatgcattggggctgctgggaaggaacggagccgggaaaacaaccactatccgtattcttatgaacgtatttaagggaaatgcaggatcagttctgctggatggcaagcctttcgacccggcaaagcaccagattggatatatgccagaggagagaggattatacccaaagaaaaccgttagtgaacagctgatatatcttggaatgcttcgtggcctaagcgcaaagaaagccaaggaaaatatgaaaaaatggctggctaaaatggaagtgtcagagtatgagaaccggaagctggaaactctttcaaaaggaaatcagcagaaggtacagctggcgcagaccctgatcacagatccaaagatcattatcctggatgaacctttttcagggttggatccggtaaattcccagatcctgaaagatgtgatcagtgaacagatccagcagggaaagctggtgatcttttccagccatcagatgagttatgtagaggaattctgccagcagatcgccatcctgaatcatggggatgtggttttgtccggagaactgaaggagatcaaaagggagtttgggcgggaccgcctggtggtatccagtcttgaagaaacaccggaggaactggcacacaggttacgtgatacttttgctgatcttcttgaagtagaaaaggtacagaaggatcgtctgatcatcaggaaaaaagtttcagatgcaaagcttaagatcatggaaaggcttgtagagcaagatgtggatctggaatttttcggcatgtatgagccgtctttgaatgacatttttgtggagaaagcaggtgacgaggcatgaaaaaattttggactatattaaggtttgagctaaacaattactttaaaagtaaagggtttctgacggctacgatactttttaccctggtgcttatgggtgtgattattgttccaactatggttccggggcttttgggagacgataaagtttctgaaagcagcaccgattcaggtgaacaggcagatacactgggtatttgtgtgaagacagatcagattacagacgtagacagcctgctttcaggtatgtgggcgaattgggaaacatatcaggatgaggacagcctgaaaaaggctgtaaaggaccaggatgttcaggctggttttatcctgaacagtctttcagatgtttcctatgtggtaaataataaggaactgtatgacagctatcaggatgcctttgtcagcacactggaggcttatgagacacagcagtatctgatggcaaaaggactttcagaggaagaaattgcatctgctgaaaacataaatataaatgttactacagatattttgggaaaagacagtgcatccaattacggatatacttatatcctggtgttccttgtatatttcctgatcattttttatggacagatgatcgcaacatccgttacctccgaaaaaagtaaccgtgctattgagatcctggtaacaagtgtagattctaacagtttgatctttggcaaggttttggcaggtgcgcttgctggcctggttcaggcattggtgatccttggcggttcatttggagcatatgcggctgttaaggaaaagtggggcgggatcctggatcctttgtttgatattccggccagagtatttgttgcttatgcattctttgcaattgcaagttatctgttatacgcatttttgtttggggcacttggagcacttgtttccaagacagaggatatcagcaaggtatccggaccagtgacaatgctttatgtgatttccttcctggcagctattttcggaatgaatgactgtgacgggcttatgatcaaagtagcttcatttataccatttacctccggaaatgctatgtttatccgtgtggctatgggtagtgtggctgcttgggaaatcatcctttccggtggacttttggttgcttcctgcgtattggccggagtgctggctgccaaactgttccggtatgggacccttcattatggcaatcctctgaagatcacaactgcattaaaaaatatgaaaatgtaaggtatatattgctgaaataagcatatcctgataacagagtcatgaaaggggatgctgtaagatcacgcagatgttttaatctgttaaaagattttacagacatccctttcattaaagatctgtggaggaaggaatatgtggggatttcttgcagcactgttgtcaggagcacttatgagtatacagggggtatttaatacagaagtcaccaaacaatccagcctttggctatctaccggatgggtgcagctttcagcatttctggtatgtgtggcagcatggcttttttcggggagagacagtgtatcggttttgtggcaggtcagtcctaaatatatgcttcttggaggcgtgatcggagcatttattacagtgaccgtgatccagagtatgggagcccttggcccggctaaggcagttatggtgattgttgtatctcagctggcagttgcatatatgattgaattgttgggcatatttggtgtggaaaagcagccttttgagtggagaaagataatgggaatgctgatctgtgcagccggaatcgttatttttaagtggcaaaattaagagattggtattgtaaaagtacagatctttcgttaaaataagaatgagtagcggggagcctgccatgctttgttatgggaggagaaccgaaaatgaaaagaaaacctttagaaccggggaaatatttctgcttttttttcagtgtgattttcatcagctgtgtacttacaggatgcagcaggagagatgatcttttccaggagggttcccaggagatggccgatgaagaagaatttcagatcaccgaccaggagactgcaaatacacaggttcctgtttcggaggcagccatcacagaatctgctgtacttgcagaagtttctcagggaccggaagagatttatgtggatgtttctggtgctgtggtcagtccgggagtatactgtctggatgcaggcagccggatatttcaagctatagaagcagcaggaggatgcacaacggaagctgcccccgtgtgtctgaatcaggcagcagagctttcagatggacagaaggtgtacgttcctactgtgcaggaagcagaagatgtggcagctggaaatggcgcgggtggcaatgcaggaaatttatgggatctgggtacacagtcatctgtaacaggacagacgtcacagggtacaggacaggtatcagaggacaccggtatagggaaggttaatattaatacagcagacaaagagctgctgaccacactgcctggtgtgggaagttccaaggcagatgccatccttgcatatcgtcaggatcagggaggattttcttccattgaagagatcatgaatgtggaagggatcaaggaaggtgtttttgccaggatcaaagacaggatttccgtagattaatatcgtctgtgtgtagttgagaagggatggcaggcgagaataaggagaatatacatgagcaggaaagtattggtagtagatgatgaaaagctgatcgtcaagggtatccgcttcagcctggaacaggacggtatggaagtggactgcgcctatgatggtgaggaagctgtagagaaggccaaggaaaagaaatacgatatcattcttttagacctgatgcttccaaagatggacggacttgaggtttgccagcagatccgggaattttcaaatgttccgattgtgatgcttacagcaaaaggagaggacatggataagatcctgggactggagtatggtgctgatgattacattacaaagccgtttaacattcttgaggtgaaggccaggatcaaagcaattatgcgaagagcaggcagcaatcatgaagaaaaagaaaaggcaaagaccattgaggtgggagaccttaagatggactgcgaaagccgccgggtatttattgccggccgtgagatcaaccttacagcaaaggaattcgatgttctggagcttctggtatttaatcccaacaaggtttacagccgtgagaaccttctgaatattgtttggggatacgagtatcctggagatgtgcgtactgtcgatgtacatatccgtcgtcttagagagaagattgaggcaaatcccagtgagccgaaatacgtacacaccaaatggggtgtgggttattacttccaggcttaagctatgatcaacaagccaaagacaagcttttttaaaagcctgcgctttcgtatcctgatcatcctgatcattctgggaattgtgccaagtgttatagttacacagattgtgatcaatacctatgcggatcgggccattgctctccgtactgagaatgtgaagaatcaatgtgacattttgtgcaacctgttaatcaaagagaattatattaatgactccagctcgcaggtagtgaacagcaagctggagttgttgtctaatgtatatagcggcagacttttgctggttgacagggattacaggatcgtaaaggatacgtatggcatagatgaagggaagacattgctttcatccatggtcatccgttgctttaaaggggatgaagtcagctggtataatcgtaagaaccggtcgatagagatggttgttccggtaaaaagtcctgaagtgaagcagctgcaaggggtacttctggtaagcgtttcagccaatgagatcgcttctaccattgatgagctggagcagagggagatcctgatcatcgggttcatagtagcactggccattttgcttggttatgtactttccactattcttgtaaaaccttttgcgaggatcaccaaatctatagaagatctgacagacggatatcagaatgatgagatctccgttccggattatacagagacaaagctgatcacagatgcatttaacaagatgctggcaaggatgaagatcctggatgagtccagaaatgaatttgtatccaatgtgtcccatgagttaaagacacctttaacttccatgaaggtgctggctgattcccttgtagggcaaagcggtgtgccagaagaactttaccaggagtttatgggggatattactgcggagattgatagggagaataagatcatcacagatcttctttcccttgtaaagatggacaaaaaggcagcagatgtaaatatttcccatatggatatcaatcagttactggaggatatcctgaagaggcttcggcccattgcagacagacgtaatattgacctgatccttgattgcttcaggccagtagaagctgatgtggatgaagtgaaattcactttggcagtgaccaatcttgtggaaaatggcatcaaatataatgtggatgacggatgggtaagggtaacgctggacgcagaccataaatatttttatgtaacagtggcagattccggcatgggcattcctgaggatagcattgaccgtatttttgaaaggttctaccgtgtggacaagtcccattccagggagattggcggtacaggtcttggacttgccattacaagaagtgccatagccatgcatcatggcaccattaaggtattcagcaaagagggagaaggaactacctttaccgttcgtatcccgttgtcatatattccttaggaggcaccagatgaaaaagttacttatattgctgctgagtgtggcgctgattgcaggatttcttggcggttgcgctgatacaggacagtctggccaaaaggacagcggaggcaatcaatattatttttattatacaaatcaggaagaaacaaagctgcagagagaaagttatgtgcctgagaaggaaagcccccaggatatgatcgatgagctggagcagaagctgaatgacagagaaaccagtggagattatcaggcgctttttccaaaagaagtacagatacagtcctgtgtactggacggtacatccctgcttatttattttaatagtggatataccagtatgggaagtaccagggagatcctggtacgggctggagttgtacgaagctttcttcaggttccggggatttccggtgtgaaattctatgtgggaaatacagaacttacagattctaaaggaaatccaattggcaccatggataattccagttttgtagaactgtggggagatgatcaagatgcttaccggtatgatacttttacattgtattttactgacagcacagggaaaaaactggttgaggaagaaagaagtgtttattataaacgaagtcttccaagggaacgggtgatcctggagcagttgatcaagggacctatggaaaaaggacattatcctactcttccggagaatacagaggttatgtctgtaacaaccgctgaccgtgtatgttatgtgaacttcagccaggctttttctgatgcagcccttgatattccagagaaaacgattatttattctgtagttaattctgtgctggcagctgtagatgcagacaaagtccagattagcctgaatggacaggatgatgtaagttttggagagaatacctctctctataatttctttggctggaacactgatttgatccaggataaagagtaaggaggaaatggatggcaagacgtcctttatgtcttgcgtgccttctcctgatgttggcgatgatcatggcagatttgctggggatgcccctgatccgggggaatcctctgccgaaatctgttacagaatatttaaaaaagcattcggagaccaccatctgcggggaggtggaacggtgcgcagaaagtgaaaattcaaaatcagtctatcttaaaaatgtctattttatctatcaatctaagaaaattccaataaaaaatgtaagagtctttttgaaaaatcaggaaacattttctaaagccaagtctgtggcgaatgtcaggtcctctgtaaagggacgaagttctgtgaatgcagataagggtttgggggataagtgtggagtatctgtggatacagataaggatgtcctgtataaagggatgatggttcgtgtaaaaggaaggctggaagaaatccagggcaaacgaaatcctggagagtttgacagccgccagtattatgcatgccagcatatctattatgtgatgaagaaagctgtgatcaaggaaaaatcatccagttattctgtttatggacaatttctggtggatctgcagcagtatctgggggatattttgtaccaggccgcaggaaaagaaggagaagtattaaaggccattgtgctgggggataaaaccggtttggaggatgaaacaaagctgcgctaccaaatgggcgggatactgcatatactggcgatttcgggactccatatcagtattatcggcatgggcttttaccggtttttgaaaaaatgttatctgggaaactggactgccggtatgatcgccttggtttttatgatccagtatgggatgatgacaggaggcagcgtgtctgttatgcgggctgtgtgcatgtttctcatggctgcaggggcgaggattcttggcaggatctatgatctgcctacagcactggctgtatctgcagtactgatccttctggaatcgccggcttatttgtacagcagcggttttcttctttccttttctgcagtgttcggggcagggatcatttatccttatctggaaaagaaggcagacaaaaggggaaagaaagaaaacagaaaaacagaaaatagaaagacggtaaacagaaaggtaaaagcagtttgcaaaaagggaacggccatgtttctggcctcgctgggagtgcagttgactatgcttccggtgagcctttatttctttggggaggtttctgtggctggattgatgttgaacctgttagtgattccgtcagtagcggtggttctggtcagtggtctcgcaggaatgctggtgggctgtttctggatgacaggcgccaaaatactgattttccctggaaaattcctgttatggctttatgaaatgctatgtggtgcagcaggcagtctgtctataggaaatctaagaattcctgttacctgggtggcaggccagccaaagctgtggcagatcgtactgtactatttgatcttgggaacactccttttcttatattcacagaaaagcaaatggcgaaccggatataaagaaaaatatgaagaaatgccactgagaatgataaaaatttcaggaatagtttaccgggcaattctggcagcaggagtagtggtcagtctcctggtgatccgagtctggccctcagcctacctgcagatcacttgtctggatgtggggcagggagatggaattgcgatccagacgccggaagggaaaaactacctgattgatggaggaagcagcagtaaaaccagtactggcagatatcagatgcttccctttttgaagtcaaggggaatctgccggattgatgggatttttatatctcatgttgatgaggatcatatcagcggagttcgggaaatcctggaattgcaggcacaggggctgacctcggtatatgtaagcagtctgtatctgcctaaatggcaggatcctccggaaaactggaataatctggaaaaactgggcagacaggcgggtgttcggatccatactgtaaagagaggagatattctccagtccgggaaaatgaagctttgtttcctggcaccggaagatggggcaaaaggagaaaacgtaaatgaggatggcatggtgatacagcttgaatatgcaagattttccggcctttttacaggtgatatcggtgaaaaaacagaaaaagatctgcttccatatctgaaggatgtggattttctgaaggtggggcatcatgggtcaaaatattctaccagcagtgtttttttggaaaagataaaccctgaaaatggagtgatttcctgctcagaaacaaatacttatggacacccttcgtcggaaacgatccagcgtctgagagagcatggatgtgaggtggcatataccatgataagcggtgcagtgactgtatacacagatgggaaacatgtgaaaatggaaggttttttaagtagcgagttatagctgccactccttgtttttgccaacaggatatattataatgctttcaaaggccggtggtgtccggcatacaaaagagggaagaggggcggccatgaagaaaacagttaccatatgttttaccaataacaaaggaggaagcggcaaatccaccacatgctccaatgtgggagcagcaatggcacgggcaggaaaaaaggtactgctggtggacggagacatgcagctgaatctgtccctgtcctttttctcagaggaaaaagtactggaaatggcagcaggggagatgaatctataccacgccattgggggacagaaggatctgacagattacattgtacatactccatatgaggggctggatctgattccttcttctactcagatgagttccattgagtatgagctttttacaaaatggcagagggaatttatcctgaaaaaatgtttgcagaagatcaaagcagcagggacttatgattatatcctgattgatgcaccacctacgctgggaggctgggtgatgaatattttgtgtgcttcagaccgggtgcttgtaccggtagaggcaagcccgtgggggatgtttggactggccaatatgtttgattttctggatgaagtaaaggagatcgcaccggagcttcaggtgctggggatcgtgatcaccaaggcagacacaagaaaagcatattttaaacagacgctggagaccttaaaggatatggacgggatccggctgttggattctgtgatccgggtggacagttccattgagtgggcgcaggatgccagtgccccggtggtagagtttaagaaaagcagcagaagtgcaaaagaatatacagaacttgcagaggaggtaatggatcgtgtcagtaggtaaagcaagcattcaaagggcagcagctaaaaacacagctgaagcaaaaacaacaaaagcagcaacaaaaacagcaaataaaacagcagccgggaaaacaacagggcgagctgctgcaaaggcagcaccaaaggaagtaacacagtctgtggtaacgcctatggattcccaggaaatacagttaaaatttctttcaggcaacaggccagcagaagagggaaagcctgtaaagatcgcagaggacctgccggtttatctgctctgataataatttgggttaatatagctttttacaatataaacagtctcagattttttgagaatcctgtggcatgatgtattcagagtattctgctctggaaagagaaaaatcaaaaaagtgatattcaaaaagaaaataatttatagcatttgtctttttgaaatcctaaaatgattttatcaaaaagaaggttctgtttatatgaagaaaagaataatcgcagtggctgcattactggcctgctccacacttttgggaagtgttcatgtgtatgcagaggaaaatgaaaagaatattgttgaaacagcatacggaaaagttcaaggtatcaacagtacggatgaaacttatgagaatgttgtagagtttcgtggaattccctatgcagcaccgccggtgggtgatttgcgctggaaagcacctgtagatccggaaaaatgggatgatgtacttgtgtgcgacacttacaaagatattcctatgcaggtattgggtggagcagaggtggaaccatataaatcggatatttattacgatggagttcctgaaatgagtgaagactgtctgtatctgaatgtaatgacaacagaagattcactttcttctacagaaaagaaaccggtatatgtctggttccatggaggtggactgaacagctgctatacctttgagccggaaggaaacggagaagcttttgcaaagaatggaattgttgtggtaacagtggaacagcgtcttggcgtctttgggtatctgtcattgccacagcttactgaggaacaggggcagagcggaaattatggtctgatggaccagattaaagcaatggaatggatcaaagagaatatagctaactttggtggagaccctgagaatataactgttggcggacaatccggcggtaccacgaaggcaatggcaatgactgcttctcctaaaatggatgtgaaagttgataaattgatcctggaaagcggcttaaagtacaatatggaattccagactcaggaaagtgctgaagaaacaggaactgcatatctgggagatctggggcttgatgaaagtgccacacttgaggatctgagaaacgtggatgctgaaaaattgatcgacagtactagctccaattatccgggaagcatgaatctggatggtttgtatgtcacctatgaaaacattcaggattctattaatgacggagcttttgatgaggtttctatattgtccggaacaaatcttggcgagggaagctatccgaaggtatccacagcagatgatttctatgctcaatataaagaagctcttggtgatttgtatgaccagtacgattttgaaaatctggtaaaagttgatgacagtacagctgctatgatcagccgtcagttaggaacttatggtcttggcacaaatgtcagcagaagccttatggttaatcgactgtacggaaaaatgatgtcagaaagaacagatggaaaagttgcaaactatacatacttattcagccacgctacacctgagagcattacagatttaggaacggacagaggctgggctaaccagtgggcatggcatacaggtgaaatgtggtatgcgtttaattctctgcgtgagggtgttccggcggtaagacagtggactgactgggattatgagctggcagaaaaaatgaatcagtattggtcaaactttatcaaaaccggagatccgaatggagacggacttgcatactggccagtggcagatgaaaatatgggatatattcagttaggagacggaatcagtacacatgaagatgaactgacagatctggaaaaactgatgatggattatacaaccagctatttcaattttcctgcagctgaataataataaacagactattactcacaagtaagggctgccggaaagcaggcagttctaaaacagggagggtgtgacttgtactgagtcacatcctccctgttcgacttgaataattaatgccgcagctgtattttacaatcagtagttctacacttaaggtatcctgaagacgtccggttttaacagcttcttctgcatcgacaaaatcagctactgcctgttgaagctcatccagagaataggaccgggcgcaggcaaggatcttccggacaacaaaggccgggacaccaaggcgggaagccatttctgcctgtgccagcccttcctgtacaaattgttttgctagaaaaagctgccggaattgtttcgcaagaagaaacaggatccgcataggcggttccttcagggtgagcaggtcataataaagatcaagagcctttttctggttcttatcggctactgcctgtaccatatcaaagatcttattctgggtacgcgtcacacacactgcctcaatatcagctgctgtaacaacatccctgccgctggtgtaattgatcagcttttccagttccatgcggagattccccatatcagctcctgtttttgtgagaagcagctccatgtcacgctgggtgatcttttttccttctttgccaagaaggccggcagcccagcgcatcagggttttctcatcctgtgggagaaattcacagatccggcccgcagctttgaccgccttgtacatccggcttcgtttatctacttcggactctgcgaatatgagacaaatataatcaggcagagatttcatataatctgccagatcgtcacatttgtttttgaaaaatccggtatcttccagaaggatcactctccggtcagcaaaaaaaggcatggtttcacataagtcgatcaattcttttatttcaatcccttttccttcaaaacgggtaaaattcatggtgtccccatctgggttcagtgcttttaccagattgtgcttgtactgctgcttcaggtaggcttcggctccgtaaagcagatatgcaggtttgaaattgcctgatttaatatcttcctgaatatttttcaaaatagtttctcctactgaaaaaggcagccgctgacggtgcgactgccatattttcacttataagcttataactaaaaataaaattctctattaaccgatgctattaacggcttttgttaaacgggaaacttttctagcgcagttgttcttgtggtaaacacctttggatgttgctttgctgatagtagcaatagcctctgtaagtgctgcctctgctgctgctttgtccttctgtgcgactgctgcatctacctttctgatggaagtcttaacagcagatctgatggatttgtttctcgcagctttagttcttgtaactaagattcttttctttgcggatttaatgttagccaattcgtacacctccaattcctagataatcgtgaaaatattctctttcatagaaacagacacgggcgcctctatgaaacatgcttatatagtttagtatatttaccatggaatgtcaatacataattcaggaaaaaggagaaaaaataatatagtatgatggctactgttcataggtaatattccgcgaggtgttttgccatgtatatggcaaaatcccgagacatacggggcaaaatcccatcaccgaaggtgatatggaatggattttgaccaagttgctgtgaacggagtgaacagtaacttgtgatgcaaggtttaaaaggtctggatccatatggtggattgaccgtaagtaaatgaaagacggtagaacttcaatcaaagatatatcaaaggaggagagcatgttgggcgattataagatccgcacggacctggcattagaggcaagagaacggtttgatgaaaaaaatgtggaattgcggggagtggaagtgaaggaaacctatgatcaggaaaaggaaatcaggacaacggttgtgaaaatctttacggaaaacggcgcaaaggctatgggacgtcctcagggcaactacattacgatagaagcacctaatctgtcttcgccgaacgaagggtatcacagggaagtgtcagaagagatcgcagcccatctggctcagctgatcaatctgaaaaaagagcagtctattctagtggtaggcctgggaaatcagaacattacagcagatgctcttggtccgcaggtggtgggaaatcttcatatgacacggcatattatcaaggaatacgggctgatgggactggaaaatgaaaagctgcacaaaattagcgggatcattccaggagtgatggcccagacaggtatggaaacctgggagatcatccagggaatcgtatcagccacaaatccggatgtggtgatcgcaattgacgcactggcagcaagaagtacgaaaagacttaacaggacgattcagattacagataccgggatcagtccgggctccggaataggcaatcacagagttgggctttcaaaagaaaatcttcatgtaaaagtgatcgggatcggggttcccacggttgtggatgcagccacgattgtttacgacgccatgtctcatctgctggagactttggaagaaacagaacagaaggaatttctggaagaaattattccacctcatcttcataccatgtttgtaacgcctaaggatgtggatgaaacaataaaatatctggggtttactatttctgaaggattgaatatggcttttgcacagcaggaatagaagatgaaaatcataactgcttcttttgcttcataggatagcataaagaggtggttcggtgacaaaattccagaaggggttctgcgttattttatgtctatgtttctttctggttctggcagtaatgccagagcctttttcccgtctggaaaatatataccggcagttccctatttatcgttttgcagaacaaaaagccagagatacatatctggaagcagactggcggacagaagaaaaactgatagaagaaaatgcagaatacgtgggacaactactggaatcaactcaggcacagcagacaaaggaatcacaggtaacagagtttccacagatgacaaaggaaccacaggtaacagaatttccgcagatgacaaaggaaccacaggtaacagaatttccacagatgacagagaaaccccaaatcacagagaaattacaggttacagaacctccgcagatgacagattctccgcaggtggcagaaactgtgcagccccatcctgtgatcgacctttcaccggaaaagctggcagataaaaactatcttttggaacatttttttgtggtagatgcagctacaacagcagaggcggcttccctgaatgcagccgaatatctggcaaaggatatgacacttaagccggaaaaagatcagccgcagatattgatttaccacagccattcccaggaaacctttgcggattcaagaacaggagaagaagcagatacagtggttggagtaggtgattatctgacagaaatcctggagcaaaagtatggctatcaggtaatccatgtaagggagcattttgatgtgataggcggagaaatcgacagaagccgggcatacgattttgccagagaatatgtggaaaaagtgctggaggagaatccaacagttcaggttctgatcgatcttcacagagatggggtgccggaggggaaaaggctggtaacaaaaatcggaggcagggatacagcacagatcatgttttataacggtttaagctatactgtaaatcaagggaaaataagctatctgccaaatccatatattgaagagaatctggctttttcttttcaactggagtatacagcggcagaatattatcctggattttacagatgtatttatctggcagggctgcggtataatctgcatttaagaccaagggcgctgctggtggaagcaggggcgcagaccaacactgtacaggaggtgaaaaacgccatggagcctttgggggatattctgaatcgggttttaaaaggcagtgacaaataagcagaagctgtgatataatcaaaaaagagcgtaaaaaagaggaggatcgtctggaatgacagaccagagtaagatacggaatttttgtattatcgcacatatagaccatgggaaatccacactggcagaccggatcattgagatgaccggccttcttacagagcgtgagatgcaggcgcaggttcttgacaacatggaccttgaacgcgagcggggcattaccatcaaatcccaggcagtgcgtattgtatataaagcaaaagacggagaagagtatatttttaacctgatcgatacaccggggcatgtggattttaactatgaggtttccagaagcctggcagcctgtgatggtgcgatccttgtggtagatgcagcacaggggatcgaggcacagacacttgccaatgtatatatggcgctggatcatgatctggaggtgatccctgtgatcaataagatcgatctgccaagtgcccagccagagcgagtgatcaatgagatcgaggatgtgatcggacttgaagcccaggatgcacctaagatctcagccaaaacaggactgaatgtggaccaggtactggagagtattgtggagaagattcctgcacctgagggagatccggatgcaccgctgaaggcgttgatctttgattctgtttatgatgcctataaaggagttattgtattttgccgtctgatggacgggcgtgtgcgtaaggggactactatccgtatgatggctaccggttttacagcagaggttgtggaagttggatatttcggaccggggcagtttattccctgcgaagaactgagtgcaggtatggtaggatatattactgcaagcattaagaatgtaagggatacccgtgttggtgatacagtgacagatcataaccgtccctgtaaggaagcactgcccggatataagaaagtaaatcctatggtttactgcggattgtatccggctgacggagccaaatacggagatctgagggatgcactggaaaaactgcagctgaatgacgcatctttgttttatgagcctgagacatctgttgctttgggctttggattccgctgcggattcctgggactgctccatctggagatcatccaggagcgtttggaaagagaatataatcttgatctggttacaactgcgcccagtgttatttacaaagtccataagaccaacggagaggtgatcgatctgaccaacccaactaatcttccggatccatcggagatcgagtttatggaagaaccaatggttcaggctgagatcatggtgactacggagtttattggtgcgatcatggatctgtgccaggaacgccgcggacagtacggcggcatggagtatatggaggagacaagggcacttttaaagtacaagctgccgctgaatgagatcatttatgatttctttgatgcattgaaatcacgttccaggggctacgcttccctggattacgagctttgcggatatgaacgaagtgagcttgtgaagctggatatcctggtaaataaagaagaagtggacgcattatcctttattgtccatgcagatactgcttatgagagaggcaggaagatgtgtgaaaagctgaaggacgagattccaagacagctttttgaaatcccgatccaggcagctatcggcagtaagatcattgcaagagagacagtaaaagccatgcgtaaggatgtgcttgccaagtgttatggcggtgatatttcccgtaagaagaagcttcttgaaaagcagaaggaaggcaagaagagaatgcgtcaggtaggaaatgtagagataccgcagaaagcatttatgagtgttttaaagctggatgagaattaaggctctggaggaatactaatgaaagaaaaaatcctgcaaatcctgaaacggatttcatattcagtgaaaaagagcataaggcgaaaccggcagctgtggatccgcggcgggatcatggctgtaggtctgctggtgatcgtgatctttatcgggaaatgtgcctgcagcaagaagccagccggaacccaggatgaaagctccatgggggttatgaccattaccgtggctccgtctcccacgccgactgaggttccaaggcaggtaagtagtgatgcagctgttaccaatggcaatgttaccatggttaatgaatatctggtgcagaaaggaaatgacagcagcacaaaggcagataacagcagtgccgcagataataatggcagcggagaggacagcgatacttcaggtacaaatggagacggcagtacagatggaacagaataaaaaaatagaactatatgttcatattcctttctgtgtgaagaaatgtgattattgcgatttcctttctgccccggcaggaaggaatacacaggaacagtatgtacaggcacttctacatgagatccagacagaaggcggcaggcgtaaagaacctgtggcctctgtttttattgggggagggacgccttctatattagaagcagatctgctggagaagatattaaaggctttgtatcgatgtttttatatagaaaaagaagcagaagtaaccatggaagccaatcctggtacgcttaccttggaaaaactgaggatctgcagggaaaatggtgtgaaccggttaagtctgggacttcagtcaccggatgacacagagcttgccagtttgggcaggatccatgattaccaacagtttctggaaagctatcagatggccagggaggcaggctttcacaatgtaaatgtggatctgatgtttgggattccgggccagacaagggatggctgggaaaagagcttgcgcattgtagcagccttaaatccggaacatatttcggcttatagtctgatcatcgaagaagggacaccttttgctgcaagaaacctgaagcttccagatgaagacaccgagtatcagatgtatgaagatacggcacggattcttggggaatatggctttgaacaatatgagatttccaattatgccagaggcggcaaagcctgtatccataatattggttactggacaggtgtttcttatcttggcttgggattgggggcagcttctctgatggatggctgtagatttaccaatacaacctctctggaaaggtatacaacagccagcagaaagccggattttcctgacaatatcaggaaagatctgatcaagctgacccgtcaggagcagatggaggaatttatgtttcttgggctgaggcttagatcgggtatttcaaaggctgagttcgcacagaggtttggtatccctatagaggagatttatggggatgtgatccgcagatataaagaacttgctttgctgcaagaagaaaatgggcggattttcctttccagacatggcatccatgtaagcaatactgtgatggcggattttttgctgtagatatggaaaactaaacagaccccttgaaaaacagatgttcgtgtgctatgctaaacgaagtacaactcgaacatttgtttttgcttgaagaactggaaaacaggaggcagatatggccatagatcagaataataaaaaacagtttatccgcattcgaggagctaatgaaaataacctgaagaacctgaatgtagatatcccaagaggggaatttgtagtgttgaccggactgagcggatccggtaaatcctcccttgcttttgataccatttatgcagaaggacaaagaagatatatggaatctttgtcatcctatgcccggcagtttctgggacagatggagaagcctgatgtagaaagcatagaaggcctgcctccggccatatccattgaccagaagtctaccaacaggaaccctcgttctacagtaggcaccgtgacagagatctatgattatttcaggctgctgtatgccagggtaggaattcctcattgtcccaaatgtggtaaggagatcaggaagcagacggtagatcagatggtggatcagatcctgatgcttccggagcgtacaaagatccagctgctagcgccagtcgtccgtgggagaaagggcactcatgccaagcttctggagcaggcaaagaaaagcggatatgtgcgggcagagatcgatggcagtgtttatgagctgtctgaggagatcaagctggataagaatattaagcataccattgccattattgtagacaggctgattgtgaaggatgggatccagaagaggcttgcagattctattgagacagtgctggggctttctgatggcctgcttgtggtagatactatggacggtaaatatcttaatttcagccaaagcttttcctgtccggactgtgggatcagtattgacgagatcgagccaagaagcttttcttttaataatccttttggtgcctgcccggactgcctgggattaggctataagatggagttcgatatagacctgatgatcccggacaagtctttaagcatcgcaaatggagccattgcagttaccggatggcagtcctgcacagataaaggcagctttacctatgcgatcctttctgccctggcaagggaatatgatttcagcctggatacgccatttcaggaatatcctcagaagattcgggatattcttgtgaatggtacggaaggacgctccgtaaaggtatactataagggacagcgaggggaaggggtttatgatgtggcttttccgggactgatccgtaatgtggagcaacggtacagagagacaggttcggaaaccatgaagcaggaatatgaaagctttatgaggattacaccatgtaccacttgtaaaggtcagagactgaagaaagaatccttgtcagttactgtggcagataagaacatttatgagatcaccaatttatcaatcgaaaaactgaaagagtttctttcggatatccagcttacacctcagcagatgctgatcggccggcagatcctgaaggagattgttgccagagtaggctttctttcagatgttgggctggattacctatctcttgcaagggcaactgccactctttccggaggggaggctcagaggattcgtctggcgactcagatcgggtcaggtcttgtaggagttgcttatattctggatgaaccaagtatcgggcttcaccagagggataatgaccggctgcttcgagcgttgatgcatcttcgtgacctgggcaatacattgatcgtagtagagcatgatgaggataccatgcgtgctgcagattgtgtggttgatattggccccggagcaggggagcatggcggagagcttgtgggtatcggtactgcagaagatctgatgaagaatgaaagatctgttacaggtgcatatcttagcggcaagcttaagatcccggtaccaaaggaacggagaacaccaaccggtttcctgaagatccgtggcgcagctgagaataatctgaagaagatcaatgtggacattccgctaggggtgatgacttgtgtgactggtgtgtccggatccgggaaaagctccctggtgaatgagatcctgtataagcgtcttgccagggatctgaacagagccagggtgattcctggaaagcacagtgatatcctggggatccagcagctggataaggtgattaatattgaccagtctcctattggaaggactccacgttccaatccggctacttataccggcgtttttgatcagatccgtgacctgtttgctgccactgccgatgccaaggccaaaggctataagaagggcagattcagctttaacgtaaagggcgggcgttgtgaggcctgcagcggagatggtattattaagattgagatgcattttcttccagatgtatatgtgccctgcgaggtctgcaagggtaagcggtataatcgtgaaacattggaagtgaaatataagggcaaaagcatatatgatgtactgaatatgactgtagaagaagcacttccgttttttgaaaatattccgtccatccgcagaaagatagagactttatatgatgtaggactttcttatatccggcttggacagccttctacaactctttccggaggagaggcccagcggattaagctggctgcagagctgagcaaacgcagtaccggaaagactatttatattttggatgagccgaccacaggtcttcacttcgcagatgtgcacaagctggtggagatcctgaagcgcctttctgaaggaggaaatactgtggtagtgatcgagcacaatctggatgtgatcaagactgcagattatatcatagatataggcccggagggcggcgacaggggcggcactgtggttgcctttggtacgccggagcaggttgcagccaacccgttctcctacaccggccagtacgtagccaaatatttacggtgacaagagctttctttttggcggggaattgcgtataataagaaaaacgtaactgtgtttttaacagttacagttctgggaaaataaacaggaattaaagggaggttcacaatgccggcaagcgatataggaattgatcttggaaccagaaacagccaggtatattctaccgggaaaggccttgtgctgatggagcctacagtagcagtatatgataaagattcagaaaaaataaaggcaatgggagaggaagcaaagcagatggcagggcatgtttcttccaatatggagattatctggcccattcgccaaggtgtgattatagattacacagttatggagaaaatgctgaagttcttcatttcaagggcaatgggacgcagagctttccgcaagccaaggatcagcatctgtattcccagcggcaccactgaaatcgaaaaaaaggctatcgaagaagcgacctaccaggcaggagccagagaggtttttcttgcagatgagccgattgccgctgctattggtgcaggtgtggatgttacaaaaccgtttggcaatctgatcgtggatattggtgcaggtactacagatattgcagtgatttctatggcaggagttgtggtatccagttccattaaggtggcaggagataattttaatcaggccattatgggttatgtgcggaaagcccacaatctgtttataggggaggatgcagcagaaagaatcaagataaagatcggtactgccatcgaagaagcatctcccaggactatggaggtgaaagggcgcaatgtgatcaccggactgcccaagacagtgacccttacctctgaagaagtaaggatggctcttagggaggctacaggacagattgtagaggctgtacatggagttctggagaaaacaccgccggaacttgccgctgatattgtagacagggggatcgtgcttaccggcggaggtgcattgcttcatggcatagataacctgatcgaacagaaaacaggcgtaaatacgctgactgtacaggatgccatcatggtagttgctgcaggaacaggaaaatatgcagagatcatgtcaaggatggatgattagaaagaatgagtgagaagattaccggttatattgaccatgtggttttccgtaataatgacaatggatatacagttatggtggtgaaaggcacaaaggaggaagaactgacttgtgtaggcagttttccttctattagccagggcgtgactatagaggcggaaggcacttacactactcatcctgtttacggaaagcagtttcagatacacagttatacagaaaagatgccggaagacagccttgcaatggaaagatatcttggatcaggagccatcaaaggaatcggggcggcgctggctgccaggatcgttcggcattttggagaagatacacttcggatcgtagaggaggagccagaacgtctttcagaagtcaaagggatcagtgagaaaaaagcgcgggagattgctgcccaggttacagaaaaggcagatatgaggagagccatgatctttctgcagaaatacgggatatccctgaatcttggcgcaaaaatataccagaaatatggccaggctgtttacggtgtgcttcaggagaatccgtaccgcctggccgaagacatttctggcgtgggatttaagatcgcagatgagattgcatccaggatcggtatacatacagattcggattacaggattcgcagcggtatgttgtatactcttatgcaggcttcaggtgaaggtcatatttatctgccccaaaaagagctttttgaaagagcttccagactgctggatgtggattcctcctatatggaaaagcatctgatggatatggctattgaccggaaacttgtattaaaagaaacaaaagaggctactctggtttatcccagcaaatattatcagattgagctgaatacagccagaatgctgaatgaactgaatattaaatgtcctgagaatgaaaaactggtagagcgcagattggcccagatacagaaggaaacaggtactgtcctggatgaaatgcagaaaaaagcagtaaaagaagcagcagaaaatggcctgttcattcttacaggaggtcctggcacaggaaagaccaccaccattaatgctattatccgcttttttgaaggggagggagcagaacttcgacttgctgcgcctacaggcagagcggccaaaagaatgacggagaccaccggatatgaagcacagacgatccacaggcttttggaactgaacggtgttccagatgaagagcatgacaatcaggctattcattttgacaggaatgctcagaatccgctggatgcggatgtgatcattattgatgaaatgtccatggtggatatttttctgatgcattctctgcttcaggccattactgccggcacaaggctgattcttgtaggagatgaaaatcagctgccaagcgtaggacccgggaatgtactgcgagacattatccgcagccaggtatttcctgtggtggaacttactaagatcttccggcaggcgtctgagagcgatattgtggtgaatgcccataagatcaaccgtggagaacaggtatccttagataacaaaagcagggatttcttttttctgaagcgatatgatgcagatattatcatccgcgtggtgatcgcattgatccaggagaagatgcccagatatgtggaagccagaccctttgagatacaggtgcttacccctatgcgtaaaggacttctgggtgtggagcggctaaatcagatcctgcagagatatctgaatccgccggattcgggtaaacgggagtatgaagccgggcagcagatgttccgtgaaggggacaaggtgatgcaggttaaaaataattatcagatggaatgggaagtgcggggcaaatatggcattcctgtagaaaagggagtaggcgtatttaacggagacaccgggatactgaaggaaatcaatgaattttcagagattgcatctgtggaatttgaagatggaagatgggcagagtattcttttaagcagctggaggaactggaactggcttatgccattaccatccataagtcccaggggtcagaatatccggcagtgatccttccgatcctgtcaggaccaaggatgcttctgaaccgtaatcttttgtatacagctgttaccagggcaaggaaatgtgtaactgtagtgggaagtgaagaaacttttggggagatgatccgtaatgaaaagcagcagaagcgttacagctctctggacatgcgtatccgggagcttgctgaatcttctttatcccagacgatgtcctttgtgccatcaggtaatgaaggaacaaaggcggctgatttgtccggaatgtgaaaaagatcttcatcctattaccggcccaagatgttatcactgtgggaaaccgatcaaagagggagaagaatactgtgcagactgtagatctcatccgggcgcatttacagcgggaaaagggatttttctttacgatgacaggatgaaggcttccatgatgaagtataagtacagcggatgcagagagtatggacgctttttcggaagagccatgtgtgtctatggtgcgaattccattcgcagatggtcaccggatctgatcgtacctgtccctatgactgccgcaaagctgcggcagagaggatttaatcaggcagtggatctggcagggatcgttgctgcgtggatgaagcttcctttggataccgggcttgtacaaaagatcagacatacagatgctcagaaggagcaggatgcagcaggacgtcgccgtaatctgaaaggtgcttttgaaattaccagaagaattgacggaatgcgtattttgatcattgatgatgtgtatactacaggcagtaccatggatgagattgccggatgcctgaaaaaaagcggggcagaggcagtgttttttctcactctgtgcagtgggatccattgattcatggcaaaaaatgcttttcacagcataggatatatgatacaatcaatctatatggttaaaatgcgtttatagtatcaaaagcaaggagtcatttatgatcaacgaagagaaagtcaagataatgaacaggcttgcaatgtatgaaaagcggggcgggaagaagtatctgcctgtcagcagatattaccgcagcgattatatcgggcttgcattaattaaaaatttttttctggttactattggatatgctctggttcttgcagcagtagctgtatattattcagaatatcttatgaataatattaatcagatggatctggtcagtctgggcatgaaagtggttggcggttatgctgtggtgctgatcagctattcggttcttacttatattgcatatactgtgaaatatcactgtgccaagaaaagtgttaagaagtattatgaagaactgaccaaactggagaggatctacggtcgtgaagagaaaaagaattccggacgggaaatcacaggaggacgtaaaagatgacagcactacttgaattaaaacagaaaattaaaaacctgtatgggcaatatgaactttatcttcttcctgtattcaaatttgttcttgccatgctgtattttacctggatcaatgaaaatatgggatatatgagccggctgaacagtatgtttgttgtgctgatcctggctctgatctgttctatactaccatctgttgtgacagtatatgcaggatttatcctgatgatccttcacagctatgccttgagcctggagactgcagggtttatgctggtactgattctggtaatggtgatctttttccttagattcagcggcggacagaatactgtgatggcttttacaccgatcacctttatgtttaatgttccggcgatcctgcctattggcagcggccttatgggcaatgcagtatccgctattccggcaggatgcagtgtggtattgttttattttatccgatttatcaaaagacagtccgcttcactgatgaacacagatctggaagtggcagacaagctgcagcttcttgcagacgggcttgcacagaattggggtatgtggatcacagtagttgcttttgttcttgtggtccttgttgtttatctgattcgtacccgtgcttttgattatgcatggaggatcgctattgttgcaggcggtgtgacttatgtgcttgtgatgctgggaggaagtcttttcctgaacgcaactgtttccatgccggcactgatcacctgtgcagttttgtcagtggtatttgccattattctggaattctttgtatttggaggggattacagccgtacagagagactggaatatgaggatgatgaatatttttactatgttaaggctgttcccaaggcgtctgtatctacttccgaaagaagcatcaagaagatcaacggagagcctataagggaagagagacgttccgaagaaaagaaagcggtatctttcacagagcctacgcaggctgtaagtgacaaaccaaagaaacgaaggacagcgcctgcacctacgccaagaaaggcaaagccggtttcaaaggaagatgatatggatgaaattgactttgagaagaaactggaagagtctttgaaagatctgtaataacaattcagcagtcggtgattacaaggatgctgaattgttattacctgtaactgtaaaccaaaccggcgccaaagcagcgctgattacaataaatgaaaggagaccgttatgcaggatattgcagttatacttgccaggtatcttcctaagctggcattaccgcaggttggaatcactgatgtgatcgaaattgccctgatatcatttttcgtatatcagttcatggtttggatcaaattcacccgtgcatatacactgctgaagggtatcctgatagttcttgggtttatttttattgcatatgttttccagatgagcaccattctctggatcgtgaagaatttgtctactgtgctgatcactgcagtgatcattatttttcagccagagcttcgtaaagtgctggaacagcttggacagaaaaagatcatgtctgcgatcccattgtttgataccagcaaggaagtacaggagcgttttacagataagactgtgaacgaactggtcaaggcctgctttgatatgggagaagtaaagaccggtgctttgatcgtgatcgagcagaatatccgtcttacagaatatgagcggactgggattaatgtagatgcagtgcttaccagccagcttctgatcaatatttttgagcataatacgcctcttcatgacggagcggttcttgtaagaggcaatcgtatcgtagctgcgacctgctatctgcctctttctgataatatggaactgagcaaacagctgggaacccgccacagagcaggagtagggatcagtgaagttagtgattctctgacgattatcgtgtcagaggaaacaggacaggtatctgtagcgaagggcggaaagctttccagagggctgaccagtgcccagcttcgggaagcacttgtaaaagcacagaataagaaggttgttgataacggtaaattacgccatctgctgaaggggagggcgaaacatgaacaataataggaagcttacagcaaatattccattgaaaatcatgtccatcctggtggggatcctggtatggcttttggttgtcaatgtggataatcctattaagaccaggacgatcattattccaggggagaacgtggaagtgatcaataaggcatacgtggacagtgacaataagatggttatgcaggatgacaatccggatcctgtaagggtttctgtgactgcagagcgcaagacccttgcacgtctgacggcttctgatatatctgtagtagctgacctgcagcaggcagggaatcttgatacaaagccggtgatggttcctattgcagcaagctgcagcggtgtttctgctgataacataaaagtgacacctcagtatctggaggtgcgtctggaagaaaaagcctcccaggatttcttggtgaatgctaattatggcaccagtacaccggggaagggctatgaggtaggcactcagactgcaagtccggaaaaagtaaggatcacagggccaaagtctctgatcaataaaattgataaagtaaatgctaccgtgaatgtggacggcaaaacaaaagatgtgacagaagatgttaatcttcagattattgataagaaccaggacagtcttactgacggcaagatggcatatctgaccattgacaatcctaaggtaacagttaccaccaagttttggaagatccgtacaggtgtgaagctgcgtgccggttatacaggagaagcggcagatggttatcaggtagacagtgtgactacagtgcctgacaccatcagcattgcaggtacggatgaggcattagagaagctgagactggaagataatacattgtggatctcaggagatggtgtagatatctccggtgagaagggtgatatggaaaagaaggtaagcctgaaggatgtgcttcctgaggataccaagcttacaagtggagccagcgaggatgtgctggtgcgggtatctatcctgcctgttggcagtcgtacattcagtcttcctgctaatgagatcgaagtggataacaaaccttctgatctgcagttcgcttttgacacagatagtatcagtgtgaaggtaaaggctgtagacggggatattgatgagtttgatgtttcggatattaaggcatccattgatctggatggaaagacggaaggaagctatgaagtgcctgtgacagtgaagctgccaaagggctatgagcttcttgaggatgtgaccacagatgtgacgatctccgagatctccaatgtggaagataataatggataaggggtgataaaatggtaagtcagaaagtaattgtgaacaatccatcaggactgcatctgcgtccggcaggaatcctgtgtaaggaggcaatcaaattcaaatcattgattacatttacattcagtgggggaactgcaaacgccaaaagcgtactgagcgtgcttggggcatgtgtgaagtgcggagatgagattgaactggtgtgcgaaggtgcagatgaaaaggaagcactggaagcattggtaaaggcaattgaaggcggattaggggaataaggagatcttaagtgaaaaaaagaattgtatctatgcttttgtgtgcagctatgtgtatgacagctgcgccgtctgcttatgctatggaagtggattcttttacagagactgctgcagaagggtcagatgagggttttgaggatttaactgctgtaccatcaaaggaggcaggtgaaacaggaactgagtcagaaactgtgacagggactgaaacggagactactacagagattactgatattggccaggatgaactgacgggagcagatgtgcaggagagcactgtacaggaggagccgtccgctgatgcgtccggactggatgcagacagccaggaaagtctgtttaatgatgggaatgtttttgctggtgaggatctttcagcacaggaagcaggtaatactgccggaaactggcgttgggatcaggcatcaggcgctttttcctactacgattcatcagggaaacaggtggctctgcctcaattggatcaggaataccaggcgcggggaaaatacacaggatattatctgatcgatggaaattattactgcctggatgagcatggagttccacgtacaggtatgatccagcttactgcgaacggtgtgacttccacctattatttccaggaagaaaaagatgcttatggtattgcaggcaggatgttctatggcggatggctttgccggcagacagatcagggtgagatgtggcagttttttaacactggcagagacaatgcggccgatctgggtaagctatatgagcatggaaccattgttaccaaactggatcctgctgtaaaaggagacagatcttatcttctggataagaatggctatatccttaaaaatgctatgaagaaggctgagaatggcaagtattatctgacggatgcacaggggcagatctatatcaataagatcgtcacttataagggcagcaagtattatgtgggcaagtatggcagccgtgcaacatggaagaactgctggcatcgttgtacaggtgcggggaaccggatgtattacttcgggaaaacacctggcaagatcgtcaaaaagaccggctggcagaaggtaactgtaaatggtaaattttatggatggttctattttacaaagaatggaaaccattataagaacaagctgctgaagtccggttactattttagagaaaacggaaagcttgccggcggcatgtataaggttgggaagaagacatatttctttacaccaagtacctcatccaaaaggaatggcaagatggttaagggacgtctggcaacagacggtaccaattggtattatgcatataagactggtgtacttcgtaagagtggctggcagaaggtgaagggcaattcctattacttcaagaattacaaagcagttcgcaatacatttatcaaaaaaggaagtacatacggatatctggacaatacaggaagatttacaacaggatgggtgattgaaaatgattcaaagaatctggtccggtatattgacccatctaagaaaggctttgtgaagaatacatcctgtgtgattgatggtctgcgttattactttgatgcagacggttacaggatcaatgatgtgactgatcgggtggctggaccatattctgttacagtagaccgtgtgaatggggttatgactgtatataattccaatcgcaccattccggtaaagagtatccgcgtttctgttggactaccatccacacctaccccggtaggtacattcaggcttagccgcagcgccagatggcagccgttgatgggtaattcctggggacagtatgggacacatgtaactggcaatgttcttgtacattccgtaccaggaggcagcccggatgtatatgcacttccggcaggattttacaatatgcttggagagcctgcttcccatggatgcatccgtgtatgtgtagcagatgccaagtgggtttatgagaactgcaatggatctgcgattactatttttgatggcacagccaggagcgaagaagtattcaagggaccgttgggacgcaatccgctggtagctctgcgtgcgccatacacttttgatcctacagatccttctattacaaaataaattacaatgggagatgttgctgcggcagcatctccttttttacaatgcaaccagtgatactattttgcctatgtttgttttctgtactgtttcttgtggtgattgggtgtgatagtttagaacggtgcggaaaatcttgttgaaattcaggggattcctatgtataataaacaagtaacaaaaatgtaataattttgataagttttggtgctgattcctcaggagagtcttttaagctcaggctgggaaagcgtcaactgtgaggagttttgttaagaaaggatttggagggtataaatgaaaaactggaaaaagtggctgacctgcgggatgcttgcaatggcattaggaacagcagggatttctggaacgaaggatgtaaaagcagaaagtgtgaatccggcattactgcggcagaacgtagcagaaggagaagaggttccacaggtaggagcttccagctcttctgctgtggataaacgtgcatggagacggatcaacggtgtgtgttataatggcagcggcgcagagattcccggagtggtaacaagaggtatcgatgtatcagaatggcagggtaagatcaattggcagaaagtgaaaaattcagacattgattttgcttttatccgcatttcctctggtacagattatatggataagtattatgattataatatgagttctgcgaatgaagcagaccttccggttggaacttacgtatacagcaaagccaccactaccactgcagctttaaaggaagcacagctggccatcagtaagatgaacggctacaaggtttcttatccggttgtatatgatattgaatattccaaaatggaatctttatctaagaaccagatcgcaagaatgacccttgccttctgcaatgaagtgaaggctgccggatatacgccaatggtttatatgaatacccactggtataaagaaaaggtaaatatgagtatgctgtccggtcttgacgtatggatcgcaagctacagtgataagaatcctgcaccagacagaagtgtatacaattatgggatctggcagtgtacagccgggaatcttggagaaggctcttacatgcgtactaccaaagggctggtagcaggtattcctaaagaaaataatgtggacctgaattatggctttgtagattatactacacgtgtgacgcccagatggtcagcaagggaaggatatacccctgcaacagaagcatctacagctgatatatctgtaaaaaatggctggtatacagaaaatggcagacagtgttattacatcaatgatgagcgtgtaaagggctggaagcagattaatggtaaatactattacttccatccagtatccggtaatatgtacgtgaacagccttgtaaaagtaaatggtgtagtgtattatgtggacaaaaatggtgtacgtactgccaaacgctgggtaacaaaaagcggcaacaaatattatattggcagcaagggcattgccttaaagggcagccagaggatcaaaggaaaatattatttctttgatctggacaccaggatcatgtacaggaataaaaagctggtaaggaatggaaggatcttctatttcggaaataatggtgtaagatttaacggaggatttaagaccatccgggaaaatggagtatataatacctattatttccagaagaacggacaggcaaagaagggatggctgagattaaacggtaagaaatattatttctatccttctggtgacaaagcaggtgtatgtgcaaagcatacaagaatccggacagccagcggaatgatctacgtgtttgataaaaacggtgtctatgtgagacgatataagcggaaataaagagaaacaggtcaatacagcctgtaaacaaaaagctaaggaaaacatacgcaaataaggataaacagggactatgaagaaaattgtgatcatcggagcaaatgattttcagcgcccgctcataagaaaagccaaggacatgggttatcagacccatgtctttgcatggagagaaggcgctacaggtgcggcagatgcagattacttttatgagatcagtattactgaaaaagaaaaaatactggagatctgtaaacagatccagccggatggagtagcgactattggctctgacctggcaaatataaccgtacagtatctggctgaaaggctgggacttccaggcaattcggaagagtgtatcaaaaactctaccaataagtatgccatgcggaaggcctttcttctggctgggatccctgtacctttttttacgatcgtggaagaagaggacaaggtacagataccggaatatccggtgatcgtaaagcctacagaccgttcagggagcagggccatcacaaaggtaaataacccaagggagctgaaggcagctatcactgccgcagtcagtcagtcctttgaaaagaaagccattgtggaaggctatctttccggggatgaatatagtatggaaaccataagctttgcaggacagcatcattgtctggctattacaaagaaatataccacaggaactcctcattttattgaaacaggtcatttacagcctgcacctcttcatactgaaacagaagaaaaagcaaagaaaatgatttttgcagctttggatgccctgcaggtgaaaaatggtgccgggcacagcgagttccgtattgatgaaaagggtgatatccacattattgagatcggatccagaatgggcggggactgtatcggctcacatctggtgcctttgtccacaggacaggattttgtaggaatggtggtggacatagcattagggaatgcgcccaaatttgcccggaagcaggaaggaatgtatgcagccattcgttttatcatggatgaaaaagatcttcaggcttattaccaattaaaagaaacgtgccctgagatcatccgggagtttgtgctggacagtcagcctggctcccatcctattacagacagtggctccagatatgggtattatattgtgcagaccgattctctggagcaggcccgcaaaatcctgagctccgtcagttgacagtatcggacaaaaacgctatgatatgatacagcgataaccgggcggttcatgccctgatttttaagaagaggtagggattccatgaagaaactgatgatcctgggagccagttactctcagatgtcactgatccaggcggcgaaaaggctggggatttataccattgtctgcagcacaccaggcagctggccaggttttgcagaagcagacgaatgttcctatacagacatatcagatccacaggcagtgctggcagaggcaagacgcacacagatccaggggatcaccacctgttgtcttgatacaggagtaccggctatagggactgtgtgtgaagctatggggcttaccgggccaaaagccattcctgcacagacagcctctgataaatggaaaatgaaagaagcctttgtaaaggcaggggtacagactgcacggcatatccgtgtaagatctgaggaagaactggaagccgccctttcccagcttacctttcctgtgatcttgaaggcagtagacctgatgggaagcagagggattttccgcagcaatacaaaagaagaagcaagagccaattacaggcttactatggaagctacagggaaggattactgccttgtagaagaatttatagaaggcactttatttggggcagaagctatgctgaaggacggaaagtttttgtattgccttctggataatacagaagctttcatcagcgcagtgcctacaccgataggacattctgtgccttttgatgaagaggaagctcttggcgcgcaggccagggagcaggtgggcaaagcagcaaaagccctgggacttgataattgtcctgtgaactgtgacctgatctggaaggatggcagggtttatgtggttgagatcactgccagggcaggagccacttgtctgccggagattgtaggagagttttttggtatcaattattatgaagccattgtaaggctggctctgaatcttggggttgaagagatgttccatctggatggagaacatcctgctgttttgtcacatactctgttatctttacgtgatgggatcgtaaaagagatcaggaatgacaatgcaccatccggggatatcctggatctttctttcaacatttgccctggagaagagatacacagatatcgtaatggcagggacaggctggggcaggtgatcctgaagggcagcacacttacagaatgcagaaagagacttcaggaagttttatcaaaaatacacattgaatttatggaataattatgggaaaatagcatgaaagagaatggaaagcaaaagacagcaggactttttctggttctgcatgtaagccttctgatgagttctttaagcggtgtatgttccaaaatggcagccaatcagaaaagtttgatcggctttgctttatggtatggaggcgttcttctgatcatggctttgtatgccctgatctggcagcagatcctgaagcatctgccattgacggtggcttatgctaataagccggtaagcttgatctgggggatgatctggggtacctttatttttggtgagaagatcacctggaatatgatccttggggcactgatcatttttggaggaatttacctggtggtgactgctgatgaatgaactgcagatttatatatgtattctgatcgtatccgtatttgtggcatccctttcccagatattgctgaagatatctgccaataagacatacagggacagacttcacgaatatctgaatccttatgtgatcacaggatacggacttttgttcctgtcaacacttcttacaatggtggcattaaagaaagtacccctttctctgtcgcctgtgattgagtccagcagctatatatttgtgtccctgatgggatatctggtgttgaaggaacggtttaccaagagaaaacttctgggactgctggtgatccttgtggggatcctggtattctcattataaaaggagaaaaaatgcttttatcaattgtaatcccctgctacagatctgcccataccattgagaaggtggtggagatgagcatggaggtgattcggacgatccccggactggactgtgaatttatcctggtgaatgattgttccccggatgatacctttgaagctatccgcaggctgggcatcaaatatccgaatgtaaagggaattaatctggccaagaattttggtcagcataatgccatcatggcaggacttcatgaggcaaaaggggattatatcatgggaatggatgatgatatgcagacccacccgtcgcagatccctgcctttattaaggcgatggaagagggatatgatgtagtctttggaatatataagaaaagaaaattcagtttcatgaagaatctgaccagcaagattgcttcatttatcgtttggcatatggtagaacggcctaagggactggaggctagcaattactggtgctgccgcaggtatgtgcgggatgagatcgtaaagtatgaaggctacaatctttatctgcagatcctgttttatcgaactacttccaatattgctaatattgagatccagcatttttcaagagaagaaggaagctccaattataattttaaaaaggcgttccgcttgtttatgtcttttctgaattatacagtgatccctcttcgggctgcagaggtgatgggagttctgttttcccttaccggatttatactggcagtggctgtgctgatccagaagctgtccaatcctgatgtggctatgggctggtcttccctgatgtgtgccatgctgatcttcttcggtattacatttctgatgcttggagttatgggagaatatatcggtaagatgattctgaaccagaataaaacgcctcagtatgtaatacgggaaacagtaaatgttcagaaggtagatgctcagaagatagatgctcagaaggcagatgctcaggaaccggcagaaattatacagaaaaaaggacatggaaaagctgatgattgattttaacaggcctgcctatacaggcaaagaaatggaatatattcaggatgctgtacaaagaggcatgctgtgcggtgacggggaatataccaaacggtgctccagatggatggaggaaaggtttcatacagcacatgtaatgcttaccacttcctgtacccatgcactggagatggctgcttatctgtccgatatacagcccggggatgaggtgatcatgcctgcatatacctttgtgtctacagcagatgcttttgtacttcgtggcgccaggatcgtatttgtggatatccgtccggataccatgaacattgatgagaatttgatcgagccggccatcacagagaagaccaaggcaatcgtagtggtccattatgcaggagtgtcctgtgagatggataagattcttcagatcgcacacaaatatggactgaaggtagtagaagatgctgcccagggcgtaaatgcttactacaaaggcaaggcgctgggaactatcggtgattttggctgctatagcttccatgaaacaaagaattataccatgggagagggcggtgctattttatttgataaagatgagtatcaggaaaaagcagagatcctcagggaaaagggaactgacagaagtaagtttttcagaggccaggtggacaaataccggtggatggattatggttcctcctatcttccaagtgaactgaatgcagcctatctttacgcacagctggaggtttgtgaccagatccaggataaaaggatggaaatctggaattattatcatcgagagctggaagctcttgagaaagaaggcaagatcacacggcctgtgataccggaaggatgtatccataatgctcatatgtattatttgaaagtgcgggatatggaagttcgtactaagctgatccattatcttcgggaaaaaggtatctgcagtgtatttcattatattcctctgcatacagcaccggcaggaaagaagtttggccgttttgcaggagaggaccgatatactacaaaggaaagcgagaaattgttaaggctgcctatgttctacaacctggacatgaaggatgtggagtatgttacagagcagctgaagtcctttaaggagtattaagcaagttggatttgtgaccaaaatatagaaaatggaaagccaaaaaaggcagaaaggaaatcaaaatgggaaagatcaaagtgacaccatgtggagatattgaaggattgaaggtaatcgagccaactgtttttggagatgcccgtggttattttatggaaacctacaattacaatgatttcaaggaagcagggattgatgtggagtttgtgcaggacaatcagtccagttcccactacggagtattaagaggtcttcatttccagatcaattatcctcaggataagctggttcgtgtggtaaacggtgaagtgtttgatgtggcagtagatttacgagaaggctccaaaacctacggcaaatggtttggtgttgtgctttcagcagaaaataaaaaacagttctttattccaaagggatttgctcatggatttctggtactttccgaaagtgcagagttcacctacaaatgttctgacttctatcatccgggagatgaaggcggcctgatctggaatgatccggatattggagtagaatggccgatccctgaagggatggagcttactttctctgacaaagaccagaaatgggggagctttaaggagttccatagataggagagaatgaatgcttaagacgatattttccctgccggcggatgtatacaaaaaccgccggctggttatgaaactggctaaaaatgattttaagaccagatacgcaggttcctattttggaaccttctgggcatttgtgcagcccattgttaccattatggtgtactggtttgtattttctgttggcttccgccagaatacagatgggatcgggattccttttgtactgtatctggtagctgggatcgttccctggttctttttccaggatgccctagtaggcgggaccaacgctcttcttgaatataattaccttgtaaaaaaagtcgtttttaacatcagtgtgcttcctgttgtgaagatcatttccgcactgtttgtacacggctttttcgtggtctttacaattattttgtatgccttctatggaagattgccggactggtattatctgcagatcctgtattacagtatttgtgtatttatattgtccttaagcctggtttacattacctgtgcagtggtggtatttttccgtgacctgacccagatcatcaacatcggcctgcaggtaggcgtatggcttacacccattatgtgggtggcagatacagctttgaaggaccatccgctgatccagaagatccttcagctgaaccctatgtactatattgtttccggttacagggatgcatttgttgtaaaacggtggttttttgaaagaccattatggaccttatatttctggctctttaccctggcttgtttctgcttcggaaactgggtatttaaaagactgcggatccatttcgcagacgtactatagaaaggaatcaacctgttttgagtgataaaaatgtgatttcagtccagcatttatcaaaaatgtataagctgtatgacaagccctctgaccgtctgaaagagtctcttggcttgtccagaaagaaaaaatacagggagcattatgcccttcatgatgtgaattttaatattcacgaaggagaatgtgtagggatcatcggagtgaacggttccgggaagtccacgatccttaagatcatcacaggagtgctggcacctaccacaggggaagtgaaggtcaatggacgtatttctgcccttctggagctgggagccggttttaatatggaatattccgggcttgagaatgtgtatctgaacggtaccatgatcggcttttctgaggaagagatcgacgcaaagctggatgatattcttgcttttgcagatattggagattatatccaccagccggtgaaaacctattccagtggtatgtttgtacgtcttgcctttgcagttgccatcaatatcgatcctgagatcctgattgtagatgaggcactgtctgttggtgatgtatttttccaggcaaaatgctatcataaatttgaagagtttaagaaacagggaaaaaccattctttttgttacccatgacttaagcagtgtgtccaaatattgtgaccgtgtgatccttcttaacaaaggtgttaagctggatgaaggctcaccaaaggaaatggtggatctgtacaagcagctgctggtaggacaggagcctgtgaaacaaaaaacagatgggggcgagggccttgcaaaagcagccgtagcgtccatcagccatgaacattttctgccaaatcctaatactctggagtatggggacaagcaggcggagatcgtggattttgcaattaaggatgataaggggatgttcaccaataccatagaaaagggaagcaccttccagatccttatgaaggttcgatttaatgagcagatccaggagccgatcatggcttatacctttaagaatattaggggaacagagctgacaggcaccaacaccctttttgagaaagcagaagtgccggaacctgctcctggaggatgctgcacagttacctttacacagaaaatggatctgcagggtggagaataccttctgtcctttggctgtaccggctataaggacggggaattcaaggtgttccacagattgtatgatgcgtgcaatattaccgttatttctgctaagaatacggtaggcttttttgatatgaattcgactgtaacggttcaggaggatgatatatgaggaagatcggtaatgtgatcctggatgatacctgctatcagggcagggatttatatacagatggtgctattgaggatgaaatgctggagatcgccagaaatgtaagcccagacagatttaataaggtgatcggggaaaagaaaagctggcccattctctatcatttttcacatatcagagagaatatccttagctggatgccttttacaggcaaggaaaaggtgctggagatcggttccggatgcggtgctgttacaggtgcccttcttggcggagcaggtgaagtgacttgtatcgatctgtccatgaagcgcagtgagatcaatgcgtggagacacagagacagtgagaagctgaagattcttgtgggaaattttcaggatgtggagaagaaactaacagagaaatatgattatattactttgatcggtgtatttgaatatggagaggcctatatccagagccaggatccttatgtggatttcctgaagattatccgaaagcatctgaagccagacgggaagatcgtgatcgccattgagaaccgttttggtttgaagtactgggctggatgtacagaagaccattttggtactttatttgaaggaatccaagggtatccatccacaaagggcgtaaagacctttactgtaaaagaactgaaaaagatcttccgggaagcaggcggctttgaaagtacctggtattatccattcccggattataaatttcctatgaccatttattcggacagaagactgccaaggcgtggggaactgaatcgtacagaatataattttgacaggctgcgtatggaactttttcaggaatcagcagtgtatgattccattttggataatgatctgtatcctcagtttgccaattctttcctggtagtgatcgggcaggataaatttgaaacagagacagcctatatcaagtattccaatgaaagagatccaagatttaatatccttacccagatctgccagaaaccagatggtagccattatgtacaaaagcttccgactgggtcaaaagcagaagctcatgtaagtaatatttatgataaaggacaggctttagccccgctttttgaaaaagaaaagctttatgtcaactcctgcgaaaaagtatcatatggggtaaaactggaatatctggaagggatttccctggaggagaaactggatacacttctaaaagaaggacagttagatgaggcagaaagccttttatttacttatcttcataaggcagaacggctttacggcagccaggattttaaggaatcaccggagtttatacaggtgtttggccaggctgggcttccagaaggcttaaagggcggcatgcttgcagatattgatctggttccggccaatatccttcttggaaaaggcaaggactgggtgctggattacgagtggacctttgatttttgcgtgcctgcacactttatcatgtatcgtatgcttcattattatctggaaagtgacggaaagcgtcatgtgctgaaaaacagagacctttatgaaaaggctgggatcagccgggaagaacaggaaatatatgcgaagatggagcagcatttccagaaatacatggtcggaaagcatattcctatgctgtctctgtatgatgagatttctccaggcaagctggatgtaatggaatattatgacaggatccggggctgtggagatgagagaaagcttcaggtatttttcgacaggggacaggattttcaggaaagagactcttttaagtatcctatgaccaggagagggctatgtattgatatccctgtacctgcaggcacaagacggatgcgtcttgatcctggtgaagtgccgggaggttttaaaatcagcaggatccggtggagagatctgggaagggcagccttccatactaatgggtttgcacttggtgatcactgctactattttggcggtggagatccgcagatcattttggaaaatgtgccaagggaagcagaaatcctcaccctggagctggaggccttaaaggaacaggaagcagtaaaggaattctggagcagatttgcacgggaagaaaatgaaaaaaatgctcagatccaggatctgaaggctcagctgaagcaaaaagaagtccagatccatgaaatggaaaatacaaaggcatggaagttatacagaaagctgaagccggaaggaaaaggggcttcatcaaagaagcaggagtaaccggatggaacagttagtgtggagtgtagatgaccgtaaataccaggagaagaatgaaaaatccctgattctggaagggtgggcctttcaaagggacagccagcccttacgtttccttcttacagatccggcaggggagcagctcccgatggaggagccggtgcgctttgccagaccggatgtggaagccggatatccggagacatcagggacaaagcaatgcggttttacaataaggatccccaatgcagaagcgcttgtaaagaagcatgaaaagctgaggcttgtggttacagatggaaaagaaaaagccattttgtgggaaacagatccacagcagctttatgatttttgtaaggatcagatgatggaggtacacatagaccgacaggaggtgctgtaccgtaccatgatcgctgcagagggctgggtactttgccagaaaggtactgaccggatcctgcttcaggacggtaaggggaatccggtacccttgaagctgagccgtggacgcaggccggatgtggtggaaagtctggcgcttggcacagaatataaagaaaaagaactgggatttcagatcagcggcaaactggcagatgtggccggaggcaggctggtgttggttttcattgggaatacaggcagggaagagatccgaaaacaagtggaaatcgacctgaaaaagcttcaggcggaaaattcacctgccggcaggcgtaaaaaggtgctggcctgggaaaatcggaaagagaatctggaatgcctgcgaaagaagggaatccgtggatttttgaaatatgtggatgcaaaagccggaatcgtgaccggagactatgagcagtggctgatgcgtcacaaagccgggagaaaagagctgatggcccagcggaaaacccattttccttatgaacctaagatcagtattgtgatccctctttataatacaccattaccttatctgaaggaggcggtggattctatcgtaaagcaaacctacaagaactggcagctttgcctggcggacggaagtacaggagatgagcttaccagttatattcataagcattatggcagggatccaaggatctgctataaaaaactggaaaagaacggcggtatttcagagaatactaatgcggcagtaaaaatggctaaaggagattatatccttcttgcagaccatgacgatgtggtagcaccggatgcactttttcatattgtaaaggccatcaatgaaagtattcaaaaaggtgatcgtccggcagatgcactgtacactgatgaagataagatcagtatggatggtgcccattattttgaaccaaattttaagccggattacaatcttttccgtttaagggagaataattatatttgtcacatttttgtggtaaagaaagaattgttaaagcaggttggacttttttcatcagattatgatggagcacaggattatgacctgatcttgcggtgctgcgaaaaggcggaaaacatagtgcacattccaagggtactgtatcattggaggtgtcatatggagtctacagcagcagatcctgcaagcaaggcttatgcctatgaagcagggaaaagagcactggaagcacattacaaaagaatggggatccaggcagaagtggagatgacaaagaggccaggctggtacagaagccaggtgaagataaagggacagcccttgatctccattatcataccaaataaagatcatgtaaaggatctggaactgtgtctttcttctattgataagaaaagtacctaccgaaattttgaagtactggttgtggaaaataacagcaaccatccggaaacctttgaatattatgagaaaatgacccgaaagtattcttttgtaaggcttctcacatggaaagaaggttttaatttttctgctatcaataattttgcagcagccctggcgaatggggaatatttcctatttctgaacaacgacgtggaggtgcttactcccaactggatccaggaaatgctgatgctttgtcagcagaaggacgtaggcgcggcaggggcaaagctgttttacccagatgataccatccagcatgcaggtgtggtgatcggcctgggaggcattgcaggacatattttctgcagggcgtccggcagtgcagatggctatatgggacgattggtaagcgtacaggaatacagcgcagtgacagctgcctgtatgctggttaagaaagaggattttctgctggtagatggttttgatccggagtttgtagttgcatttaatgatattgatttctgcatgaagcttggacagcataagaaaaaggtagtatttacgccttatgcacagctgtatcattacgagtctaagtccagaggcatggaggatacaccggagaagcagcttcgctttaagaaagaaaccctgctttttgagaaaaagtgggaaaaagagctggccaaaggagatccttattatagcccgaatttatcagtgacagaaggagactgttccttaagagaggtttaaaatgtataaggaaatatttgaggtaacgaaagaacggttccatttacaggatcctacacggtatgttctgcagggaacctggcccaaagaaggaaaaatgctggcttttctggataacagccagttaaaggcagatatccagaagctggagatcgttagcgccatggagcgcttcaaggatccagacaggatccggggagaacggatcacagcaacgatacagcttccacaggatctgaagggctaccataagctgaagatctatgcagacacaccagataaaaaggaattgtggttttccattccggtgaaggatttggagaaaaaaagaggaaagccacagtattatatggaagaggaaaaggtgcaggcaggctgtgtccgtttaaggggctggaccattgctgacggaccggtttcggtccatatttttgatgaaaacaaaaagcctgtccaggcagatatccaaaggactgcacgggtggatgtggaacagctttatgaggaagcaaagaatcctggaaaaacaggattttttgcagaagtaaccgggttttccggtaaagtaatgtatctggtttttgaatgtaaaggcaaaaaatcagtttatgtagtgcacctgcaaaaaccggtgatcctggcaaataaggtggaaaaatatgcgaaaaagggcatgaagtatttgaaatatcaaggccctgctgcgttatggaataagacagtatctaaggtgaaaagtgtttccaccagggaaatcccttattctaaatggatcgagaggcatcttcccacaaagggagaactggaaaaggagcggcgtacaaaatttgatttccagccaatgatctctattgtggttcctgcttacaaaacaccggaaaaatatctgcgcagactggcagaatgtgtaaaagagcagacatatcctaactggcagctttgcatctctgatggaagcggggcagattctcctatcaggaagctgctgcaggagctggcagcccaggatgaaaggatcaaggtcgttttcagtgaaaagcccttgcagatttctgaaaataccaatcaggcgctggcagttgcacaaggagatttcattgcttttgcagaccatgacgacgaattgactcctcatgcgttgttttcctgtgtaaaggcgttaaatgagcatccgggaatacgggtgctttattctgacgaagataaaatgtccatggatgggcacaaattttttcagcctcattttaagccggattataacccggatcttctttgtacagtcaactacatctgccatttatttgtggtgaagcgggagctgctggatcaggttggtatgcttcgcagtgcttatgacggggcacaggactacgattttgtattccggtgtgtggaggcagtgaaggaccaggagatttatcatatccctaagattctgtatcactggagatgccatgaggactctacagcagagaatccggaaagcaaaggctatgcttttgaagccgggaagcgggccattgaagctcattatgaacgtatcggcatttcggcacaggtatttcctggagaatttcctggactttaccgtaccaggttccttcgggacagggatccgttgatctctatcatcattcctaataaagatcatattgatgatctgaaacggtgtatgaatgccattgacagtaaatctacttataagaactatgagtatgtgattgttgaaaacaacagtacagatccggctaccttccagtactataaagatctggaaaaggaaaatccaaaggctcgtgtggtgtactgggatggtccatttaatttctcagcgatcaataactttggggcaaagtatgcaagaggagaatatttcctgcttctgaataatgatacggagatcattaacccggattgtctggaagaattgcttggctattgtatgcgttcggatgtaggtggtgtaggcgcaagactttactatgaggacgataccatccagcatgcaggagtggtgatcggctttggcgggattgcaggacactgctttgtgatgcagccaagagggactacaggctattgccataggatcatctgtgcccaggattacagtgctgttacagcagcctgtatgatggtaaagaaagaagcctttgaaaaggtgggcggtttaagcgaagatctggcagttgcatttaatgatattgatttctgcctgaaactgcggaaggccggttatctgatcgtatacaatccttatgcagagctgtatcattatgagtcaaaatcaagaggccttgaggacacacctgaaaaggtggccagatttaacagggaaatggctgtgtttgagaaaaaatggccggagatccttcgtgacggagatccctactacaatccaaatcttactttaaagagccaggatttttccctgaagaggatttgaatgatatgaaaaaacttataaataaaataagccgggagcagaagacaagacttctgctcctgctggtattgtttgtcagcggcttgatcgtttacagaaattatattttcggaaatgagttgctggtgttcagcgatgtagggggagataccctggagcagtataccatgcattatgcaaccatagtcaatcatcttcgtgaaggaaatttttctctgtgggattttaataatggctttggaaccagtatgtttaacttgaatctgtttgacccgtccctgatggtgctgtatgccctgggagtgatccttggacctgcacacatgctgtttttcctggtatggatacagatcggaaggatcctggcagcaggctgggttttttactggttcctgtcagaattttcctttagcaggcagagcaaatttatattcagctttgcctatggacttagcggttatcttcttgtttggggacagcattaccagtttggaatggtaacggtgtattttccgctattacttttattctgcgagaaatttttaagaaaagagaaaaaatggaagctgtttccggtaatggtatttttttgtgggatctacagtgtgtatttcacatatatgtgcctggcgggaaccggcctgtatcttctgttccgggtaatctccctgaatgggcttaccatccggcagaggatggggaaatttgcaggcggctgtctgcttatgctgttgggacttgggatgagctttgcagtttttcttcctatggcatccattcttttaaatgtaacatccagagtggaacagaagaggaccctggcagatcttttaaaaaggtgttttaccctgaataagcaggaatattatgaaacccttctgcttcgtcctttttccacgaatttccagaatctgcaggaactgggagacaagaaatactatggcttctggaattattatgaggatccggtgctgtttgtttctgttctggcagttttcctggcagtgcagtttctgcttttgttctggaaaagcaatgagacaaagcgtaccagaaggactgcttatggtgcagccttgtttatgttgcttctgatgatcttccctgtaggcggttatgcctttaatgcttttgctacggttacatacagatatactttcctgctgctccctatgatttttctggcagcagcctggacctgggattatctgaaaaagggcggcagagccagcattataggtgtggttctggtttgtatctttatgtataaagcctgcaggatgggctatgaggacagtctttttgctgaatacagacagaacgcagtgatcacggctgtaaccggaacagtaatggcagttgtacttttgctggtgaaccggttgaaagtaaaaggggagcaggtgctttttagccttttggcactggctatggctgcgaatgtgatctgtgagggaactgttggctatgaagacagaatgtccctgaaaaaagaggatacaccggcagaaacagtagtgcaggtaacggatgattatcttgagaagatcgttgaggatccgtccgagcagcaggcaagagattttattgacaagccccaggcatatttccgggagctttacagtcaggacatccaggacattctgggatttttaagggaaacagacaaaagcttttaccgggtggaaaaggacttttcgtctgcgacgatttccatggattccctggctcaggggtacagaggggtcagcacctataattctgtaatgaacagcaatgtaaaggattttgtaaacacctgtatcccaagcttttattatgcagaccggaacaggtataccttttgggataatgctatgaacaactggtttgcagcctttacaggggtaagatacctgatctccaagaatagcagcctggatagcagcaaatatacgctgatccgtcagtttggcagtatgtatctgtatcaaaatgtacgggaaagtgatgtggcaaggttttatgatgaaacggtatcagaaagcagcctgcgggaagcggataaaaagatccggaagaagtttttaagtaatgccattgtgttggaggatggagaagacagggaaagtgcggcaggccttgggaaatcccaggcaaagaagggatcaaaggttgtgctggatgctcctcggaaggacacactggtaacaggcagtatccaagcggcttcagatggatatgtactttttatgattccttatgaggatggatggagccttaagatcgatggagaagacacaaagctgcagaaaggggacttaggcttccttgcatgtaaagtaaaagaaggaaatcatgcccttacccttacttatcatgcaccattgctgaaagaaggaatcctgctaagtctggcattctggattatctatcttatgtttactgtatatacattttttattcatagaaaagacataattatatgataactattagatatccgaattgaatatgtataaagttgtagcgtacaggtagcatcatttcatgatgcgtaaaagagaatccggtgtgaatccggaacgatgccgtcactgtgtaagggagctgcttcagagcccactgggagaccgggaaggggaagcagtgtagaacgaagtcaggagaactgcctttgcgtgggattgtggatctgcgggacacagaaccagtattctcataacattatatgatcatatagtttactgtcggtatacttctgcgaagagggagaagcatctgacaaaaggaacgaatatgttgatgagaagcattgcggtcgcagaaatgtgaccgctgtttttatgcatagttcgtccggaaatacgaaaaaaagaggaaaaaataatgaagcgcaaaacaattatggcactgatcctgtctgtatctatggcagcaagcatgacatgtgcagcaacagcagcatttgcagagacagaagacacagcagagacaacagacgacacagaagcagcagacgacgcagaagcaacagacgacgcagaagcagcagacgatgcagaggcaacagatgatgcatctgctgaggacgcagaccaggaggcagcagataaagtggcagctcttattgatgcgatctacgtacaggagagaacagacgatacagatgcacagtgcacagaagcaaaagaagcatgggatgcactgacagatgcacagaaggaactggtagagggagaagaggcaagccctgagtatttcggaagagatacaggagacgcttccaaggatgatccgagaaaccaggatgagatcggtgagaatgagcttctggttgtaagctttggtacttcttttaatgatagccgtgcacaggatatcaagggtatcgaggatgcacttcaggaagcatatccggactggtctgtaagaagggcatttacagctcagatcatcatcaaccatgtacaggcaagagatgatgagcatatcgataatatgcagcaggcacttgaccgtgcagttgcaaacggagttaagaatctggttgtacagcctacacacctgatgcatggcgcagagtatgatgagatgacagctgctattgaggaatataaagacaaattcgagtctgtagctattgcagagccaatgctgggtgaggttggagaagatgctacagcgatcaatgaggataaagaagctgtagcaaaagctatcacagatgaggctgtaaagattgcagattatgacagcatggaagctgctgctgaagatggtacagctttcgtatttatgggtcatggaacatcccatacagcaaatgttacttacgaccagatgcagacacagatggagaaccttggatttacaaacgcattcatcggtactgtagagggtgagccggaagacacagcatgcgatgctgtaatcgctaaagtaaaagatgctggtttcaagaaagtgattcttcgtccgctgatggttgttgcaggtgatcatgcaaacaatgatatggctggagatgacgacgattcctggaagagcatgtttgaggcatccggagaatttgacagcgtagactgccagatcgaaggacttggaagaatcgatgcagtagaacagctgtatgtagagcatacaaaagcagctatcgacagcttagcaaaataaacggacatgtggccatttgaccacatcaccataaaggagaaaagaaagttatgaagcgttcattagccattttagtatcagcattaagtatttctgctatgacagttcctatgacactgccggtatgggcagaggcagcagacaccaaagaagaagcatccgatacacaggatctggaggatggagtttacattgttgactttaatacagacagcagcatgttccacacaaatgaggcatgcgagggcaaaggccagcttactgtagaagacggcaaaatgacccttcatatctctcttgtatccaagaacattgtgaatcttttcccagggcttgctgaggatgcacagaaggatgacgcagagctgcttcagcctaccacagatacggttacctataaggatggtttatcagatgaagtgtatggctttgatgttcctgtagaggctcttgatcaggattttgaccttgctattatcggtactaagggcaaatggtatgatcatacagtaagcgtaagcaatccggaggagatgaatgatgacaacaagcttcctgtagaggttgctgaagatgaggcagaagataccgagaatacagcagaagatacagaagatgcagaataatcattaaacagatatatccaccatatatgaaagccagccgatcgcgtttcggctggcttttattatggtgggatatattcgctttatgatgcatcctttactgattgaacaggcacaggggcttacacttttgcaccctgatatcaggacttgatgatcttgatcattttaataaataacagaagaaggatcaggaatgccacgcctccgatcactgcataaggcacataggaggtggactgggaataggcctttgcggcttccatattcgcctgtccgttggtataaagagaggtgtcctgttcctgttccggctccatcacagcagtaccaacctgcacaccgctgtagaagtaagtgcggttcacctggtcgcctgcaggtgtgtcctggatcgtcaggctgtccgctgaggcaccggcaggtacgatcacctgacctccggacatcagggaaaaatcatcctgacctaaggtaagaagctggaaattggaaaatccataatccagaagagtgatggcttcatcatctgtctggccggaggctccttttaaaataacgcagatcaatgtgacatcattacgctgtgcactgcatacaagcgtgctttgggaagcttctgtaaatccttccttgccgccaagacagccctggtagtaagcatctgaactgttgttggtcatggtgaatttactggtaagtgatctggctccgccggatacattggttgccggaatggtgtaggtatttgcgctggcaataggagaaaaggaaggattctctgtagcagccttcatgatcaatgccatatcatgggctgtggtatgctgattctcatcaggaagcccggtagggttggtgaacactgtgttggtacagccaagctgggcagccctggtattcatcatggcaacaaagttttcaacggatccgccgacatgctctgcaacctgaagagcgatatcattggcagaggcaaccatgatggcataaaggcattgctccatggtaaaaacttcatccagctgtgcagaaatattggcacctccatcggtaacaccggaaacgccggtagctgtcatggtcacttcatctgtaagattactgttctctaaagcaagaagacaggtcatgatcttgacagtgctcccgggataaagaacctcatccatattcttggcgtacagggtagtaccggtactgtcttcaaggatcacagcggcttcggaagtgatctcaggcccttggggccatcctgaaatctggttggtggtgatacttgaggcggcagtatctgtagcagcctcttctgcaaatgcagggcttcccaggatcagggaagcagacagcccagcagagagcagaagggaaaaaacagtccgttttctgcagggggatttcttttgctttttcattgtatagattatctcctgttatatttttatttcatttgtcagctgtttcagacatttacagcttaatatttttatcataacatatctgcaatcagaaatagtatatcacatttactccatttcttgcaaaaaatatagtagaatgttaaaatgaacagtaataataaaacagaggtaaaaagaaaatatgagtaaacaaaaatcatcagggatgaagatccaatgggggcgtcttctgaagaagctgtctccctataccatccagaaagggtttcgctatctgaagcattatgggcccagggagttctggatccgtcttcacgaacggtttgagcctgaggaggttccttacgatccctggtatgaagcatatattccagatgagacagcgctggagaagcagagaaaacatccttttgcctatgcgcctaagatcagtgtagtagtacctgcttaccgtacaccgtctgtctttttaaaacagatgctggagtcggtccttgcacagacgtatgctaactgggagctttgcattgcaaatggcagcccagaggacaaggagatgtgtcagatcctggatggataccagacacaggatccgaggatacgctggcagccattgaaggccaacctggggatcgcagaaaatacaaatgccgcttttgaaatggcacagggcgactatatcggactgatggatcatgatgatctgctggctcccaatgctttgtttgaagtggtacaggctctcaatacagatcccagaccagaggttgtatatacagacgaagataaggtgaccatggatctgaaggaacattttcagcctcatctgaagccggattttaacctggatcttttacgctccaataattatatctgccatttttttactgtatcccgggctattatggagaaggttggcggatttcgcagggaatacgatggtgcccaggattatgattttattttccgatgtgtggaggctgcaggctgtgtggcgcatgtaccggagattttatatcactggaggacacataaagcatctactgctgacaatccagcaagtaagatgtatgcctttgatgcaggcaaacgggcgattgaggctcaccttgaaagaaccggcacgccgggtgtggtaagccataccaaggatctgggcttctacagagtgaagtacccggtacagggttctccccttgtgtctgtgatcattcccaataaggatgaaaaggatacgcttcaggcctgtatccggtctatccgtgagaatacctcttataagcattatgagatcctgatcgttgagaataacagtaccactgatgagatatttgaatactataagcagctgtcaaaggagccggatgtaaggatcctgcactggaatggagttttcaattattcagctattaatgattttggagcaaaaaatgccagaggggattatttccttttcctgaataatgacattacagtgatcacaccggattggatggaggaaatgctgggtgtctgccagagacgggaagtaggagctgtaggcgtgaagcttctttatccggataataccatccagcatgcaggctgtgtggtaggtatgggaggcattgcaggccatatgtttgtagatatgccagccgagaggacaggatatctgcataaagcatctcttcttcaggacatgagtgcagtgacggcagcctgcatgatggtaaaaagagatgcttttgaaaaggctggcggttttacaaaggaacttgcggtagcttttaatgatgtggatctttgtttgaaaatacgcagggaaggatacctggtggtgtatgatccttatgcaaagctttatcatatggagtccaaaacaagaggtctggaggacagtaaagacaaagtaaggcgctttcagacagagatcgaatatatgagaagccactggatccagatcctgaaaaagggggatccttattacaataagaatctgtctcttacaaagtggaactattccctgaaaccacttccggggatgaagaacaggaaagggcaataaggaggaatacatgcaggaagttgaagtttcagtggtaatacccaattataatgggatggcatatctggatggtgtattgtcaagcctggaatgccagacattccgggattttgaggtgatcctggtggataatggttctgctgacggaagtacatcctttgcagcagccagttatccctgggtacgggtgatcgagcttccagataattatgggttcagccgtgctgtcaatgaagggataaaagcgtctgcagcagaatatgtgctgcttttgaataatgatacagaagttgaaaaggattttgtaaatgagatgctgtctgccatcaaaaggcatagcaatgctttttcctgtgcaggcaaaatggttcagtttaatgaccgggacaagctggatgacgcaggcaattattattgtgcgcttggctgggcttttgcaagaggaaagggcaagagtatccatacttatgatcaggaggagcaggtgtttgctacctgtgccggagctgccatttacagaaggaaattcctggataagaccggatattttgatgaagagcattttgcatatctggaggatctggatgtgtgctaccgtgcaaggatcatgggctatgagaactggtatgcaccaaaggcagtggtctaccatgtaggcagcggcaccagcggttccaggtataatcagttcaaaacaagatattcatcaagaaataatatttatctgatctataaaaacatgccggttctgcagatcattctgaatctgccttttatgatcccgggctttgtggtaaagatcctgttttttaccttaaaaggtatgggacgggaatatctggcagggatcaagaatggtttccagatcagcaagaaagaccgtaaagtacgtttttccataaagaatctgccaaattatctgaagatacaactggaattatgggtaaacatcatacgcaggttccgtggataaataagggaaaacttaactgtttcgtaactgttcggtatcctcaccgatactatctgctgaatagttatcctttttcatgaaatttttataaattgtatttcaagattttattgcaattatgttgcatctattataagataagtagagcgaaaaaatgaggtgacagaaattgattaaggacaaccagaaaaatttcagtcttctccatgtggcaatagatgcctgtatgattatcctggcgtatatttttgcctgggcattacgatttataggcccctttgcagcgacagcagtgcgtacccgatcctttgaacagtacatgttcgcactgctttttattgttccggcatacctgatgatgtatcatgcattttctctttatgagccaatgcgtatgcagggcaggcgtcttgtgcttgccagtgtgatcaaggccaacactcttggtattcttctgaccacatttgtactgtattatattgaggaaggggatatttcccgttccatgctgatcatgttttactgcatcaatattttcctggattttagtgccaggatggcagtatattatatcctgcgcaacatgcgtaagaaaggcttgaatcagaaacaggtattgcttgtgggatacagccgcgcagcagaagaatacattgaccgtatccagcaaaatcctcagtggggttatattgtgcgggggattctggatgacaacgtagaagcaggtactgtttacaaagggatcaaagtcattggaaggatcgcaaacctgatggtgatactgcctgcaaacagactggacgagattgcgattactcttggcctttctgagtattaccggctggagcagatcgttgccatgtgtgagaagtcaggagttcataccaaatttattccggactacagtaccattatacccaccaagccatatacagaagatatactgggacttccggtgatcaatatacgttatgtgccgctaagcaacacttttaatgcaatggtaaagaggatcatggatgttctgggctctattgcagctattattgttgcttctcctgtgatgttgctgatgtgtatactgatcaaggccacatccaggggaccgctgatctataagcaggagcgggtagggcttcacaataagacattctggatgtataagttcagatccatggaggtacagccggagtcagaagagaagaaagcctggacagtgaagaatgatcccagagttaccggcattggtaaattcatgagacgaacaagcatagatgagctgccccagctgttcaatatcctgaaaggggatatgagcctggtaggcccaaggcccgagaggcctttctttgtggagaagttcagggaagagattcccagatatatggtgaagcaccaggtacgtccgggattgaccggatgggcacaggtaaacggctacaggggagatacatccatccgtaaaaggatcgagtgtgacttatattacattgagaactggaccgttagctttgacatcaaaatattgttccttacattttttaagggatttattaataaaaatgcatactgacagagaatactaagggatgcagaataaccaagaagggaaaagagtatggcaggaaaaggaaaaaagaagaagagaatcctcttcgcaattgagatcattgttcttctgctgtttattggcggactgtatgtgtatggacagatttcagccaggatggacaagcttgtaaagaacaaagtaacagaatcttccggcgaacaggcaactttcgatgattctaagatagttatcaatgatacagctcccaagatgacaggctacagaacatatgcactgttcggtattgatcacagatctaagaatgcgtctctgggttctgagaacagcgataccatgatcattgccagcattaataatgatacacaggaggtacgtctggtatctgtttaccgtgatacgcttctgaatattggcaatggtacttatgccaaggcaaatgcagcttatgcatacggtggtccggagcaggctatttccatgctgaataccaacctggatctgaatattacggactatgctactgtagattttaatgcactgactgcagcagtggacgcagttggcggcctggagatccctctttcttatgcagagatggttcatatgaacagttactgtaaagaaacatcagaggagacagataaggaatatacaccggtagaacttccggatcctaagcctgaagatgaggaagctatttataatatttaccatttgaatggtgtgcaggttacttcctactgccgtatccgctatacagccagcctggatatgggacgtacagagcgtcagcgtaaggtgattcagatgctgacccagaagctgaagaaagccggtctgactactattttcaatattatggatgaggtgttcccaatggtggaaacatcccttaccaagactgagatcctgaatatgattccaacacttcttggatatcatgtggatcagaccacaggtttcccgcttaattataagttctccaatgtaagaggaagtattattgtggcggattccctggagtccaatgtaaagcagcttcatgagttcctgtatggttcttccgagaattatacaccttcacagaatattcttgatgcaagtgctaagatcattgccatcgtaggaggcgctgacaagcttcaggatgaggctcctgcagtcagcgaggatgacggaaacggaaataatgaattcttctggcaggatgacggaagcggtggcaatgcctgggataacggaaacggtggctattcggatccaaataatggagaaaataccggtggaggagacagttccggcggtgatgatggcagcacaggcggtgattatgtggatcccggcaccggaggagatactaccggtggaggagataccagcggtggaggcaatacaggcggtgactatgtagatccaggaaccggtggaggagatactaccggtggaggagatgtcagtggcggcggagataccagcggtggaggagatatcagcggtggagatgccggcggcggtgatgtgatccaggatgatgtgatcgttgattatgaaagcgtggaaggcgcttaacagataaagcaggctgttgcataaagcatctgcagtgaatgaatatatattcctaaaaggcagtatattattcctgacaagtgtatttatgcagcagccctttttatttcaattcaatgggaaaggaaaaaaaatgaaaaatgtagatgtgatcattcccacataccatccgggaaaggatttttatcagcttctgaaaaggctggatcagcagaccagaccgattcacagaatacttgtgatgaatacagaagaaagcggctggaagccggaatgggaaaaggagttcagccagctgcaggtttaccatcttcaaaagtctgactttgatcatggcggcaccaggaaaaaggcggcagagctgtctttggctgattttatgatctttatgacccaggacgcccttccggcagatgaatacctggtggagcatcttttaaagcctcttgaagcagatgaaaaggtgggggcagcatacgcaagacagctgcccaaacaggactgccgctttatagaatgctataccagatcttttaattatccatcggtttcttctgtaaaatgggagaaggatacaggcatatacgggatcaagacatatttttgctccaatgtatgtgcagcctacaacaaggagatttacaaagaagtaggtggattcgtggatcgggccatttttaatgaagatatgatctatgcaggcaatatggctaaaaaaggatatgggatcgcatatcaggcagatgcctgtgtgtaccattctcataattattcctgcagccagcagttccatagaaattttgatctgggcgtgtcccaggcagagcatccggagatcttcgactctgttccttccgaaggggaggggatgaagctggtaaagcagactttgggttatcttctgaaaagcggacatatatggctggttccgcaactggtgctccaaagtggaagcaagtacctggggtacaaaatgggaaagggatatatgaaactgtcgcccaaaacggttcttaagtgcacaatgaatcgggaatattggaaaagaaaagaatagttggtttctgtcactgtttttttaaatatccatcacaaattaaacacatttcattgttacactttttttatgtaatgattacagtgtcaaaaggtctgaatccgcctgcgcttgcataagggtggggaatggccttgggattattttaccatagcgagaaagacagaagggagcagatggatatggacgaggagaaaagccgggggacagattcccaggaaaatacagtaaatgacagctccggggatataacctatcactatacaagaccacaatatggacagtatcggttccatgaagaacagcaaacgaccagagaagatcaggatgaagaagacaccagcaaggtgaaagttacgttagaagacaacgacaggaagccagtaccttttaagaaaaagctggcagctacaatagcactggcagtgatatttggaatggtagcaggaactgtttttcaggcaaccaatatcctgtctcagaaatattttggcacagcatctgccacagatacaaaagtatccactacagaatcagttccggagacagtggctgcttcagacaatatcacagatacttcatcagtgcaggatacagctaatgaaaaaggcacagtggcagccgtggcaaaagctaccatgccttcagtggttgctattacgtctgtaagcattcaggagatcaccagctttttcggatatggcatggaatatccaagcacaggcagtggatctgggatcattgtaggagagaatgatgatgagcttctgatcgctaccaacaaccatgtgatcgagggtgctactaccttgagtgtgtgctttatcggagatgatgtggtgaatgcagaaaaagagacaagaaatgtagccagcggtgacggagatattaatattgatgatgcagtttctgcaaagatcaaaggaaccgatgaaactaatgacttggcagtgattgctgtagagaaaaaggatatcccagaagataccatgagtgagatcaagattgcacagttaggcagttctgatgatcttgtggtaggagagcaggtagttgccataggaaatgcccttggttatggtcagacagtcacttccggatgggtaagtgccctgaatcgtactattaccttggaagaaggaagcactgcctccaacctgatccagacagatgcagctatcaatcctggtaacagcggtggtgccctcttgaatatgaagggcgaactgatcgggatcaactgtgcaaaatatgcatccagtgacgtggaaggcacaggatacgctattcctatttccgaggctcagcccatcttagaagatcttatgaaccggaagacaagggataaggtgtccgattcctccaaagccggatatctggatgtggaggtgacagatcttactgcaggtgccatccagatgtacaatatgccatccggtgcttttgttatgagagttacaccaggcggcgcagcggagcaggcaggtatccagaaaaacgacattattgtaaaatttgacggacaaacagtgagcggacgatcagatttggtagagaagctgtcttattatactgccggagaaacgatagatgtggtggttgcacggccagatgatggcgaatataaagaacagaccatcagcgttacccttgcatccagagacaaccaggatcataataatgcctgatataacctctggtgttttgacaccaaaatcttacctataggacatttcatgagagctgcgttggcggatctgagtttcagatacgttacggcagctcttcctgcatcctgcagtagaatgtatgaaaaagactttataaaaactttatttcaatagtgtgaaaatatgtgctataatccaaatggaatacaacaacagaaaggaaataatatgtcacagcatattgacgattacgaagatttcagagaagtagatactgccggagagaaagacacagcggtaaacaccacagatccatccacaacagctgattcatctgcaactggtgcaggggatgatgcagaccaccaggaagacggatacgagcacttctgcttcctgtgccgccgtccggaaagtcaggcagggaagatgatcgaacttccgaatgatatacatatctgcacagactgtatgcagaaaagctttaacaccatgaacagccagatcaacaacagcaacatgaattacggcgacctgctgaatatgccaggcgtcagtatgatcgacctggggaacctgaacatgggaccacagcccaaaaagatccgtaagaaaaaggcaacccaggaagcaaaacctgtgctggatctgaagaagatccctgcaccacataagatcaaagccactctggatgaatatgtgatcggccaggaaaaagcaaagaaagttatgtcagtggctgtgtataaccattataaaagagtggcatcagacatgaaagatgatgtggagatcgagaagtccaacatgctgatgatcgggcctaccggctgtggtaagacgtatcttgtaaagacactggccagacttctggacgtaccgcttgctattgcagacgctacatctttgacagaggcaggatatattggagacgatattgagagcgttgtatccaagcttctggcagcagcagacaatgacgtagaacgggcagagcatggtattatttttatagatgagatagacaagatcgcaaagaaaaagaacgcaaaccaaagggatgtaagcggagaggctgtccagcagggacttctgaagctgctggaaggcagccaggtagaggtgccggtaggagccaacagcaagaatgccatggtgcctatggtgactgtagataccaggaatatcctgtttatatgcggcggtgcatttccagatctggacgagatcatcaaggaaaggctgaataagcaggcatccattggattttatgcagatttgaaggataaatacgatagagatccgcatatactttcaaaagtaacagtagaggacattcgcaatttcgggatgattcctgaatttatcggccgacttccggtaatctttacattggatggactgaatgaggacatgctggtagagatcctgcaggagcctaagaatgccatactgaagcagtataagaagcttcttgccatggatgaggttcgtctggagtttgaggatggagcactgcattctattgcagccagagccatggaacgtaatacaggagccagagggcttcgtgccattcttgaagaatatatgctggatatcatgtatgagatccctaaggatgacagtattggtcaggtgatcattacaaaagaatatatagacggtaacggaggaccaagaatcctcttaagagggcaggaagtgccgttgctggcctgagacggtaactggttggggcttttttaccccaatatctaacatatattcatgcagcaaataaaagaaaaggagaaatgcgttatgagaaaaggcttttttgatggtttaagtgaaacattgacaagaacgactaaggatcttagcaagaaggctggacagatttatgagacacagaaaattcagagtaaggtgtccagtgaggaacatatggtggagaagctgaaatgtgatattggtaatcttgttttcagccgttatagcggaggtgtccagatggacgaagagcttcagaatctttgtcaggagattcgtcagcatatggatgctatcgcagagtacaaggatgcagcagcagatctgaaaggacgcaagatttgtccatcctgtaagcgggcagtggagaaggatgtggctttctgcccattctgtggaactgcatgccctaatccggagccgaaagaggaagttgctgctgaggcttcagcagaagaagcaacagaaacagttgcagaagatgatacacctggagaagagccagcaccagagacttctgaggatgtaactgatgaaagcacaccggaagcagagacttcttcagaggatacccaggagtaagagatacactccttcgtttcataagatgtatggacagttatggggaagaggacagatatgacaggacttggacttacagcatggatctacctgctggataacaaaataaaggaacaggtggacagcaatatccttcagggcaccagaaaggaaattcctggtggaaggatatatctgtgtaactgtcacaatgaaggtatggcccttggtataggaccgaaagatcaaaagaactgtcagggtatttccgcagcagccttaggggctgctgcaggagaatatctgcggcagaatattcagcagaagcctatgattggcagaattggtcttggtatggttatgggcggaggtctgtccaattatatggatcggcgcgaaagagggtatgtgacagattatatcagctttcgtaccagtcataagaaattgcaaaaaatagtctttaatctgtctgatgtctgtattattgctggaaccggcctgtggcttttatctggcttattgccatcccataaaaataaaacaataaaatttaaaaaaaataaaaaaagatgttgacattccaaatggaatgaggtattataatcaggcagtcgcaaagagcggctgaaagatatgaaatgcaggagtggcggaattggcagacgcgcaggcttcaggtgcctgtggtcgcaagatcgtgtgggttcaagtcccatctcctgcattctttttttatctcagtcaagaagactcccacctctttcaggcggtgagtaacagcaggttcgtctcagagggagtccaatctccggctgctcgacttgaatataataagatgataccagtgtcccctgaaaactgcaggtacagttttcaggggatttccaatattattttgggcatagctgaattatttttagccctgaattttgttgaaaaaagataaggcttatgatacaatcttgaagatttaggataaatcagatgtgaaatgacgcccgcctttacaggtggtgagcagcaagaatgcgcaggtattcttgaatatgtatgacgacagaaagggagattgtatgaaagcatttctgatattagaagacggccatgtttttacagggacgagtattggttctacccgggaagttatcagtgaaatcgtcttcaacacttccatgacaggttatctggaagtaatgacggatccttcctatgccggacaggccgtatgtatgacttatcccctgattggtaattatggtatctgctatgaggaccaggaatcaggacagccatggatcgatggttttattgtacgtgaattatcccgtatcccaagtaatttccgaagcgtggatacaatacagcatttcttaagcaaacatgatattcccggtatagccggaattgataccagggcattgaccaggatccttcgcgagaaaggtacaatgaacggtatgatcacagtcaatgaaaattatgacttagacacaattctccccagattaaaaaaatatactacaggtaaggttgtagagaaagtaacatgccgtgagaagcagatcctgccaggaaacggtccaaaggtggcacttcttgattttggcgcaaaaagaaatattgcccgttcactgaaccagcgtggttgtgaggtgacgatctatccggcacttacaagcgcagaggaaattctggctgctaagccagatgggatcatgctcagtaatggccctggagatccaaaggaatgtacttctattataaaagaagtaaaaaaactgtatgattcagatgtgccgatttttgcaatctgcctgggacatcagctgatggcactggctaccggcggagatacctacaagatgaaatacggacacagaggcggtaatcacccggttaaggatctgacaactggcagagtgtatatttcatcccagaaccatggatatgtggtagatgcaaaaggacttgaagagaaaaatattgcccagccggcatttatcaatgttaatgacggtaccaatgaaggaatggcatacgttgggaagaatatttttactgtacagttccatccggaggcctgccccggaccacaggattcaggttatctgtttgaccgttttatgaaaatgatgggaggaaatgactgatgccaagaaacaaagacataaaaaaggtacttgtaatcggttccggaccgatcatcattgggcaggctgcagagtttgactacgccggaacccaggcatgccgttccctgaaagaagaagggatggaggttgttcttctgaactccaatccagctactattatgacagataaggacattgcagatcgtgtatatatagagccgcttactgtagaggtggtagagcagctgatcctgaaagagaagccggacagcgtgctgcctacactgggaggccaggcaggcttgaaccttgcaatggaactggacgaaaaaggctttttaaaagagcataatgtgcgtctgatcggaactactgcccagacgatccgtaaagcagaggacagacaggaatttaaagataccatggaaaagatcggggagccggttgcagcttctaaggtggtaactactgtagaagatggtctggcatttacaaataccatcggttatccggtagtacttcgtccagcatatacacttggcggaagtggcggcggtattgcccacaatgagtatgaactgagagagattcttgagaatggtcttcgtctttcccgtgtaggtgaggtactggtagagcggtgcattgccggatggaaagagatcgagtatgaggtaatgagagatagtgcagggaactgcattactgtctgcaacatggagaatattgacccggttggtgtgcatacaggtgactctattgtagttgctccgtcacagacattgggagataaagaatatcagatgcttcgtacttctgcactgaatattattacagagctgggcattaccggcggatgtaatgtgcagtatgctctaaagccagacagctttgaatactgtgttattgaggtaaatccacgtgttagccgttcttcagcacttgcaagtaaggctactggatatcccattgcaaaggttgctgctaagatcgcccttggatatacactggatgagattccaaatgccattacaggcaaaacctatgcaagctttgagccaatgcttgattactgtgtagttaagattccaaggcttccatttgataaatttattactgcaaagagaacgctgactacccagatgaaagccaccggagaggttatgagtatctgccataattttgaaggcgccctgatgaaagcaatccgttccctggagcagcatgtggatagtctgatgtcttacgattttacacagctgacagatgaagaacttctggaggagctggagatcgtagatgaccgcaggatctggaagctggcagaagcaatccgtcgtggtatgccacagtccatgcttcatgatattacccagattgatatctggtttattgataagctggcaatccttgtaggtatggagacagccctgaagaccagaaagcttacaaaagagcttctgcttgaggcaaaacgactggaatttcctgactatatcgttgcccgtctgacaggaaagacagaggcacagatcaaagagctccgtgcagaatatggcatccgtgcagcttacaagatggttgatacctgtgcagcggagtttgcagcagaaacaccatattattattccgtgtatggagatgaaggcacagagaatgaggctgttgccacacctgacaaaaagaaaatccttgttcttggttcaggacctatccgtattggccagggtattgagtttgacttttgctctgtacattgtacctgggcatttgcaaaagaaggctatgagaccatcattataaataacaatccggaaacagtaagtacagactttgatattgcagataaactgtattttgaaccgctgactcctgaagatgtggagaatgtggtaaacattgaaaaaccggatggagctgtggtacagtttggcggtcagacagccattaagttgacagaagcccttaccaaaatgggtgtgaagatcctgggaacttctgcagagaatgtagatgctgcagaggatagggagctgttcgatgagatccttgaaaaatgccagatcccaagaccaaagggtcatacggtatttactgcagaggaagcgaaaaaggcggcaaaccagcttgggtatccggtactggttcgtccttcctatgttctgggcggccagggtatgcgtattgcagtcagtgatgaagatgtggaagaatacatcggcatcatcaaccagatcgcacaggagcatccgatcctggtagataagtatctgatgggaaaagagatcgaggtagatgcggtttgtgatggcgaggatattctgatccctggaatcatggagcatatcgaacgtgcaggtatccactccggtgatagtatttccgtgtatccggcaagaactatcagtgaaaaagcaaaagaaaccattgcagagtatacaaggcggctggcaagagcccttcatgtgatcggtatgatcaatatccagtttattgtactgggggatgaggtatatgtgatcgaggtaaatccaagatccagccgtacagttccttatatcagcaaggtaacagggattccgatcgtaccgctggctaccaaggtgatccttggatataagctgaaagagatgggatatacaccaggtctgcagcctgaggcaaaacatattgccatcaagatgccagtattctcctttgaaaagatccgtggtgcagatatcagccttggacctgagatgaaatccacaggagagtgtctgggaattgcagaaacatttaatgaggcactttacaaagcattccttggtgctggcatccgccttccgaagcataagaatatgatcattaccgtcagggatgaggaacagcaggatgtagtgcctatcgcaagaagatttgaagctttaggctataggatttacgctaccagaggaactgcaaggaccttaaaggaaaatggtatccgtgtgatccgtaccaacaagctggagcagccggcacccaacctgatggatttgatcctgggtcataagatcgatgtggtaattgatattccgccacagggtatcgatcatcagaaagacggatttgtgatccgtcgaaatgccattgaaacaggtgtgaatgtgcttaccagccttgatactgcagaagcactggtaaccagtcttgaaaatacagatgtgcataatctttccctggtagatatcgctactatcgcaaaaagataaagcagaccaaagataattacaatagtaaaggcactaaacgattacgaaaaatccaaattacaggtttacagaagaaatatgatgtaatataaacaaaaaggacggggaatcaattatctccgtccttattgtactttaagataactgtttgacaggcgtttttccatgaactgacagattgttatttttaggaagacaacggaaaggggagcatatggatatcattgaatttttcaaagtagtgatccttgggattgttgaagggatcacagagtggctgcctatcagcagtaccgggcacatgatccttgtagatgaatttgttaatctgaacgtaaccaaggattttaaggatcttttcctggttgtgattcagctgggtgccattcttgctgttgtggttttgtactggcataagctgtggcctttttataataagacactgtcaaagcgaaccagggtagctatcagccacaagccgggatgggcacagcctattcttattttcagggaaagattctgtgacaaggaaaaatgggttctgtggttcaagatcattgttgcctgccttcctgctattatcattggtcttccctttgatgatctgatcgaagagaaatttatgaattatgtggtggtagccattgcgcttattgtgtatggtatactttttattgtaattgagaactacaataagaacagaaaagcatcctgtactagtcttgaggagatgtcttttaagacagcctttctcattggctgcttccaggtgctgtccctgattcctggtacttccagatcaggatctaccattattggtgggattcttttggggacttccaggactgtagctgctgagtttacatttttcctggggataccagttatgtttggagccagccttctgaagattgtgaaatttggttttgagtttacctccacagaggtaatcatcctgcttacaggaatggtagtggcatttgtggtttccattctggctatcaaatttctgatgggatatatcaaacgccacgatttcaaagcctttggctggtacaggatcgttcttggcgtattggtgcttggctactttatcggtaaaacacttctggcataaggaggttatcctgcaatgggaaaatatattatggcactggatcagggaacgactagttcacggtgtatcctgtttgacagagagggcaggatgtgcagtgttgcccagaaagagtatacacagcattatcctcagccaggctgggtggagcatgatcctatggagatctggtcatctcagctgtcggttgccatagaggcaatggggcagatcggcgcagatgcagaggatattcattccattggtattaccaatcagcgtgaaacgaccatcgtttgggacaaacgtacagggaagccggtttatccggcaatcgtatggcaatgcagacgtactgcagatatgatcgagaagctggaaaaggaaggcttctcagatgtgatccgacataagacaggactgattccggatgcttatttttctgctaccaagatctgctggatcctggatcatacggaaggggcaagagaagaagcacagaagggtaatcttttgtttggcacagtagatacctggctgatatggaagctgaccaaaggggaagtacatgtaacggattacaccaatgcttccagaacaatgttgtttaacatccatgagaagcactgggatcaggagatcctggattattttaggataccattttccatgcttccacaggtacggccaagcagctgtatctatggttatactaatgagaagctgatcggcggcaggatccctattgcaggagccgcaggagatcagcaggcagctttgttcggccagtgctgtttcaaaccgggagatgttaagaatacatatggcacaggatgctttcttctgatgcacacaggagatcagatggtagagtctagtcacggacttctgactactatggcagtgaatgcagatggtacgccaggatatgcccttgagggcagtgtatttgtagcaggggctgctatccagtggctcagagatgaagcagggcttttggagaatgctgctgcttcagagaaatactgtctgtctgtgtcagataccaatggagtgtacgtagttcctgcttttacaggacttggagctccttactgggaccagtatgcaagaggtgcgatcttgggactgaccagaggatccgggaaagcacatctgatccgtgctacagtagaatccctggcctatcaggtgcacgacgtgattcttgctatggagaaggattccgggatccatctgaatacattgaaggtagatggcggggccagcgccaacaatttcctgatgcagtttcaggcagatcttctggatgcacaggtagtacgtccaggatgtatagagacaactgccctgggggctgcttatctggcaggccttgccaccggattctggaagggcagcagcgagatacagaagaactggaatatggagaagattttttcaccatctattaccgaagaaaaaagagaacagcttcttaagacctggaaaaaggcggtttcctgtgttttaggatgggcaaaagaataaggactgaatgcgacagccctggatatataaagaggagtgatcataatgaaacgcaaaaaaatcgttgttctgcttaccgtagggactatgttggcggcggcttcaggttgtggaaaaagtgagcctgtggcagatccaacaccaaccccggcacctacggctacccctgcacctacctcgactccaacaccggcacctacgcctacggttacaccggcacctaaaatgattggaaagaagactgcagaggccaagtttatttaccttgccaacaatacagataaacagttccgtaagctgtatcttcgggtatccggcaatgaggattggggaaacagtctgatcccaagtgaatcttctgtgcatgcttcagagaaagtaaggatgtattatacccctcagacaggagaaggggttacttatgatatgcgccttacagatgagaatggtaatacatatgagattgatggagcagatctgtctgatatggagactgcatcactgcgtctggatactgatcaggggatcgtatatctgacttatgtaagtaaaagctccaacagtgagaagaatacaaaggacagttcatccagcacaggtactgaagatacctccggtatggatgtgagttcttcggaacaaggtatttattattacaatcagagcaatggttcttctaatggtggggattccagcaatagcggtggcagccagtctggcgacaacagtggtaatggcagtcagggaaccacagataatagcggcaatagcggacagaataccccagacagcagtggcaccacaggaggagacagccagggcggtaataccggtacagacaacagtggcagtacaggtggtgacgctaatcagggcggtggtgatattgattatgaccctggtgacggcagtgacggatctgagaactggactgacaatattatctgggacgaagatggaaactggcagtaaataacagatgtgatcgtataaatcagccccacacaggaagtgtggggctgtaatactatatatgcaaaatgatggtctgcatatcctgtaatacaggaatagcagatcgatgattcacacataggatttaaagatataaaatttcgccggtatgagttacatcgtagcctgtctgaccaaaaaggtcagacaggaaactttcagaccggatgatctccagaagcgctgcaaagcctggtttatccagagaagaagcttccaggacaaggtacataggcagtattcccatgggcaggaaggaaaggccgggagtggttctggctaccgcttcttccccaagtgctacatccgcccgtctggaaagaacagcggaggcagtggaaagatcagataccagttcattcagatatcctgaaatattgtcagtgtccacacctgcctccataagggaatggtccagaaaaatcctgcgggtactgcctttttcacggttggcaaggatcacatcttcacggtcaagatcctgaaaggtaaagattcccttgggattatcctgaagaacataaaaacctatcggaaaatggtacaggcatacaaaggccagcgggactccgggaacaaggcaggaagcttcttctggcttcatacttacagcagctgcatgaacctttccaaaatacagggaatatagtccattgtaggaattcaggtgagactgaagaaccggcattccctgaggatgggctgccatacgggaaagaagcagttccaaggcaggggttgtctgcccactgaggatcagaccgctggaatggagaaggtaatctcttttcagcacggaactttcaggctgaaaagtgggaacatgcaaaggttccctggtttctgtcctgtttaaatattcatccagctgttcttcactgatacggagctgctttcctactttggaagactgcagatctcctctcttgatcagttcatatacggttgtcttttttatttttaacttttcagcaatttctaaggctgtatagaatttactcatcaattcccaccattacatttgttgccttgatcaccgcataagcgtctgagcctacttttagatttaattcttctactgcagcacaggagatggtagctgtgataatattccctcctccgatgtcgatggaaacaatggaatttacagctcccttgttgatattgattacttttccttttaactgatttcgtgcgctaagtttcataatgctccctcgttttctgttttgttttatgataacacggccaaaatgaattgacaaggatttgataattgtttaaaatgaatgaaacagaactaaactaaataaaacacaacaaagggagaatgacatgagaaaaaagatgatagcggctatgttgacaggtgtgatgtgtataggtcttatgccgggaaacgtaatggcagcatctgactctgatgaactgaagggagatgtatatgcatttatagcagccagcctgagtaattccatggaagagatccagaaagattttgaaaagcttcatccagaggtgtccattaagtacaatgcagacagttcaggcacacttcagactcagattgagagcggagccccttgtgatcttttcttttcagcagcagacaagcagatgaatgcacttgtggatgaagagcttgctgacaaggactctgttgtagatcttcttgagaataaagttgttctgatcaaacctaaggacagcgacactaaggtgacaggttttgagaatattaccgaggcagagaatattgcacttgcaggagaggatgtaccggtaggccagtacgcaagagagatctttactaatctgggtattatggatgatgtggagaagatggaggttaatgaaggcaggaacgtaacagaagtgcttactgctgttagcgagggaagtaatgaagtaggcattgtttacgctacagatgctgcttctatgggagattctgtagagattattgcagaagctccggaagacagtctggatacacctgttctttatcctattggtctgatcaagaacgaaagtgcagatgatgatgagaaggcagctgcagaagcattctatgcataccttcagactgaggatgcactgaaagtttttgaagagtatggatttaccccatatgttgcagaacattaactggagtccattgtggatctctttaaaaaccggatttgcagctacagtgattgccttttttgcaggtgtattctgtgccaggaagatcatgaaactgcgtccggcggccaaagggatctgggatgggatccttacaatgccactggtgcttccccctacagttgccggattctttttgctgatgctttttagtttgcgccgtccttttggaaagtttctgatggacagctttgatatacggatcgtacagagctgggccggatgtgtgatcgctgcgtctgtgatcgcctttcctttgatgtaccgtaatgcaagagccgcatttgaacaggtagatgtaaatctgatctatgcaggccgtacccttgggatgagcgaaagtaggatattctggaaggtgatcatgcctgctgcaaggcccggaatcgcttccggtacggtattggcttttgcgagagctatcggagaatatggtgccacatccatgctggcagggaatattctgggaaagaccaggacggtttctgtggctattgctgcagagacagcagctggcaattacgataaagcaggtttctgggtagcgatcattctggtgctttcctttgtgattgttgcagtgatcaatattatttccggtaagggaatgcagacaagaaggtggatctaaatggcggtaagtattgacatcgaaaaagactttaaaggcttttccctgcgtgtgaagtttgacagcacctgtgccaccatggggatcctgggagcatccggaagtgggaaaagtataacgctgcgttgtattgccgggatcgagacaccggacagaggcaggatagttgtaaatggaaggacgatcttcgattcagaccagaagatcaatctgaagccccagcagcgcagaatcggatatttatttcagaattatgccctttttccaactatgacagtcaaagagaatattgcctgtggatatagaggaaaagataaacaggaacgggataaaaaggttcaggattatattacaagataccatctggaaggactggaggatcatctgccttctcagctttccggcggacagcagcagagagtggcacttgccaggatgatgacaggggagcctgagatgattcttctggatgaacctttttctgcattggatggttatttaaaggatgtacttcagagagatatgcagacatttttaaaggattatcccggagatatgcttcttgttacccatagcagggatgaggcttttagattttgtgaccagttgatcctgttaaaggatgggaagactctcacaataggaaatacccgtcagatctttgaggatccaggactgatagaagcagccaggcttacaggatgtaagaattattctgctgcagaaaggatcgacagccaccatatttttgcagcagactggggaatcagccttcggaccgtgcagcaggtacccactgatatttcctgggtagggatccgtgggcactggctcaagccaagagaagaagacggcgagaactgcatgcctgtgaaagtaacagaatacatagaaactacctttgagcatcagtgcctggtgcagaatcctaggctcaaagatggaggaagcctgtggtggatgcgtccaaagaattcttttgaagaggatccaggaaagaatcttcccgcatatttatatttgccaccggaacatctgatgcttctgaaaaaataagggactggtatattgccagtcctttttgcttaaagatcatttgaggttttgggaatatttaatataatccaccaccatcatggccagcttaaaggtaagcgcatcctcaaaggtgcggatatccaggccgaactttttctggagcttctcaaaacggtagaccagagtatttctgtggacgtaaagctgtcttgatgtttcagaaagattcagattgttttcaaaaaaagtgcggatggtagcaagtgtttcgtcatcaatggaatccagggtttcttccttgaaaaattcatctataaacatttcgcagatttctacaggaagctgatagatcagacggccgatcccaagacggttatagccaaaaacatttttctgggcataaaagatcttacctacttccaaagctgttttggcttctttgtaagctgagggcaggtgatggatgttgtctgtcagattgctgtaggatacccaggcagatgtcatggcctctgtattcagcatatctaccagcatatgtgccacacgccgcatatcctggaattcttcagtggactgtagctcatggatgataatgatccctgaatcatctaaggcagtgataaaatctctggtacgtgcagagaaaatgttgcggatggtagcaagtacattctcgtctttgttctgctttgtttctgcaaggaaaatgcatcttctgacagaggtggagatatgcagctttttggctttattaaatgcatcgatctcgccgtaattaccaagaaggagattctgcataaatacatttttgtcgcttttttcggcataggcggtgagcaggctttcaatctggcagacagccagttctccaatggtggaggcagaaggatctgttccccataggatcaggatgtaggccaactgctgattatccatgattttgtacagggaacagctggtattggaaagacaaagcgcatcgctttctcggaaatcttctaattttttggatgaaggaagctgacggctgcaggtagtcacacatattttatcatctgaatccaccagacagaaatcaaggtggctgatattcttccagtcattcaggcatttctgtaaaacttgaaatactttcatcaggtgtgtcctcactttttagcggattgaatatagggttttgcaccctgtgaacatagtatatcataaaataatggatcaaaaaagaaaaaacacaggaattatggctcatacagtttagcccgtccaatatccatgaattcgcgcatgcaagcatggctcattcatggctgctgtccgggacttttatagtaaaaaacggctgtacctgtcttttcgtgaatgtcacgaacaggtacaaccgcctttatcataggtttatattgatagctaaatcaattgtattagttgcagatcacaagctctgtctctttatcgaagaaatgagatttctccatatcaaatgcaaatttgatagcatcgcctgtcttggaagtagtacgtgggtcaactcgtgctgttacctgtgtgccgtttacatcgaagtacaggaatacttcagcaccaagaagctcatatactttaactgtggatgtcattggagcgcttggagaagcctcgatgaacatctgggaatcatgaatatcctctggacggataccaagtacaacagtctttcctacatagccactctctttaagaactttagccttagctgctggaataacaacatcattgtcaccgatcttggcgatcaggttattacctttttctacgatctgtgcgtccaggaagttcatctgcggggatcccatgaatcctgctacgaacaggttgcctggtttctcatacaggttctgtggtgtatcaacctgctgaacaacaccatctttcataactacgattctggtaccaagagtcatagcctctgtctggtcatgtgttacatagatgattgtagcacccagtctctgatggatcttggagatctcgatacgcatctgtacacgaagttttgcatccaggttggaaagaggctcatccataaggaataccttaggattacgaacaattgcacgacccatagcaacacgctgtctctgtccaccggaaagagcctttggtttacggtcaagaagtttctcaaggtcaaggatccttgctgcttctttaactgctttgtcaatctgatccttcggaactttacgaagcttcagtccaaaagccatgttatcatatacggtcatgtgaggatacagagcgtagttctggaataccattgcgatatcacgatctttaggctcaacatcgttcataaccttatcaccaatctttaatgtaccactggtgatctcctcaaggcctgcaaccatacgaagagtagtagatttaccacatccggaaggtcctacaaagatgatgaactctttgtcttcgatttcaaggttaaaatccttaacagcctgaaagccgtttggataagttttgttaatgtgctgtaatgataagcttgccatgattcttcctccaacatcctttggtttataactgtttggtatcctcacagttatttttgtttttattatttagttacatgaatttgcgttcttttatagtgatagtatagcgaaaaccttttggaagggctagggaagaatcgtacaaagtttttggcggtttcttgtcaatctgacgaaaagaaactaataaggtttcggcaaaatggaaaataaagtcagtgtaatttatgaagcagccttttgggcaaagctggtagttacaagatctgtatattctgtacgcctggaaagctcccctgcatcctgaaggatatcctggagcagctgaaagctttcctcattaaaaataaggttatctttccaggtatcctgctgatagtatcgggttacgatagcagttacggttgcaaggtcagtttccgggaactgaggggcaatcacagtggcaatttcttctggtgaatgggtgcttacataatccatacctttttgcagggcatttgtgaatttttgtatggttttcggatgatcttctaaaaagctggctttagcactgtaagaggtatacggtacgtatccggaatctgtaccaagggatgctaccacatatccggtcccttcctgctccagcaaagtagcagagggttcaaattccacggtgaaatccgcagaggtatcccctgtgaaggcagctgctgttgagccaaaatcaatactttggtctatggtaagatctgtttccggatcaagaccgttatttttcagaatatattcaaataccatttccggcatgccgcct

SEQ ID NO: 89 - DNA, 12104 bp, Unknown
  gut microbiota DNA sequence
ccacaaggaaatttccagcccgctgggttagctgggcaaaattcataaccggatctgtagccccttcctgataggcatagacagatgcttcggcccccataaatccaatatctgcttcaccggaaatgacagcagtcatagtcttatctgcaccaaatcctgtgacaagtgtgagatccagcccttcttcttcaaaataaccttcttcaatcgccacatattgaggcgcataaaagattgaatgtgctacttcatttaaagtaaccttgctaagcgttttatcatctggactgtcttttttctttgctaatgctgtgactggcattgtagtaacagttagcataacagctgctgccagtgcgatccatcttaattttctcatgcagatactcctttttgacttctgctgttaagatatgccgtaaatcttaaatggtgtatgcattgactattcaaggttaaataatatggacataaaaagagggcagtgttataattttttctaaaaaatgtaatacatgatgtatcaaaaagtctacggttgtaaggcttttatctataaaggaacaggaacaaaattaatgaaagagaaagcatattttcatctgcctgggttgtttgaattttatgaactgtaccggatgtttttgccattattctgggaacacagggaatatttttatgactggtgtgaaataggttccatatatggtgctccatcagactgtatctggggaggcggcagggcaggattcggcgagaatgaccctaaggaggtatttgatctgatgcaggaatatggaatttctgcccggctgaccttcagcaattcccttcttcgccaggaacatctttcagataggaaatgcaatacactgtgccgattgtttgagaagaacacggaaccgcaaaatggtgtgatcatttattcagaattacttctggaatatattaagaagcattatccgggattctatttcgtttcttccaccaccaaggttctgacggattttacacagtttgagaaagaaatcaggagaaaagatttctgttatgtagtgccggacttccggttaaataagactttcgatcagttaaacacactgacccaggctgagaagaataaagtggaatttctctgtaatgaatgttgttggttcggctgcaggagcagaaaagcctgttatgaaacagtcagccgtaaaaatctgggcgaaaactgcccggagtatcgctgcaaggcaccggagggagaaaagggttatttattttccaaggctatgaaaaatccgggatttattggaatcgatgatattagaaatatttatcttccaatgggattttcaaattttaagatagaaggcagagggcttggaagtgccctgatattggaatttttgctctattacatgaccaaaccggaatatcagatatatgtcagggaaaaaatatatctggacagtatgctggacttgttttgagaaacgatgtactaacagtaacgaaaattacactacacgtttccttttgtgtgtggatatgatacaattcatggatgaataatagaggaaagccgggaatctgattatgaaaaagcaattaaattacgtagatataataaaagaaacggtggttctcacctgggcggtagctatcatagcagctgcggtttatttctttctggtgccaagccatacttcagtcagcagtatttcaggtcttggaattgtgctgtccaattttgtaccaattcccttgtctgcaattactatggttctgaatgtggtgcttttgatcataggttttatcacttgtggaagagagtttggaataaaaacggtttatacaagcattatgctgcctgtatttattggtctgttcgagaggatatttccggatatgggttctatgaccggcagccaggagctggatgtgctttcctatatcctggtggtcagtgtgggacttagtattctttttaatagaaatgcatcctccggcgggttggatattgtggcaaagattatgaataagtatcttcatatggaactgggaaaggcaatgtccctgtccgggatgtgcgtggctctttccgcagcactggtatatgataagaaaacggttgtgctgagtattcttggaacctattttaacggccttgtgctggatcattttatttttgaccacaatattaagcgaagggtatgtattatcacaaaaaaagaagaagaacttcgcaggttcattattgaagaactgcatagtggagctactatttacgaatccataggtgcctacaatatgcagaaaaggaatgagatcattactattgtagataagacagaatatcagaaactgatgaatttcattaacaatcaggatccaaaagcttttgttacggtgtacaatgtttcggacatgcgctaccagccgaaaaaataaaagggataagagaacaggggaagtcaagacagaggatttataaaacgatagattactgcgaacaaagtgaacagtaacaacttgatagctgtagataagatagtaaaagaaagaggcagatgatgaaagcagggatcattggaacaggatttgcagcagaggtacatatgaaagcacttcgtgcctgtaatgtgtctgttgatgtggtaatgagtcagaaagaagagcatgcaaaagcatttgcaaaaaagtgggggattcctaaatgggtaacttcagtggaggcgatcatggaatcagaggcagatgtgatccatatttgcaccccgccggctacacatgggactctggtaaaatccgctttagatgcaggaaaacatgtattgtgtgaaaaaccgctgagtctgtcacagacagaggcaaaagatcttgcagaacaggccgcaatgagtggaaaaatctgtggaatggtactaaatgtccggtatcatatggcatgccggcgggcaaaagaactggtggcgaatggtatgatcggacgtccgatcctgatccatggaacatatttgcaggaatttggagcacttccggcaccctatgactggagatatcatccggaaaccggaggagaaatgcgggcagtttccgagatcggaacccactggtttgacatagcagaatatatatcaggacagaggattaaggaagtatctgccttattcgcatgctatacgcctcaccgaattttaaaagacggtatgatgtatccagacaaagcttctgaaaaggcgaatgaaaccggaagaaaagtgcaggcatccgcttccctggacggagacaagatagaagtaacatcagaagatgcagccattattcagatgaaatttgaaaatcaggcactgggaagtgtggtactttcggaagtatctcctggaagaggcaatcatctttccctggagatcacaggaactgacgggaatatctggtggaatgaggaggaaaacaatcagttgtttacagccagaaagggcgaagggatccggaaggaggtttttgcctttggaaacggattttcagaaacctttacacagatgtttgaggctttttacctggcagttcaggaaggccgaccaggggaaacttatccggattttgccaggggagcaagaatcgccaggatctgccagggcgtgttggaaagtgtcagaactggcggcacctggatcaatgtagaataaatagaaaagcgtgaaaagtaataacattcagaacgaagcaaggataataggagcgtatatgacagcgcaggatgtgattagattattagatatggtgcctttgggacaggaaggcggcatggtaaaagaaacctggaaaagtaagaaaaaagatcatgggatttcagagggaagtgcgatctactatcttctgacagaggattctttttcacatttacatcgtctcacaggagaagaagtgtatcatttctatatgggagatccagtggaattgtgtgaacttatgccggatggaagtacaaagcttacagttcttggaacagatctttttaaggggcaggtaccccagcatgtggttgaagggggcgtatggcagggatcccgcctgaaagaagggggaaaatgggcgctgcttggaactaccatgtgtcctgcatattctgagaaagagtatgaacatggtaaccgggaagaacttttgaaaaagtatccggatgcagcagtatatattcggaagctcaccggagaagtcaaggattggtaactatactgcaattactgtacagttacaaggagttataaaaatatcaccagcttataaaaataggtaaaggtattacagaaaggtaaggaacatgaaagtaaagctactggcacttgatattgatggcacattgacaaacgatgataagaagatcacatcagatacgaaaaatacacttctgcaggtacaggaaaaaggggtaaggcttatgctcgcatctgccagaccggttcccggactttatgaaatggcagaagaactggaactgtacacgcatcagggaatcctgatggcttacaatggaggcaggatcattctggcatcggatggaagtgttctgtcagagactagcatggacaaagagaaaacaaaagcacttcttcgttatctggaaaccttgcctgtaacagtgattctggatgatgggaagcagttttatgttaccgatgaaaaagggtataaagtggaatttgaatgcagaaacaaccggatgagctgtacagaagttgataacctgtccgattttctggactttgctcctgcgaaacttcttctggcagttgacccggaacagattcttcagatacagcagcagatcgcagcacatttggatgagaatctgacggttgtaagaacagctgctttttatctggaaatcattccaagacagattgacaaaggaaaaggactgaaggatatctgtaaggtccttggaatttccattaaggatgctgctgcatttggagattcggaaaatgatatgcccatgctagaagctgcaggatggggaattgcaatggagaatgctgaagaggcagtaaaagataaagcagataaagttactctttccaataatgaagatgggatcgcttatgcaatcaaaaaatggctcctggactgactaagtcagtcgcaggagtttttcatgcatgaaaaccatcagaatcagtaaaagcagaaagaacataggaagcagggaggtacttaggttctgggcgatcagtccgaatacagggggcataagaagacttcccatataagcacttgccatctgtacaccgatcactgcctgggatttatctgctccaaaatgatcaggtgtggaatggatgatgcatgggtaaataggagcacagcccagacctatcatcagcagtcctgcttgtgagccaaagccgactggcagaagcatgataaggataccagccagaataatagcctgtcccatacggatcatctgcgggtcggacagcttcatggtgataaaaccgctaagagcacgccctacggtaatgccgataaagaacaacgctgcaagtcctgctgctttttcagcagaaaaaccgctgtggaaaacaaggtagctgcttgcccataaaatggcagtctgttcaatgccgcaataacagaagaatgcgagcatcacttcttttgcaccggaaatagacagtatttttttcagcgagagtggttctgaagaagcttcttcctgcacctgagcatttccacccacttttttccataaaggaagactgcataccagaattgctgtcagcataaactgcaggcaggaaatataacggtatcccatgttccaacgctgtccaccggtaagtacatatcccataatataaggaccaagggatgtgcccagtccccacatacaatgcagccagctcatatgacggcttgcgtaatgaagcgcaacatagttatttaaggatgcgtctacgcttcctgcacccagtccataggggatggcccagaggcagagcatccagaaggaaccgctgatagaaaaaccaaacagtgcggcagcagtgatacctacgctgatcgcagtaaccctgccggttcccagtttcttggtaagccggtcactttgaagactggaaataatggtgcccatggaaatgatcatggaaataataccggcagaagaaaccggaacttcaaattcaagatacattttaggccatgcagctccaagaagggaatccggaaggccaaggctgataaaggataagtaaataacagccagtaataaatgaatcatattgtcaacctcctatcattgtgatacgattatatcatcataaaatcggaaacagtagaagataatcctcataaatatatgataaaatcgccaaaaatccatcaccagagatgacttggaatgcagcttgctttgtaactgtgcgggtaccgaattgttacgaatacctaacgattgtatgatcgcagagaatcagaaaggaactaaaatctatggcaattcaggaatgtatccagaatatcgacagtgcaggtcaggaacttttacagcatggatcttctgtatttcctgttgcctgttatcatgatgatctgaaacaggcaaatgttgcctggcactggcatgaagaactggaggctgtggtagtgtcagagggaaatgtaatttcggcagccggttcccggaaaattcaggtaaaggaaagctgtggattttttattaatacaggtgtactgcatggtgcctggaatgttgaaaaaggaaactgcaggttccattcccttgtgtttcatccaaggctgatcggcgggagagacagtgttttctggcagaaatatctgcacccaatacttacagatacatcccttcagatggttgtttttgacagtgaagagacatggcataaggatgcctgcgctgccattgaagaggcatggcaggcaatggtgcaggaatatccgggatatgaatttcaggtaagggctgcgttatcaaagctgatattgctgttgtataaccattgtcccttatcaggtcatgagccatcgcctaaaatattaagaaacggcgaacggatcaagtctatgcttcagtatatacagcagtattatgaagagccgctgactattgggatgatcgcacaggcggcaatgatcagtgaaagtgaatgtctcaggtgcttccgtgagacgattgggacaacacctatccgttatctgaagcagttccgggtacaaagagctgcagaaatgctgataactacagagaaaaagattgcagatattggcgagctgtgtggatttcaggagatgagttattttgctaaaagtttccgtgagatgatggggataacaccctcagaatacaggaagaaggagaagaagaatgaaaaagaaatggatcaagggactggtggcagcactttgcatgcagaccatgtttatgggaaattctgtgcaggcagcagaaggaacaagcaatacctgctatgaagtttttgtgtatagcttcaatgacagcaatggggatggtatcggtgatctgaatggtgtgtcccataaattggactatataaacgatggaaacgaaagtacacaagaggatctgggctgtgatatgatctggcttatgccagtgatgccttccgctacatatcataaatatgatgtaatggattatatggatattgatccggaatatggaacactggatgattttaaaagcctggtttccaagtgtcatgaaagaggggttcaggtgatcatagatctgccgatgaaccactcttcctctaagcatccctggtttctgaaggcctatgaatatctacagtcacttccggaaggacaggagccggacagtgaaaaatgtccatatgtggattattataatttttctagggaaaatcaggcaggatacaatcagctggagggaacatcctggttctatgagtccagattttggagtgagatgccggatctgaatctgggaaatccattggtacggcaggaatttgaaaaggtcatccggttctggcaggaactgggggtggatggcttccgtctggatgcggcaaaagaatattacagcgatatgacggataaaaatgtggaagttttagcctggtttaactccatagtaaaggataataaaccggactcatatattgtagcagaagtgtggtcagatatggatacctacgggaaatattatgccagcgggattgacagctgctttgattttgcttttgccggtaatgaggggatcattgcagatactgtaaagaagatgaactcttataatgcttcttcttatggaaaggcactgattactttgcagaatacccttgaaaagtacggggaggatccggtggatgcaccattttataccaatcacgatatggcaagaggtgcaggatattattccggagaagatagcgaaagccagactaagatcgctcaggccatgaatcttaccatgactggacaggcatttttgtactatggagaagaacttgggatgaagggagcaggaaaagacgagaatttccgtgccccaatgtactggagtacagacaaaaatgcagaaggcatgtgcaatggaccggaagctatggatacagtaaagatgaaatatggaagccttgaagatcaggaaaaggatgaagcttctgtgtatcagtatgtaaaagctgcgcttcatttgagagaaaaatatccggagatccaaatgggaaaagtgacttttgaagagaatctttccggagacaatatctgtactatccgtaaaagcctggatgattcggaaattctgctggtatataatatctcaggagaacaggaagctgtggatcttacaggagtaagcctgaatcagaaaacacaggggaatatttcgctggaggatatactggttgggaaagaggttgctcccacactaaaggaagggattcttcagatgccggcatattctattgctgtccttaggtgaaaaagtttttatcagtgggaggacaatccaggtctcacgcacgttcgacttaaatactgtgaagattatgtgaaataaataaaagatgcttgacgtactaaaaaacgggtgttatattacaagtagaacagggagtgagactatggaaacaaagagagattattatcaggtgcttggcatcaacagagatgcacaggaaagtaccattaagaaagcatacagaaaactggcaaagaagtatcatccggattcaaatgcaggggatccacaggctgaacagaagtttaaagagatcacagaggcttattctgtgcttagcgatcctgaaaaaagaaaaatgtatgatcagtatggccatgctgcctttgatgaaggtgcaggcggtgcaggtaccggaggttttggtggatttcatggcaattacggcaggagtggcgatggctaccaggaatatcattttgaaggtggtgacatggatgatattctgaaaaatatgttcggcggctttgggaacagaagctcccatggatttggcggctttggaagcagtttcggtggctcatcagatggcttccatcagggatttggcacaggcagaggtggcttcggaggttttggaggcagccgtgatggtgctgatctgaatgccgatgtgacagtaagctttgacgaggcagcttttggctgtgagaaacggatttcgttatcggatgccaatggtatagggaaaacacatacattgcaggtgaagatcccggcaggtattgataccggaaaaagcatccggcttcgtggaaaggggcagccaggtgcaggtggcggccagcctggagatctgattttgaagatccatgttatgcctaagaccggttttgagagaaaaggacaggatgtatatacaatattgaatatcccattcactaccgctgtgttaggtggagaagcagttgtgcatactttgtatggtgatgtgatgtgccggatcaaggaaggcacacagtccggaacgaaaatccgtcttaaggggaaaggcattgtatcaatgaaagatccctctgtacggggagaccagtatgcagaggtcaggatccaggttccaaggaatctgagcagggagtcaaaagcaagattgcaagcatatgaagacagcatgaatcaatttgaaaatgccagatattctgcatgagtgaaaaaataacatatttctaaaaagtttattattgacggtgcagtgctttttatgccaatattaatattggtgtataaggactgcacttattttgtctggagacaccagtacagtgacaattaaggcaagtcaatatggcggttacttaatatttgctgtattaggtatttggaatatcttatctggaaataagaaacagtcctacagaattttcgagggaggtaatcatgataaataaacgagagtgcggtgtactgcttccaatcagcagcctgccgtcaaagtacggaatcgggtgtttttcaaagagtgcatatgattttgtagatgagctgaaggcagcaggacagtgctgctggcagattttgccccttggtccgaccagctatggggattctccctatcagtctttttccacttttgcaggtaatccttattttatcagtttggaagatctgatccaggagggtgtgcttacagaaaaagaatgcaatagtgtagactttggaaataaagcagatgatattgattatgaaaagctgtataagggacggtataagctcctccgtaaggcatatggccgcagtgatattaccaagaatcaggattttctgaaattccagagagaacagggatattggttaaaggactatgcactgtttatggctgtcaaggacaggtttgagggtgcaccgtggagtgagtgggcacaggatattcgcctgcgctggcagaatgcgttggattattacagacaagagctttattatgagattgaatttcaggagtatatgcagtttaagttctatgagcagtggggcaaattaaaggcatatgcaaatagtagagggattcgtattattggagatatcccgatttatgttgcactggatagtgctgatacatgggcaagtccgtggctgtttaaactggacgaagaaaatcagcctacacaggtggccggatgtcctcccgatggcttttctgctaccggacagttatggggcaatccgctgtataactgggatgttcacagacagtcagggttcgactggtgggtgaaacgtcttgctcattgctttaatatgtatgacattgtacgaatcgaccatttccgtggctttgatgagtattatgcaattccatttggcgatacgaccgcacaaaatggctggtgggaaaagggacctggaatggatcttttccgtactatttcttacagacttggtgacagagatattattgcagaggatctgggctttatgacagatactgtaaaacagctggtagagaacagcggattacccaatatgaaagtgatcgagtttgcatttgatgcaagagatacaggaaatgccagcgattatcttccacataattatcccagaaactgtgtggtttatacaggtacccatgataatgagacattgagaggctggttccgcgatatttctccggaagagcgaagactggttcgtcagtatttgagaaacttccatgattcagacgaaggtatctgcgaggatttgatcacactggttatgagaagtgtggcgaatctttgcattattccgatgcaggattatctgggattggataacagtgccaggatcaatcagccatctactttgggcaaaaactggagatggcgtctgaaaaagggacagtttacgaaaaagctgcagaaagaaatgctggatttggctaccagatacggaagaagaaactggacaaagacagaagaagaactggaagcagaaaaactggaagcagaaaagaataagaaataaaggtcaagggctgatgctgtgtttttgcatcagcccttttttaaccgaatcaagtaagtcccctgtttcaattgcgaaaagcaataagcagtgggtggggacttgcttgtatcaggaggagtgcaagctccttctg

SEQ ID NO: 90 - DNA, 14739 bp, Unknown
  gut microbiota DNA sequence
taaagaaatcaatgactatagatatagcaagagatgcacagagtagaacaagggtgatcagcagccagttatggaaagaataaataaagtccgtgaaatagtattcaaaaatcagcgtatgcagaagaaacatattcatggaatgctttccaagtaaagataaaaacggaaaacggaatcctttcagatctgtaagaataaagaaaataccggaaaggatcaacgctagcaatccgtctgtaagatcttcgtgaccgcatttaaaacggaaagtaaggatgacaaggaacaaaaatgcaaaaaaaaccagtgccaggctataaaatacagtatccgatttaatggactttaattttttccttagagaaaacagatatccataaatattttcactggcggccatgatcccaaggagcatggtgaaaaggtaagtggtgaatgcagtgagagggatccctaaatatgttaacatggcagccacaactacagcagatatgccaaaatggtcatacagggagagcagcaaaggcatggcaaagaccatcaggatggctacggacatgtaccaccaggtttcgttataggatggtgttccaaagaagctggcaagtcccgaggcatcgatgatcatataaaagataccttttaaaccgccttctttaaagtaaatcccaagtcggtccgctcttaagaaaaaggtaaggatactgataaggtaaacgatcagaaaaccgaaagcaagcttcttatagcgatgccatacgtaaccagtctgctggtcttttggtttctggcgaagagaaatggtgattccgcatgctgacagaaagacaaagatggctacgcatattttgcttagtgcacttaaggtcattattttatcgatagggatcaatctggaagaaacatgatacttttcaacaagatttgcggaacagctgaaaagatgatggaacagcatcaggatgattcctgctcctttcagtacaaatgttacatttttactgaaaaagacagggcattccggattggattgactttttgaagaagacataaaaacctccaataaataagcgtttataaatttgaaaccagcacattattctgcgaataagtgtactaagttatgttgttgcagccacagccaactggattatagcatagaaagaaataaaggtcactacttgccaaaaaatgcagatggtgctataatatatccgttcgcagatatagttcattggtagaacatcagcttcccaagctgaggaggcgggttcgattcccgttatctgcttgctgaacccctgaacgcttgtaatagcaggctttcaggggtgttttgttaaagctgtatatgtatacaaggagacaaagaagatgaaaattggatttatcggatgtgggaacatgggatctgcgatgatcagcgggatcctgaaaaaagggatttttcagaaggatgagatcattgtatcaaatcttacagaagaaggcagcaaaagaagcagggaaaagctgggagttgtaaccaccctggacaatcgccaggtagttaaaaatgcaaagacgatcattctggccgttaagccacagttctatcaggaagtgatcgaagaagtgcgggcggatcttactccagagcatatggtgatcggtattgcaccagggaaaagtctggactggatacaggaaatatgtcagacatccctgaaagtagcacgccttatgccaaataccccggctcaggtaggtgaaggtatgacaggtgtttgcagaaatgaactggtaacagatgatgatctggaacaggtattgaagatcactgacagttttggcaaaacgcaggttgtgccggagcgattgatggatgcagtgggagcagtcagtgggtgttctccggcatacgtatttatattcattgaagcaatggcagatgcagcagtggcacaggggatgccaagaaaacaggcataccagtttgctgcacagtctgttctgggaagtgccaggatggtacttgagacaggaatgcatcctggagaattaaaagatatggtatgctcaccggcaggaaccaccattgagggtgtgcgtactttggaaaaggcaggctttagaagcgctgtttttgaagcacttcaggcctgcgcagataaaggcaaaaagatgtaaataaaaaatcagataaaaatgcatctggatacagagcaaactgtaatcaagatacaggtaatcggaaatacttaaaactgctacaactggcaaattcccttacttaaagtgctgttgtgatatttggaagagttggttacttcttcaccgaaccattctggaggtatataagatatagcttcttcttcagaagagaattctacctctgcaaggaaaagcccctgatatggagcgtcaaatatgtccaattcaatggtcagaccgtccttttccggaatcacatatctggtttttgatatgataacaccatctgttttaggcttcaggtgctcataagcttcctgagtaagaggcagattgtattcttcacggcacatcagtcctttggatttataggtaagataataagaatcattggatctgcggatacggacaacaggatctgtacacagatatccctgttggatcttttttgaaggataagataccaggttttggggcagattttcctgagaaatcaggaattttcgttcgatttccataataaaagcctccttatataatatggggaaaaccaataccatttataatgtgggaaaacccaatcccattatacatggaacaaaggagaaataaaataggaagaaagaggaaataataatggcaaaaaatgtttatatttttctggcagacggatttgaagatattgaaggacttgctgtagtagatctgatgcgcagggcggggatccggatcactaccgtttcaattatggacaaaaaagaagtagttacttctcaccatattgcccttttggcagattctttatttggtgaaactgatttttcagatgcggatatgctggtgcttcctggcgggatgccggggacaaagtatctgggagagtatgagccgcttgcaagattgttgacacaatttgatcagaaaggcggaaaaatcggagctatctgcgcagctcctactgtgctggcttccctgggacttctggagggaaagaaagcaactgcttatccttcctgcatggacggattaaaaggggcagaaaaatccttggaaaaagtggtaacagatggcaatattaccaccagcaggggactgggtacagccgttgattttgcactatccctgattgaacagcttcttggaaaagaaaaagcagatgaaattgcagaatcagtagtatatacccggtaaaatggtcttttgccggaaaaaccatgtaaaatgggggctttcctttgaaaaaacactagcgtttttgaaactcctgtgctatactactacaatgactgtaattgtaaagaattgtagcgttattcatgagcgttataaaaattaaaggccagaagtctgaggcagtgactgcctgcatggatatttgacagaccggatggcaatgaattattttacctgaattttaaggaggaacacgaaaatgagtttacaggttgagaaaatggaaaaaaacatggcgaagcttacgattgaagtttctgctgaggatttagacaaggcaatggaaggtgcttacaaaaaagcaaaaaacagaatttccattcctggattccgtaaaggaaaagctccaagaaagatgatcgagaagatgtacggaaagggagtattcctggaggatgctgtgaatgcactgttaccggagcattatagcaaagctgctgcagagagcgaacttgagatcgtttcccagcctaagatcgacgttgtacagatggagccgggaaaagactttatctttacagcagaagtagctgttaagccggaagttactcttggtgagtataagggactggaagttccgaagacagagatcagtgtaacagatgaagaagttgatgctgaagttaagaaagagcaggagaagaactccagaacaatcactgtagaggatcgtgcagcacagaaggatgatattgttactatcgactttgaaggattcacagacggtgttgcatttgaaggcggcaagggcagcgattatccgctgactattggctccaacacatttattcctggatttgaggatcagctgatcggtgcaaatacaggtgaccatgtagaagttaaggttacattcccagaggaatatcaggcaaaagagcttgcaggcaaagaagctgtattccagtgtgatgttaagaagatcgaagcaaaagaacttccggagctggatgatgattttgcaaaggatgtttctgagttcgatactcttgctgagtacaaagagaatgttaagaaggaactgacagagaaaaaagaagcagaagcaaaaactgcaaaagagaatgcagtgatcgataaagtgatcgagaatgcacagatggatattccagaggcaatgatcgatacacagtgccgtcagatgatggatgacttcggaagaagaatgcagtcccagggcctttccatggagcagtacttccagttcacaggtcagagcatggataagatgatggaagatatgaagccacaggctcttaagagaatccagacaagactggttcttgagaaagtggttgagacagagaatatcgaagcatctgaggatgagatcaatgaagagatcagcaagatggctgagatgtataagatggaagctgacaaagtcagagagcttcttggcgagcagggtcttggacagatgaaagaagacctggcagtacagaaagcagttactatgttagctgatgctgcaaaagaagcttaattgtaactattcaacaggaagtatcctgtgaggtgttttaaaatatatcagctgggagtcaatcccacagctgatatagcctccggcaggattgcagagatgcgcaggagaagtatgtcatgcaattgcatgacgcgcacctcgcagcaagaatgccgaggcattcttgaatttacctcgcaactgtaagggtactgaacagttacgcttaatcagagaatagaaaagaggaaattatgagtttagtgccatatgtcattgaacagacaagcagaggggaaagaagttacgatatttattcaagacttttaaaggacaggatcattttcctgggagaagaagtgaatgatgtaagcgcaagccttgtagtggctgagctgcttttcctggaagcagaagaccctggaaaggatattcagctttatattaacagcccgggaggttctgtgacagccggcatggctatttatgatacaatgcagtatatcaaatgtgatgtatctacaatatgtcttggaatggctgccagcatgggagcatttcttctggccggaggtacgaaaggtaagagatttgcccttccaaactcaacgatcatgattcatcagccctcaggcggtgcccagggacaggctacagagatccagatcgtagctgatcatattgcaaaaacgaaaagaaccttaaatgagattcttgctgccaataccggacagccactggaggttgtagagaaggacactgacagggataattatatgtcagcagaagaagccaaagcttatggcctgatcgatggtgttgtcatgcataagtaacaacataaacaaaagaggactcaaacaggagctttcttttgtatgtaatgattaagaaaagactcctgaacatcaggagtcttatcttgcttaaaaaggaaagacgcagaaactgtattttttatgggaaagcttctgcaaagaaatagaaaggaaatgtattgacccatggcagagaagataagagagggaaaaataagatgttccttttgccgtaaaacggaggatcaggtaaagaagctgatcgcaggaccggacggcgcatatatctgtgatgaatgcgtaggtatctgtgcagagatcatggaagaggaatttggaggatacgatcaagaactgggatctgagatcaatttgcttaaaccggaagaaatccatgccattctggacgattatgtgatcggacaggatgaagcaaaaaaggttctttccgtagcagtatataatcattataaaagagtgaccgcatccaggaacctggatgtggaactgcagaagagcaatattcttatgcttggacccaccggatccggtaagacacttctggcacagacattggcacggcttttaaatgtaccttttgccattgcagatgccaccactcttacagaagccggatatgtaggcgaggatgtggagaatatccttttaaagattatccaggcagcagattatgatattgagagagctcagtatggcattatttatattgatgagatcgataagattacaagaaaatcagagaatgtttccatcaccagagatgtttccggcgaaggcgtacagcaggctcttttgaaaatcctggagggcacagtggcaagcgttccaccgcagggaggaagaaagcatcctcatcaggaatttttgcagatcgatactaccaatatccttttcatctgcggtggtgcttttgatggtcttgaaaagatcattgaatccagacaggataccaaagccattggttttggcgcagaagttacatctaaagaagagaggaacgtaggtgacgtgcttaaggatgttatgccggaagatctgatcaaatatggcctgattccggagtttgtagggcgtttgccggtggttgttactctggacagtttggatgagaaggctttaatccgtattcttcgcgagcctaagaattcattgacaaagcagtatcacaaattgtttgaattagatggtgtggaacttgattttaaggaagaagcactggaaatgatggcaagaagatccatggagcgccggacaggtgccagaggtctgcgtgccattatggagagtacgctgatggatctgatgtatcaggctccttcagatgatactatccgcaaatgtattattactaaagaggttgtagagggaaccggcaaaccggagattgtccggggagaagctccggcacaaccggcaggccgtaaaagtccaaggatcaagaaaagcggaaccccggaaacagcctgatgaagggatagacaatagatgagtgaaccagtcattataatgcctgccatagcacttaggggaactactattcttccgggaatggttgttcattttgatataagccgcaagcgttccatgaaggcgattgaggcagcaatggtccaggaccagaagatttttctggtgacacagagaaattccaggcaggaaacaccagaactccgggatttatatcagaccggaacgatcgcctatgtaaaacaagtagtaaagcttccccagaatcttttaagggttctggtagaaggaacagaaaaagcggacttattggccctggatcaggaagagccttatcttaaggctgaggtttccatgatccggcaggaggaagaagagctgcaggcaccggtaaaggctgccatgcatcgcagcattcatgaccttttccagcagtattgccaggacaatggtaagatgagtaaggagatggcagtacgtattctggatattgcagatgtggaagaactgattcagcaggttgctgtgaatcttcctcttacctatcagaacaggcagagatttcttgaagcgtcaggccttgaggagcagtacgaagtactcggcgcacttctcaccaatgagatcaatcttttggacattaccaaagaacttcagcagaaactgaaagccagggtagataagaatcagcgggagtacattctccgggagcagttaaaggtgatccgggaggaactgggtgagaataatattctggatgatgctgaagaatacaggaaaagactaaaagaactgcaggcatcaaaagaagtaaaagagaagatcaacaaagaaattgaccgtttcaaaagtattaatggcaacagtgcagaaagcacagtagagcgcagctatatagaaacactgctttcccttccatgggataagcggtcacaggattcagaagaccttgaaaaggcatggaagatcctgcaaaaaggacattacggattgaaggaaataaaagagaggatcatggaattcctttctgtaagaagcctgacccataaaggtaaaagcccgatcctgtgtctggtaggacctccgggtaccggaaaaacctctattgccaggtctgtagcagaggcattggataaaaaatatgtgaggatctgtctgggcggtgtacgtgatgaggcagagatccggggacacaggaaaacctacgtgggagcaatgcctggaagggtgactgcagctcttgcacaggctggtgtaagcaatccgctgatcctgcttgatgagattgacaagaccagcagtgattacaagggagatacatcatcagcacttctcgaggttcttgatcctgaacagaacagcagatttaatgaccattatgtagagatccctcaggatctttcagaggttcttttcattgcaactgcgaatgatctgcaaggcattccaagaccgcttcttgaccgtatggagattttggatatttccggttatacagaaaatgaaaaagagcatattgccaaagagcatcttattccaaagcagatggaaatcaatggaatcagtaaggatatgcttaccatacagggcagcgctgtccgtaagatgattaataattatacaaaagaagcaggtgtacgttccctggagcggtgtattggcaggatctgcagaaagactgcaagagccattatggaacagggaaaggataagatacgtgtaaccgggaagaatctttcagagtaccttggaaaagaaagatatgattacctgatggcaaataaaaaagatgaaattggtattgcacgtggactggcatggactcaggtgggtggcgacacacttcagatcgaagtaaatgtaatgccgggaaaaggagaacttcttcttaccggtcagctgggagacgtaatgaaagaatctgcacaggctggtatcagctatattcgttctatagccgggaaatatgggatccttcctgaatttttcagggaaaacgacattcatgtacatatcccggagggcgctgtaccaaaggatggaccttcagccggcattaccatggccactgctattttgtcagctgtgatccaggttcctgtacgggctgaggtagctatgacaggagagatcactctgagaggaagagtccttccaatcggaggtctgaaagaaaagcttctggcagcaaaatacgcagggatcaaagaagtcctggttccaaaggaaaataaaagggatgtccaggaaatggataaagagatcacgaaagatctgaaaatctgttatgtggaaacaatgggacaggttctggagcatgccctttcctccggaaaaaaataaaagctttgcataaaaaggcggttccatggcagcaaaggagattattacatggtaattaaaaatgtttcattagatattgtgtgcgggatcaccagtaaacttccggatacaggaagaccggaagtggcatttgcaggaaagtccaatgtaggaaagtcatcactgatcaacagtctggtgaaccgaaaggctcttgcaaggacaagtgcgcagccaggcaagactcagaccattaatttctacaatataaacgaaagtatttatcttgtagatcttccaggatacggatatgcgaaggttccccaatctgaaaaagaaaaatggggaaagatgatcgaaaggtatcttcatacttcaaaagtattgaaagcagtatttctgctggtggatatccgacatgatccttctgcaaatgataagatgatgtatgattgggtggtacataacggctacaatcctattatcattgcaaccaaaatggacaaattaaagcgcagccagatacagaaaaatcttaaagcgatcaaaaccgggttgaatctccggcctggaagcattatgatcccattttctgctgagacaaagcaaggaagagatgaaatctgggcattgatcgatgaattgaccggacagatgccggcagttactgagcagaccaacttacaggagaaataatatgggaataattaaggcgttcaagctgggatttgactatttcaagtatgacgaagacggcaatgtgcaggaaatgcagagagctgtcgatgatataaacctggacattgaagccgggagctttgtggctatcctgggacataacggttctgggaagtccacactggcaaagcaattaaatgcactgctccttccttccgaggggacgatctgggtggatgatatggatacatccaaggagcaggaattgtggaagatccgccagaaagcaggaatggtttttcagaatccggacaatcagatcattggaactgttgttgaggaggacgtaggctttggccctgaaaatatgggtgtgcctacagaggatatctggaaacgtgtgggtgacagtctgagaaaaacagggatgacagcataccgccaccattcacctaacaagctttccggaggacagaagcagagagttgccattgcaggtgtaatggccatgcgacctcagtgcattgttctggatgagcccacagctatgttggacccgaatggcaggcatgaggttctggaagcagtttccgaactgaataagaaagaaaatgtgacagtgattctgatcactcactatatggaagaagtcatccatgcggacaaggtttatgtaatggacagcggtaagattgttatgcagggaactccaagggagatcttttcacaggtggaaagactgaaggaatacagactggatgttccccaggtaactttgctggctcatgaacttcatgaggctggtgtggatatcccggagggaatactgacaacagaggaattggtgagtgcattatgtcaatagaacttaagaatgttacctatacgtacagcccggaaacggcttatgagatacatgcattaaaaaatattaaccttgtgatcccagatggacagtttatggggatcattggccatacaggcagtggaaaatccacattgatccagcatttcaatgcgctgatccgtcctacctcaggcacgatcctttataatggagaggatatatgggaagaaaaatatgaccgcagaaagctgcgaagtgaggttgggctggtattccagtatccagagcatcagctttttgaaagtgatgttttatccgatgtatgctttggacctatgaatcagggattgagccgggaggaggctgagaaagaagccagaaaggctcttgcccatgttggatttaaagaagagtatttcagtaaatcaccctttgaactttccggaggacagaaaaaaagagttgccattgcaggtgtgctggcaatgaatccaaagatcctgattcttgatgagcctactgcaggattggatcctaaaggccgtgatgatatcctggatcagatccagctccttcataaaatgcgcggcatcaccattatccttgtatctcacagtatggaagatattgccaagtatgtggaacggctggtggttatgaatcatggtgaagctgtatttgatgacacaccaagaaaggtattttcccattatcaggaactggaaaaaatggggctggcagctccgcagatcacttatattatgcatgccctgaaggaaaaagggctggatgtggatgtaaatgccatcactgtggaagaagcaaaagacagcattctgaaagcactgaagaagggaggaaaggcagatgattagagatattaccattggccagtattatcctgccgattctctgattcataagctggatccaagaactaagcttttgggtacattgatgtttattgtttcagtgtttgcttttcatacattttggggatatttggttgctacagtatttctgggcagcgtgatcctgatttccaaggtacctgttaaatttatttttaaaggcctgaaagcgatttttgtacttttgttatttactattgtttttaatattatccttacaccaggcgaagtgttatggcgttggggatttattaaggtgacaaaagaaggtctggtgctggcagggagaatggcgatacgtctgatctatctggtgatcggatcttccattatgactcttaccacaacacccaatcagcttaccgatggattagaacgtcagcttcgtcctttgaataagatccatgttccggttcacgagattgcaatgatgatgtccattgcactgcgatttattcctattttgctggaagagacagataagatcatgaaagcgcagattgcaagaggagcagactttgaaaacggaaatctgatacagaaagcaaagaatatggttccgttgcttgttccgttgtttatttcagcttttcgtcgtgccaatgatctggcaatggccatggaagcaaggtgctatcatggcggagatgacaggacacagatgaaacctttgaaatatgcaggcagggattatgcagcctatgggattctgaccggatatctggcaattgcaatcctgtttcgggtagtggggatataaaatatgaaaagaatcggacttgtagtagcgtacgatggaaccaattacagtggatggcaggtgcagccaaatgggattacagtacaaagcgttttgaatgaaaccttatcccagttgctgggagaacagatcgagaccattggagccagccgtacagatgcaggggtgcatgcaatgggaaatgtggctgtatttgatactgagacacggattccgggcgaaaagatttcttatgctctgaatcagaggcttccggaggatatccgcatccagctttctgaagaagtggatccggattttcatcccaggtattgtgacagcgaaaagacttatcagtaccggatccttaatcgcaaatttcctgtacctacagaacggctgtattcatatttttaccattacaagctggatgtggataagatgagagaagccacttcttttctcattggacgtcatgattttgccagcttttgcggggcgaaggcccaggtaaagacaaccattcgaaccattacaggaatggacgtatggcgagacggagatgtggtaacgatccaggtaaccggaaccggatttctttacaatatggtaaggatcatttccggtacattgatcgagatcggtaatggtcagtatccaccagagaagatcaaggatatcctggatgcctgtgacagggaggcagcagggcctaccgcaccggcaaaaggcctgactcttatgggaatccagttttttgattgatttttgcttatattttatgcatatttttgtattcataaggcgaaaaagtagttgacatactgctgccggtataatataattactcaatgtgacgtagtgcgaagatacttaagccaatagccccggcgacagtatttatcagcggtttcggacatttccgcagttttttgcatgtacgttcaggattataaatatttgcgggataccgcagtttgacaaacaatcgttgataaatagcaggaggtaaaaccatgcagacttatatggctaatccagataaaatcgaaagaaaatggtatgtagttgacgctgctggatgcacccttggccgtctggcttccggtgttgcaagcgttttaagaggaaagaataaaccacagtttacacctcacgtagatacaggtgattatgtgatcatcatcaatgctgacaagatcaaagttacaggtaagaagcttgatcagaaagtttattacaaccactctgattatgttggcggcatgagagagactacattaaaagaaatgatggctaaaaaaccggagaaggttgttgagctggcagtgaaaggaatgcttcctaagggacctcttggaagaaccatgtacaagaaacttttcgtttatgcgggatctgaacacaaacatgaggctcagaaaccggaagttttaacattttaatgaggaggtagaaaacattggctagcgcaaaattctacggaacaggaagaagaaaaaaatcagttgcaagagtttatctggtacctggaaccggtaaaatcactattaataaaagagacattgatgaatattttggattagatacactgaaagttatcgttcgtcagccactggttgctacagaaacagaaggcaagtttgatgtacttgttaatgttcatggtggtggatacacaggacaggctggtgcgatccgtcatggtgttgcaagagcccttcttgaggcagacaacgagtatagaccagttcttaaagctgctggattccttacacgtgatccacgtatgaaagagcgtaagaagtacggtctcaaagcagctcgtcgcgctccgcagttcagcaagcgataatcgactgctcagactatatcaaaatggttcaaaaagcccggaaaatcaaggttttccgggcttttgctatatctaaacgggctgatatggtttgaccaaatttggcaaaacgagagccgatttcacccaatttttagtggttaaatataggacaagacctacgatgccactgtggttttggagg

SEQ ID NO: 91 - DNA, 251 bp, Unknown
  gut microbiota DNA sequence
ctaatcgaaatctgctgtcagactggatgtaaacttttcacatttttcaaatgtggctggtggaatttagtctagcacaccgaattccagtagcccatttagcatgccatgaaatccagaaaatttcgttaagttagaacaattatagcagaaaacgagagattttgcttaaaaatctctcgtaaaaacaacaaaatttaaagtgctgtggaatttacttttgcactggaatttactttttcaagtcacaa

SEQ ID NO: 92 - DNA, 202 bp, Unknown
  gut microbiota DNA sequence
atgcattcacattgaaagggaataaaaaatattccgaagaattgaaacaacaagcagtcttagattatttcgcaggctatggttctcaaaatgatatttgcaaaaaatacggaatccgttcaaaagccaagctacaaatctggataaagaagtataatgggcatgaagaattaaaatcttctggaacaggaggaagcattat

SEQ ID NO: 93 - DNA, 12862 bp, Unknown
  gut microbiota DNA sequence
aatgtggaaagagagttgctatgaaaagaaatctgaaagtatttttattcattgctgtttgtgccattacaggcagttgtgtgttatatgtgaaagaatataatcaaaagcagcaaataaacagtgaaaaagatgaaaaagaaacacttgtatttcttacgtcaaaaagagaaacaaggcatatttttgaaacaatcattgaagattttaatgagtcacaggacgagatatatgttgaacatctggaagtacccaatccggatcaggagttgcaaatacgtgcagttcagggagaattcccggatattgttgaatttattggggctaaaaaagatgatttgaaaaaatatgtaacgggtggatatttgcaggctttagacaatttttcagcaacccattgtgttaatgagcattttttggaaaaactagaaattcttaatagtacttatgtgcttccattatctgtgaactacagaggtatattttataacagacagatgctggaggaagaaggttatcagattcctgctacatatgcagaacttattaataccatgcagcaaataaaaaaagctggaaagcttcctattgtttttgcagataaagacagctggaccgttcaccagggatgggatgcaattgatatgtcatccaggggaagccaagatgacttatttcagaaggtattatatggtgatgcacttttatatgaagattctattgcacttgattccaccaggagatatttagaaataagaaaatacagtcagaaacagacaataaacacaggatatgacgaagcagtaaaaacttttgcaaatggggaagcatatatgtttctccagggaaactgggcatatcccttaataaaaaaaatcaatccggatattgatctgttatttatgccattccctgcatatcatgaaggtgatgcaaaagtggtagtaaaaatagatgcatccttgggagtttcagcttcctgtacccatacagaagcagttggaaaatttctggattatgtattttcaaaaaaggtgagtgaatattatgcagaagaagcaggggcatattcctgtataaaatctgtagatgtagcagacaaatatgcaaaagcatttacggatagcatcaggaatggtgattttgatctggaagaatttgcttacgagagcgacaagtctgatgcaagggatgctttatttcagaactttttcagttcacctcaaaggaataccgaaaaatcatttttaaaggaatggaatgatcttttaattctgttgaaaggagactgaatgtgaagaggatttcaagattgcctgtatggtggcagctttttattggactggcatgctgttttctattttccttaatagtcatttgtgcatccttttttattgatataaaagaggctgaaaaaaataattggtcttacttgcacagaatgaacagtcagtgggaactggagattgaaacgataacaaagaatctggattatttgcaatatttacctttaatagataaagatatcatgacaaatctccgaaacgactatcaaaagcaatctctaaaaaaacaactttcaaactcgaactatgtaaataatattttagaggatatttgcgggattaacccatttattttacgtgctacgattttaaccaaaaacggaaatatttatggcaattttgttgaggactcattgaagcaggttgagcaggcacaagatcatattgtctattcaaaagcaggtcataaaaacgagaaatacatcacagacatatatgaaggcgaaataaacatgcttccatataaattattaacaattgcatatgctatgtatccggtaacatcagacgaaaagcttgctacgatttatatcgatctgaactttgaagaaatagaaaaaagtttttctgtgttttcaaataatgaaatcgaatgttgtctttttaataaaaacgggatgatttattcttctgaaaaagaaaacaattttcttctgaaggatgtgaaaaacatttatgaaaattcagatcatcaaggagtattggaaacagacggcactgtctggaacgcatatgttgttaaaatcactgatttggactggtatctggttcaatgtatgccgaaaaaaagttttaccttcaatagtacaaagaatattttgcccttttgcttttgggttttgatgatttttgtatttttactgtttggaggcatgcagctgatcagtcgtattacaaaacctatttctgaattctctaatgccttaaatcaggtaacattacataaaaaacaaaaaccaaggcatattctattatcagaggacgtaccagaagaaatttctacaatggtaagtggttataacgatcttgtatcgcgtattgaagaaaatattattctggcttacaaaaacaaaataagccagaagaaaaccgaactgcaaatgctgcaatatcagatcaatcctcattttttatataatacattaaatattgttagtgcgttggcaaagctaaacggaattaaagaaatatccgaaatctcggaaagcctgtcccatattttccattacaatgtaaaaggtggaaatattgtacagctgaaaatggagcttgaaaatcttcaatgctatgtaaaaatacagtccctgcgttttcctggaaaatttgatgtaatttataacgtggatgaggagatgatgacctgtgaaatgttaaaatttatcttacagccattaatggaaaatgcaatagaacatggcgttattccgtgcaaaaaaagaggcagaatagaactgacaggaaaaatcagttcagatcatatagcagagatcagtatttgtgataatgggaatggaataaacaatgaaacattgcagatgctgcgccaggagcttaagaaggacctgaagcagggcataaatcatagttcatccggaattggtctaatcaacgtgcaccagagaattaaaaactattatggagaagaatttggaatttcaattgaaagtaccctgggagaatatacttgtataaaggtccgttttcctatattgccaaaagaggtgtaataatgaactttaaaattttagttgcagatgacgaatattatgcaagaaaagtacttgttatgatgcttgagaaatccggattgccaattttggtagaaggagattttgaagatggagaagaagtaatagaatatcttcagaaaaatgaagcagacattatcattacggatattcgtatgcccaatttagatggtctggaactggcaaaatatgtacaggaacatttgccaaaatgtgcagtagtggtagaaacgggatatgaagattttcaatatgccaaaaaggcattgcgatatcatgtaaaggactatttgacaaaaccaattaatgaatcagaattacttgaatgtattaagaatattcttattgaaaaagcgaagttcgataatctggagaatattaataaattaaaaggtgttgttgagaacctggattttgcacagctgatacataataaaaagctatttgaccacatgatgcctgctgatctttggaatgctcattcctggttttatatggtgaagggagaagtttcaaattcagattatcaaaaaattgaaaactatttacagggccaaaaaaatgccgttaatatacaaagctggtattttaaaaataaaggagaatgtatattactctttttctgcaaagagaaaatggatttcaaagcatgtattggcgaggctgattttctgcagctaagaaatagcataggtcataattcctggtttggaatcagtggcattcataaagaaagagctgaaattgaaaaagcataccgagaatgtatttacgcaattaataaccgtattttaataaatgacaatctgtttttctggaagaaagaactggaaatcacgaatctgctggaaaaagaaacattggaaatattcagcaggttcatagaatttggccgcattcatgaggcagaaaaaatcatagacaaattatttgccagatgtataaaagaacatgcaaacatttacagcctttataatgcggtcatacagcttttttctgtcctccggaacaactattataatagatgtcaggttccggctggagaagggggatatttcctgtttgactttaagattgatctgtatcaattccatacagcggatgagttaaaagaatatttatttatgattttgaaagaagttggggagaaaaatgaggaaaatgaaaacgaacttctgatagaaaacattttaggttatcttgaaaatcattatgctgacgatatcacattaaatgagcttgcagaacataaatattttgtaagcgtgggacacctgagcagaacatttaaaaataaaacaggacaaacattttccaaatatctgacggagctgcgcctgaaaaaggcaaaggaatttttaaaaaatacagactttgacattacggatatagccacatttataggatataatgatgcttcttatttcactcagattttccgaaaatcctgtggtatgacaccttcagaatatcgttccatgtaaaatgcagcctcctgcacctgaaaacatagcagatgcaggaggctgccactaaaaaaaattcttaaaaattactttcttttctgtttgactgctctctgcaggcatttcctatattagtcaggcagagtactgtagcaatcaggaaaagccctgggatcaggatgatccaccaggagcctgtcatcaatgctttatctgacagagatagcatactgccccatgtgataacttctatgggaagaccgattcccataaaactcaaggtagcctctgagatcattgcagttcttacgttcataacaaccataaacatgattgatgagaaaaagttgggtaccaggtgtttccacaaaacacgaaagaaccctgctcccatacattttgcagcgataatatattcactatttcgtatctgtcgtacttcagtacgtaccacttttgcaatactggtccagctggtcacgccaattacaaatgacaggctgagaacattcgcatttcccatgatagcttgcagtaaaatgatcagaagcagagttggaatacttaggaatatctctgtaaatctcataatcagttcatcaagccatgccggtgccactccactgaatgccccaaccacaactgcaataaaagtagaaattacagtagctaaaccaccgatcagaattgagattcttcctccataccagatcatagaaaaaatatctcttcccatggtatctgtaccaaaaaggaattccttgtcaggcgccttgttataattcagcagatccatataggtgggatcctttgtcatgatcagttctgcacccagacagccaagtatgataatcaccaggattgctatcgaaaccactggtttgttcttataccactttttctttgctttcggaattattgtttctgtctttttgtttcctgcaaattcaaataaactattagtcattcttccactacctccgatttctcggttattacttcatccttcatacgaggatcaatctgttcattgatagtctgactgacaatattacagaaaataacaaggattcctgacatcatacacagcaacatcagcagattataatcatgatatctggcactctcataagacagagctccgattccaggataggaaaatacgctttctactacataggttcccccaagtacatgaggaactgcaattgccataatgctcagataagcaggcattacatttcggacacaatgtgtgaacataagctttttcttattcaatccttttgcttttgccagaagaacgtaatctgcacgaacctcttcaaggatcttatttcggatcatgtaagcataataccacaaatgctccagaaccacgatggtcagcggcatgatcagatgcagaacccggtctccaacatttcctgcatttccggtactgtaagcgccactacttggcaaaatcttaagatttacggaaaagataaggatcagcaccagagccatccagaactcaggtatacaacttgatatggttcccagcttgcacaggatccggtctgccatccggttttcgtaccaggcgcataggattccaagaagcaaagctcctgcaaacataatgacaaatccgattcctccaagcaaaagtgtattgccaatgcggctgccaattacttctaatacatcctgtttatatttaaaggaaatgccaaactctccatgaaaagcattttttacccatttcacgtattgcacagaaattggttcattcaaacccagtttttccattgcccattcacgttcttccgggctcatcttctctgtacggtctccataataagagatcagcgaatctcccggtgcaagacgtgctacataaaatactgccacagaaagtataaatacagaaatcaggaatatcaggcattttttaccatagtagactaactttttttgtctcattatatactgcacctctttctgtcagcctgggtcattgcaaaatgtcctggtgacacttctgtccatacactgttttccattccctccccatgataatactggaggactctttttctttccctgatcggatccggaacaggaattgcagataacaatgttttcgtataagggtgcaccggattggaatacagttcttctgctggagccagttctaccagttttccatgatacatgactcccacccggtcacaaagatattcaaccatcgccagatcatgtgcaataaataaaaatgtaaatccatgatcctcctgcagatgtcggaacaggttcacgatctgtgcctgtatggacacatcaagagaagcaatcggttcatctgccaccagaaattccggttccatacacaaggatctggctatcgccactcgttgtctctggccgcctgacaattcagatggataacgatccagaaagctattctccagtcctacatattccatctgaaatgcagcctctttcacaaagcttcctctgggcggtgtgatatgctgaattctcataggctcagtaataatatcagacactttcattttctgattcagactggatgctgaatcctgaaagatcatctggcgtctggtctgcagcattttcttatgctttttaaatttctttttatcacagatatttacatctttgtaccagatttctcccttcgtgggctgatatatattcatcaaacatctggctactgtagatttcccggaaccagactctcctaccagaccaaagatttcacctttatggatttgaaatgaaacatcgtccacagcctttactttgatttttcttgtcaggtgaaactgctgggtcaggtgcttcacatctaataaaacttctttactcactgaactgccctcccataggtgatttgatctgtggtgcccgtgggtccaacagccaggttgccgcataatgcgtatctgttatcttaaacataggcgacatttcttcataatcaatattcagggcatactcatttcgacatgcaaaagcatcacctttaggcggatggatcaatgtaggcggcataccgggaattgtgtacagactttcttttccatttgcaaatgcaggaagtgacttcatcaatccccatgtgtatgggtgtctgggatcgtaatacacttcctctgctgtaccgatctctacgattttacctgcgtacattactgctaccctgtctgctactctggcaacaactcccagatcatgagaaaccagtatcgtcgctgttccaagctttttctgtatttcacgcaaaagatccaggatttgtgcctgtatggtcacatccaatgctgtggtcggttcatctgcaaataaaatatccggatctgctgccagtgcaatcgccataacacatctctggcgcattccaccagaaaactgccagggatactgatgatagcgttcctttggatgaaaaatacctaccagctccataagtctcagaaccttctgatctacctgggcttttgtatattttctattgtggatcaccactgcttctgcgatctgttttccaattttgatcgttggatttaaggatgtcataggatcctgaaaaatcatggaaaaaacctttccacgaagcttctgcatctccttctcccgataacaagtgatatcctgtccattcacatggatacttccctctttgatctttgcacttggcggcaaaagcttcatgatacttttgcaaagcacactctttccacatccggattcgccaactatagccagcacttctcccttttttaacgaaaaagacacgtccctcactgcctgtacttctcctaaggaaccttctatgctgactgaaagatttttaacatctaataaatgttccatttttaatcctttttccgctagtgtaaaaagggggcactcctggtgcccccatcacaacccttatctcgttttattattcaatcgtccagtctgcaacattccagaaaatacccactccgtgatgtcccataactgtatcaggatcaattcccttaatattgctgtcagcaacatagttagcatcgatatagcagatcattgcataagccggatcctctgcaagagctttctggaaattagcatatgcctcggcacgaacctgcggatctgcggtctgtcttgcttcggtcagatatttgtcaacttcctcgttggaatagctggagtagtttgctcccttatctgttccgaatactttgtaggtatggtcgtcagcatcaaatgggcttccccatccgatcagaaatgccatctgtccagcccagtctgtctgtgcaggaatctcaacggatacatccatgccaatttctttcagttcctgtgctgcgatctgtgccatatcaatacgtacctgatcaccgaaacttacgctgataacaaatcccactttttccccatcacgataatagaatccatcatcacccatctcacatccagcagcttcaaggatttcttttgctttttccggattgtaatcataatgctcaacatcttcatagttgtaaatatttctctgaagcggtccataagccggcattccctgtccaaggagcactgcatcaatgattgcctgacgatcaattccgtagcatactgccgggatcagatcacggtttttctgccagtattcgttaccaaagttaaacatgattccacgatagtcagcagtcttcatatcatagcatgtatatgcatcatcatcagcaaaagaagctgcatccttcggcgtgagaagagccaggtccaattctcctgattttaactgaagtgctttcgcattgtcatcgggtacgatcttgaatacaactttatcaatggatggctcgcctttgaaataatcttcattcttaaccagagtaatagcctgtccttcatcccaagattcgattttgtatgggcctgttcctaccgggttacggaagaaatcagatgtctgcatatcttctccctcaagcaaatgcttaggaagaactgccattgtcatataatcaaggaatgcaacatttttgtctttaagcttaaatgaaacagtatgatcatcgatcacattaatctcttctacatcctcgtagttaggtgcattctcagaaccgttttccggatccataatagcttcgattgtaaacttaacatcatctgcagtaacaggttcaccatcctgccatttagcatcctctaccatatgaaatgtgtaggtattgtttgcatcatcgaactcccagctcttagccagtcctggaactacctgattctctccgtcatgtgcagttaatccactgaagatcagaatattgatctcgccatgctcatccatagccgggttgatcctggtataatctccacttccatataccagagttgtttcttcttctgcaaatgtaggaattgttgtgcctgcactggccataaatacagtcagaagcattcctaccattgttaaaagtccctttttcattctttgttccctcgcttttttaattttggtaattttctcaatgataccaaaatcagcgattcttcataagccctgtggggggatattcggccattcttatttgcaacagatgtattcaatatttgcatacgttattcaagcattcaaaaatgcctcggcgtttatgctgtaagatatcttttgataagctctagtccatctattgggacacaaaatttctgattcttctttttacattctgacagagtattttccaggtcaaaccactgcacttcctcaacctcttctttttgaagctttaagctttctatttccacaggcctcctgtaagcatatacaaatgcaatctcgttatcccaaaaaagctttccataaaactcctttttataccagataggaaatgttcctgcaaattccagatccctggcttgtgctttaatccccagttcttcaaaaagttcccttaatgcagattctaatggttcgtctcctgcctgcacatgccctgccgaagaggtatcaaacctgccgggaaaagaatctttctctgtggaacgcttttgcagcaaaacctgaatcctgccttccatttcccttatgatccagatatgggcagttctgtgtcttatcccctgagcatgtgcaatactccgctctacagtctgcccggttggctctcctgcctcattaataatatcaaaaaattccatggcttctttcgtcctttatctcaagttttctaaccaacaatacccttttgggaatcatgataacatctacagccgttcctgcaaccacgtttgcagaaaatgcctctgttgaaaatacatcccttgaatccactggaaccgatgaaaatgcaactttgatctcttcagggctggagcggatatcagacagaaaaaccttctactctttcttaaggtctgtgatcagcagataaagaatccccaggatcacaatggtactagccatgattgccaacatccatcctattcctacaactttcccaagaaagataggattgcagtccacggaatcccggatccccgcaattgcctgtgtggggatcccttccttttccatttccttaaaaacacctctcagcatatgattcttcaacaaagaagtcccatatgtacttggaataaaggaaagaatcttctgcaatccgcttccaaaattagaaataggcatatatgcaccacatataaaaccatatcctgcacttacaatggttcccacagctgacatctgtccctgggttttcaaagggtagcatacaatgctggataaaatacttccaaacaggaccagaaggatctcgtccaaaatcagccataaaacatctgccacgcttaaataccatcccatgatgccaatatagccaaggcacaatgccaaagccagcagatttaccattaaggaattcagcacagttgaaaaaaagtagcccaggtagatcaatggtctttttacaggagatacattaaaatcctttcttgcaccactggcccggtcctgtatcatagtcaggtttacacaaaaggttactgttacacagctgactgccagaagtccggctgcaagctgtgaagctactgtgccatccactaatttatcagaaatcttaaagaaatcaggaagggccgacaagaaagaatctctgtatatattagcaagaaaagttccatataatacgatcagaataatcggagtgatcaaggatgagatcagcatgcccttgtctctaaaaaacagcttcctgtttcgttttattaatgccaacgtggttttcatggattctcacctcctaatacctttccggttacagcaagaaatacatcatccatgccgccctttactacttcataatcctgaaacagttcctgatgctctacaatcagctttgttgcttcaccggtgttctgtacctggatctgataaccatcccggattgccttataaggtttgccaagctgccggatctgttcttctcctgctccatatatagaaacatagtcctgtacatattgatttttcagctgataaggtgtaccctctgccacaatcttccccttatccagaatcactacataacctgcagatgccgcttcttccatatagtgtgttgtaagaaaaacggtcatattctctgatacccgaagcttttcgataatactccatatcagctttctggtctgaggatccagtcctgtggtaggctcatccagaatcaatatctcaggcttgtgaagtagtgccctggcaatgtcaattcttcttcgctgaccgccggacagtttgcccacctgccggttcataaaccctttaaaatccaggataatggacagctcttccagtctcttatcaaattccttacctgtaataccatacagtgcggctctgctctctaggttttccctgacagtcagcggcttatccaacacactgtcctgaaaaacaacacctatcattcttttaatgtctcccggcttctgatctacttcgttgccgccgatctttacctctccactgtcctttttcagctgcccgcagataatcgagatcgtggtactcttgcctgctccatttacgccaagaaaagcaaatagctccccttttcttacctgaaagctgagatcatttacagcatgtacactgccgaaggacttattcagatgctgtatttctattacaggatccaactgtttttccatttttcatatcttcctttccacaaacattctttcttacggaaatgatcaaatgtatacggtaatccatccgtactactctaac

SEQ ID NO: 94 - DNA, 559 bp, Unknown
  gut microbiota DNA sequence
atggggcctatagggctcgaacctatgaccctctgcttgtaaggcagatgctctcccagctgagctaagaccccataaaatttgctaaatacagcaacgacccggaagagactcgaactctcgacctccgccgtgacagggcggcgctccaaccaactgagccaccgggccagaaaaaatatttatataacaaaaatggaccttcggggactcgaacccaggaccgaccggttatgagccggttgctctaaccaactgagctaaaggtccaaaaagccgatgatcggactcgaaccgataacctgctgattacaaatcagctgctctgccaattgagccacatcggcacatagaaaacataccaaatgtcagagttaagcctctcaaaaatctcattttgtaagtgactccaaggggatttgaacccctgttaccgccgtgaaagggcggtgtcttaaccgcttgaccatggagccatatttaattttaaactccccctgttggactcgaaccaacgacactgcggttaacagccgcatgctctaccgactgagctaag

SEQ ID NO: 95 - DNA, 7179 bp, Unknown
  gut microbiota DNA sequence
gtccccctgattttgctaatgaaccttcactaccttacttctttaaaaagcctgtcagaccagacaatgatctgacaggtctaaattaagtatcagttttcttctttatacacctcgtcttctgtgtaaatacccttatcaataatttcttcctgaatattatcttttgtgataactacagaatcaacaactacgtgcggcatatcatttatgccaaaattaatagattcctctgtatccaaatcttcaccttttgcaagttttacagctgtttcaattgcagctctggaaagtgcttcactatctttataaagagtagaagtctgcgttccttttgcaattctctgtacggctgtcagctcacagtccataccagttacagcaacttttccatccatatcaacttcctcaagtgcctgaatagcaccggaggcgattccatcattcatacaaacaaatgctgcgatatcattgtcatgttctgcaagtgcattctgtgcataaccaagagctgcttcagcgccccagttctggcaatactgttccataacaatatctacgtcaagttcatcaagaacagttttttcaccttcaatgatatgctcaatgccggaagatttatcgccatgaagaagaaccacatttccagacacattgatatctttcagagcagatgcaatcagagatccgttcgtaaagtctgcatatccaacaaatgcatcaccatatgtattttccaactgctggtcgtaaaccagaactttaattccgtcttcttctgccgtcttgagaacatttgaaagtgctccagcgtcaactgctgttaccatgattacatcaaccccctgtgtaatcaggttctcaatctgcgatacctgtgtctgtgcatcgccgttagctacctggtaaacaaaatctactccaagatccgccgctgctgcttcgcaaccgtcaagctctctctgccagcgttcttcttgaacagtcttcaacgaatagccaactgtaatcttgtcatctgcatgtactgctactgcagaccccattgtcatcatcattgctacggtcaaaattcctccggttacctttgttaacatgcgtttcatttgaaatacctccttatttgttttaatttgtttttagttttttgccaccccgtttgttgtcgcttcgtttctttcgatgtataaaagttatcatatttccacctttctttacatggaaccagatgactgtaatgttgaaaataattactgcaaaatcagaaaaaaacactgaacagaagtttgtaccaacctctgttcagtggttttttttaccttttgttattgtttttttacctttttatcaatatataactactgtgtctgttttctgtagtcactgacagacatgcccgtatattttttaaagcaggaactgaaataatgaggatctgaaattccaaccctttctgcaatctcatatgctttcaaatcagaacgcaaaacaagcgaagatgccgcattcattcgcaattcaaacagataactgctgaatgtcataccgattttttctttaaatacgcgactcagatagctggaatttacaaaataaagttctgccagtgcatttagtgatatgtcttcatctccataatgttctgcaagataatcttttactttatgtacaagatttttttcagtatcagaaacctctgttcctattaatttacaggattcattcaccatactttttaaataactttgtatttcttcaaaagttttaatctggaacagcttttcaatcataaccgaatattccatttctcccgaacgtttttcaatcttgagttcagatattgctttcataatttctgtcaaaatctgcattgcatatacaagaatctgatccctttcttttccagattttttcattcttaacagcatattttccaactgttcctcagctttttttgtattgctgacacgaattgcattaccaaactcgtgtaatattcccgtatccaatcctatattttgttccgtatcataatacggaaaaacgtctctgtaacaaataactggttcatgttctgatacaaattgaaatttcaaagcatctattgcttcctgataagattttcgtaatcctaccagttcctgatagatatttcccacgccaatacttattctggcatctgtattattttccaaatatcgtttcagttcttcacttttttcatatatagcattttctgactgattgttcattattatcagttgttcggaaccactgtcaattacaaatactctcggcatatctccataataatcttccgcgatctcacgaacatacatttttataagcagtttttcttcttcgctttcagcctcttcactatattcaagctgcaccaatgctgtctgatagatgctacctgtcagcttcactccaaaatattccaatgactccaagtactgttccggtttgtgactccgcacaagcgcccaaaactgcctatcccgaatataacttgcatgtttctctagttcctctttataccgtttatattctttgatatgatttctttcctgcagaattgcattcctgactttgacagcagccttttgaagttcctctgcattgataggttttaaaagatagtcaaatactcctatcttaattccttcactagcatattcaaactcatcatgtccagataaaatcaatattttaacttccggatgcttctctaaaatcttcttgctacattcaaggccattcattccaggcatccgaacatccataaaaacaatgtctggatgaaggctgtcaacaagttccattcccattctggaggaacttgcctctccaacaatctctagtccaattcctttccaatcaatacatctcatcaccatctggcgaacaagtttttcatcatcaaccacaagaaccttcaacatatttctttatccctcttaaatctaattatacgtttttcacagaacagcataagtcttttataagatttttatcgattaattccccatgtttcttttacaatccaatctaccatatcataatatttaggatgatgcctgtctatctttatcctgtttttctattataccagtctgaatttcacagccagctttttcagataacgtcctcccggcatcatggcaaactctgcatcagaaggatgacttactttcagatagaatacaaaatacactgccatacctgcaagcacgcccagcccaagactgatcacattagaatgaactactgcatataccagatagtaaaccccaccggctgcaactgccatcagtacgcttgccagcagcggatacagataggcttttctccatggattcttataacccatatactgcttcatcgcccgttcatttaaaatacacattacaatggcatacacgatcattgcgatcacaatggtatataccccaagatttgtaacaaacatcagcacagccatcacgatcacatctgccacaagagcaatagctgcatggaacataggaatattcggctttccgattccctgaagcacaccattggaaatattggaattgccattcaggataatggtgatcacgccaaggatcatcagctcccctgccacaccattggtccttgggaacaaaagtcttgtgataggtcctgcaagcactgccagcccaacagagcagggaatggaaataaacatactcagccaagtagccttatcaatcttctctcttgctccattcatatcacgcattgcataatgagcggatacttcagggatcatggaagtcggtgctgtacttgccagagtaagaggaatattgatcaaagtcatataaaagctgtactctgcatacatagtctgaatagtatggtcatccaatcccttcagtccatcaataccagaatacatataactgttaatggttccgtttacattgtaaataaacgcactgagcacaataggcattaccacaaggataatattccgcatcacatcccctgtgctgctgctttcggaagcatgatcattctgaatccttttattaatcgttctccggttaagctgataaacaagaagcataaagatcagtgcagaaaacacacctgcacctgtacccatcgtagcacctgcagctccccaggactgaacaaccgcatcactttgtccgctgaaatggctgatcataactcttgacatcgcaagcgccatcacagccacaaaaatctgttcaatgatctgtgaaagggaagtaggcatcatatttcggtaggcctgaaaatatcctctgaatacgccaagaataccggacagaaaaatagtaggtgccagcatgcgaagaggaagtctagcaccggacatggaatcaggtaccagtataggagccccaaagtaacataatagagcaacagctccgcctgccagagatacatagatcaaagcacatttaaaaaccttctgtgcgtccttatatcgtttaaatgcgatcttttcagccatgatctttgatacagcttgcggaatactaaaagatgcaatcatcagcagaataaaataaatattctgtgcataggaaaacattgcatagctgttgcttcccagagtactggacaaagggcttttatacagcattccaataatcttggagatcagcgctgccaccatcagaaaagatgcattttttacaagtgtattatcgttctttttactcatagtatctatattcctttaaatttattccccgacagaaacgttctcgatctgccagtcaatggggggaagtccgtttttctcaagaaattcatttgtcttgctgaaatggccacacccgaaaaagcctctggatgcagacagaggactgggatggggagcagtcaaaaccagctgcttgggattgtcaagcatagactgcttggtctgtgcaggtctgccccataacaggtacacaatgggtctgtcctgctcattcagtgtacggatcaccgcatccgtaaattgctcccatccgatccctctgtgggaattagcctgatgagcgcgtactgtaagtactgtgttcaaaagcaacaccccttgtctggcccatttttccaaacatccattatccggaatatagcatccgcagtcgttgtgcagttctttataaatgttgaccagagacggagggatatctacgtccttacgcacagaaaaacaaaggccattggcctgaccatcattatgatatggatcctgtcccaggatcaccacctttacctgatccagtggtgtaaagtcaaaagcattaaacatatcctgcggcgatggaaatatttttcttgtctgatattcattcattacagtcttatacagtttagcataatacggctgatgaaattcatctttcagtgcttccagccatgcgcctgaaattgcccccattttcctacctctctctcatagtttttcacaaaaatctttttctataagtttgttcatgtttatttaattcgtttatttaactgtttatttaattcgtcttttttccttctgtctgtttaccgtctcacagaaatcccacgatctgccagataatcctttacctgacggatctccagttctttataatggaacagcgaagcagcaagtgctgcgtctgcaccgccttcagttaaagcatcataaaaatgctccagtgtacctgcaccacctgatgcaatcacagggatagatacggcctgtgatatagcttttgtaagctctatatcgtatcctgcctttgtaccatcacaatccatgctggtaagaagaatctcccctgctcccagttcctgagctttttttgcccaccatacagcatcgatccctgtatccagcctgccgccatgcttataaatattccatcctccatccggacggcgctttgcatctatggcaagcactacacactggctgccaaacttctgtgctgcttcccggatcagttccggacggtcaatggcagcggaattaactgaaatcttatctgcgccttcccgaagaagcttccgaaaatcctcaactgtacgaataccgcctcctacagtaaaaggaataaatacgcttgctgctacctgacgtaccatgtctaccactgtatcacgatcctcacaggaggcagtaatatcaagaaataccaattcgtctgctcctgccgcatcataggcttttgcaatctccaccggatctcctgcatcccgaagatctacaaaatttactccttttacaacacggcctttatttacatccagacagggaataattctttttgtaaacatacgtcagtcctcccttccaatctgtgcaaaattcttaaggatctccagtccaaagcggctgcttttctccggatggaactggcatgcaaatacattatccttctctacagaagcatggatacaggtactgtaatccgttacagcctttacaatctccggctcatcagcctgcagataataggaatgaacaaagtatacgtatgtatcctccgggattcctttaaaaagccgtccttcatgctgaagatgaagggaattccatcccatgtgcgggatcttcagtcccggacatggtgggatacgcagaatcttccctttcaggatcccaagacctggcacccccggtgtctcctcactgctttcaaatagaagctgcagtccaagacagattccaaggaaaggggtcttctcctgtacaatctgtcggatcacaggaaccagttcataacgattaagattctccattgcatctccaaagctgcccactccgggcagtatcactttatccgcattcaacaaagtttccggatctctggataccaccgtttcctgtcccagataatgaagtgccttttctacgctacgtatgttaccagcatcatagtcgataataccaatcataatattttctcctcgatttcagtcaattctgttgcaagccaccatcgtttaataatccaaaaattaactgttccgtatcttcacagttataagaaccatttattcgttgaatatcataacacatgaaaaacactttgtcgatattatccacgcagtacaaatacttagatattataccaactgtacaattaatttcggtgaatttctggtggaaggtatctgcaacaaataaagactattttg

SEQ ID NO: 96 - DNA, 445 bp, Unknown
  gut microbiota DNA sequence
aaaatattcatccaagagtcagaaagccttcctccatgagcctgcaaaactatttgcatcgccctttcgatattgtcagaataaagaattctatttttttcttcctgtttaagtgaaaatcttctttccaaaagatgtatatatgtttctctatcaagtacaccttccaatgcatctgactgaaagcaaaattcacaatcataggggtcgttgaaataaagtggtgatgatggatatactaatccttcaaaagcttcaaacttccatttttcaatgttaattatcctatgatgaatatagctataataattcagtttgtccgtattaaatgacctgtacctgaataacgttcttctcatacgtatgctctccctttactctcgaacaagctttattatattacactaattataataaagcagccgcttacccattcaataagcaa

SEQ ID NO: 97 - DNA, 2821 bp, Unknown
  gut microbiota DNA sequence
tgggagttgtaagaaatttctaattatggaaatatacaggggaatctttatgatcaaacggaaagaagcactggagtttggcttatcatttcaggatacatatgaggaaaggcctttccatgaccagacctggcagctggtaagagtaaaggaaagtaaaaaagcgtttctgtggatttttgagcgtaatggatatgttaatctgaatgtaaaaacagatccggaatggcgtgatttttggcgaagtacatatgaagcagtaactgcaggataccaccagaataaggaacactggaataccattgttctggatggaacaataccagataaagatattaaaaggatgatatctgaaagctatgacttggtcacgtacagcccaacaaaacggatttatgaggctgttaaaaaaattccaaaaggctgtgtggcaacctatggaaaagtggcagagatggcaggaaatccaagaatgtcaagagctgtgggaaatgcacttcataaaaatccggacccggagcatattccatgctatcgtgtagtaaattccaaaggagagctagctggagcatttgcttttggcggcgaaaacgtacagaaaaaactgttggaagcagatgggattgaagttatcaatggaaaagtagatttgaaaaagtacggattatagtacagcagcttctgtgtacgaaagaatgaatttaaccgaatcaggtaagttccctgggtcggttgcgaaaagtaataagcagtttgtctatgaaaaataggccagctgctttttttagcttttttttatgccaaaaagaattgacaaagcagaagagctacactataatcgttctaaaaagaacgataaaggagggcgagatgtatttttgggataagcataaaacaattacaagctattatgaattgctttccagccggatatgtgaccagtatgggttaactcagatggaatatgatatacttatgttcctacataataatccgcagcataatactgcagcagaaatagtaaagattagaaaatcaaccaaatcacatgtttcaacttcgttaaaaaaattggaaaacaaaggatttattgaaagaatacaaagcgaagacaataaaaaacatattgagattgttttgctggataaggcagaattaattgtggaagcaggaataaacgtacaaaaacagtttgtacaaaatgttttaagcggattgacagaagaagaaacgcatatgtgtatcaaggttttcaataagatttgcaataatgcagaggagtatttgaggaaatataaggagagagtggatgaaagctagattttgtgtaaagaggaaaacattgcttctgattgccggaatcgtgtggatgatagctggttttaatgttgccagattaggagtattatcctacttgaatattgaaagaaagtggtatttatattttatatcaatattggtatttattcttttgggcttaatgttcttcaaaatgagccagaaacatacaagacgaatcctggaatatgaagagtaccggccattttggaatttctttgatctaaaagcatatttaattatgacctgtatgatgagtggcgggatcggatttcgagcagcaggtatatttccagagatgtttattgcatttttttattctggcctgggcttcgctttagcattagcaggagttatttttaccagaaactatttgttttacaatcaactgatagaagaggagcaggattaataatgagagagaataattacaaaccacagatgcccgatgttatggaggcaatatttgatgcagcatatctgatttttgatttggttgccgcagtgttgttttttatattttcaaaaggaaacaccttatttgtactttatggagtattaacattgacgctttgtggtggggatgcattccatctggtgccaagaattatcagggcagtacagggcagcagtgataaaataaagagacagcttggaattggattacaggtatcatctattacaatgacggtattttatattattttaatgtatatatggaaattaacatttccagaaataacattgccggtggcgattcaggctgtaatctggatatcagcagttatcagaattgttatatgtatgtttccacagaataactggtgcacagatgaaggaaatatgaaactgtctattatccggaatgcagtttttgcagttacaggtatagggataattattctgtatttaatatcaggaaatacctatggatatcatatgacaaggatggctgcagctattatcatttcttttggctgttatcttccagtaactttattcagtaaaacaaaaccaaaggttggattactaatgataccaaaaacttgtgcatatatgtggatcatcgcaatggggcttcaacttttattttaactccccttttgtattggaggtgttgtttatatggagtatatagcgcataaagacggtgaaagagtacagacagtaaaagaacacttatatggtacagcagaattggcaggatcttttgcagaaaagtttgggaagaaagaatggggttattgctgcggaatactacatgatcttggaaaatattccaaagaatttcaaagaaaaattcagagtgatacaagtgaaagagtggatcactcaactgcaggtgcgaaagtctgcaatgaaaagggaggttactattctattttaagttactgtattgctggacatcatgccggacttccggattatggaaatactgcgatcggtaatagtttatgcggaagatgtaataaaaaaatctgtg

SEQ ID NO: 98 - DNA, 24564 bp, Unknown
  gut microbiota DNA sequence
aaaataatcagaaaaacagctccatcgccaattctgatgatcctgttttcagcaggcctcggaatcttgttttggtgaatattctagcatggcgattgattttatttccaacttcaatagcaattcctgctgaaccgcgcttatttcattgcgtataatttcgagcgacatcacccttcattcatgatgccgctccgcgcttcggccataccattctgccacaaatgagctgaccatcgttgtaataggggatgtgaaaaaactcgattgagttttttcacatcccctatatataacctttatctttcgatttttcttccatagtccactcctttggccataataaaaagtgttaatcacaaaatgcatttcctgttacctgcgatgatatcattttatctgcatgtaaaggaatcctgtcatatatctgtacaaatttcattattattctatcacatatttcagacaaaacaataaaacatgtaacaaaacattcaatcaaacaaagcattgccagaccggctggttttggtgtagagtatatattaaatggagagctgacaaatttcgccccctattgacgaaatgcagtctccagattactaatacatctgaaataataaaagggagaaacatatggaacagccaaaaattcttgtagtgggaagtatcaatatggatctttttgtaaaaggtgcccatcgcattccctcctatggtgaaaccatccgatgcggcgaatacggttttgcttccggtggaaaaggatccaatcaggcctttgcagttgcccgtctaggcggttctgctacctttgtgggccgtattggagatgatgattatggaaaaaaagtaaccgcatccctaagaaatgctggcgttaatactgactatctggtagttgatccagacacccagaccggacttgccttgatgcccattgagcctggtaccggacgatacgtctgttatgttgccatgggtggaaatgaccgcctttgtccggaagacgtaaaaaaagccatggacgcccaggcttttgatatggttcttatgcagcttgaaatgcctctggaaaccatctatggcaccatagaactggcaaaagaacgtcacattccggtatttctggatgcaggtcctgccatagatatttccctggaacggctgaaaggtctttttatcatttctcctaacgaagccgaaacctttggccttaccgggatctgtccggacacagatgcaaatgctttcaaagctgcccggctactttatgaaaagactgctcccacatatgtgatcctgaagttaggcgacagggggattctcctttatgatggaaaagaattcctccgaatcccctgttttaaagttgatgctgttgactccaccgcagcaggagacacattcggtgctgcacttgccatctccctttgtaaagggctttccatgatgaatgcaattcgctatgctcaggcagcagcaggaatttgcgtatccaggacaggcgcccagagttctatccccactccggaagaaatctgccgattcttggattcccatccaaatctgaattagtcccatgctcgcggaatgtttttatgtaataggatcattccgacgcaatcataaaaaagcgtgcatcctgtggttgataatgccacacaaatgcacgcttttttatgtaagtcctgtcaagaatgcctcggcattcttgctgcgaggtgcgcgtcatgcaattgcatgacatacttctcctgcgcacctctgcaatcctgccggaggctatatcagctgggggattgactcccagctgatatacaggctgaaatcatttaatggtcagatcaaggcaaagcttagttctttcaatattacccattccaatgtacagggtctcgccctttttcagcttaacagatgctgtcctggatggcaggaatgtgtttgctgtgattttcttagtatagctcttgctgatggaccagctgtatgcagaacagatatacattacatctgttttctttttgttcagcttaatggtcacacggtcaagaccataatagccgtttttgtacaggctgctatgtgctgcaagaatatcactggcagaacttcttcctcttttacgaagatttccaagtgtaatcttgtaagtctttgttgccggtgctttaaatttcacatagctgtatgtggagcttttcttggttgcctttggaagtgttacaactgtctttccctttttcactgcttttgctttcgtttcctttgtaacagctgtcacctttgctgcagcgcttgcttccactggaagtgccagtaccatgaccattgccagaagcagtgcaaatacttttgtaaattttctctttttcatttctgttgtctgagccaaagctctctccttgtattatttgcagttttcctgcaaatatacattatcatgctttgttcattttgtccatatttttccaaatttctgtaattatcatattatcatatttttctacttttcactaatcatggcgtttttccgaacctctgtgatcgtagcatttccggaaatttcacttcccagtccataaaccacattgcttaaggtgtactgcccctgatttacaaaaatttcaatcaaatttggctccacaaaaatatccagctgtgctttctctccaacataaggcgtactgctttttattctgtacctggaatcctctacaaaaacattctgccggtcagtacaaatgcatccctgtttcatttccagatcaaaacctccaatagaaaggctttctccctctttcatgtctgcttttatgtacagtgcgctgccttcttttagtatcttttctgctgattctgctttctgaaaatacttccatacctctggatgtacataaaagcagatcttttcattctggatccttacctctcttggaaggcacatcatcccgttccatggctgtccatccgatccattcactggctcaggcatacgcatccaggcgatcatcacccttctgccttctttatcaagattagactgtggtgcatacagatctccaccataatctacccgttcatactgatctgcaagagtaagctttcctgtttcaagatcaaaatcagcaaacccacacacagaatgattggcatactccttgccatcctcctggatccccataggcgaaccaataaacactctttttccgtcaactagaaacagatccggacattccagggtatgtccgtaacgggcattggtacactgggacagatattcccaagacagcccgtccctacttgaaaacaacaccagccgtccagcctgatgattctcagtgcttcccaggatcatataatatctgccattttcttcccataccttcggatctctggtgtccgcagaatctgcaattttcggatcacgaatcacaggtacgatctgttttttgtccttccagttatcgaaatgaaaaccatcttcagatgtaatcatactctgacttgtctcaattacaccttctgcctgatgaatattcccagactgttctttcagatagcgaactgcagaatagtataaaaacagttttccatctttttccaaggcacttccggaaaaaatgccgtttctgtcataatccttagtgggaaaaagtgccacgcccagatgtttccaggtaacaaggtcatcgctgaccgcatgtccccagtgcatggtgccccatacaggtgcatatgggaaatactggtaaaacagatgatactgccccttataatagataaatccgtttggatcattgatccagtttcccggagctttcaaatgcaaaatattctttttcatagttccactcctcctgttttatttcacagcacctgccacaacaccattaatgatctgcttctgcaatgcgatataaaggatcagcaacggaaccacacataacagaagtcctgccatgatcgtgccataatcagcagaatatgtgccataaaagctataagtggataaaggtaatgttaaaagctttttgtctgtcaaaaccagtgacggaagcaggaaatcgttccagaacgcaagggcattcaaaatcaatgtggtagacatgatcggcttcagcaatgggaacacgatcttgaaaaatgtctgagtatgtgtacatccgtcaagatatgctgcctcctccaatgcaattggcacgctgccccttataaaaccatggaacataaacactgtcatggacatggaaaaccctacatgcataaagatcagagtaagtctgtggttcagcagattcagtgttcctccgtaaatgcttaccagcgggatcatgatggcctggaacggaatgatcatggaggcaaccataagggcaaaaataattctggtcagcagattgttattccgtacaataaagtatgccagcatagcagccagtattgtaacgattgctgttgcagatacggtaatgatcagagaattcttgatggcattcaggaaatccatctgattaaatgctttcgcaaaattatcaaaggaaaggcctttcactgtaaaaagccaggaaaaaggacttttaataatatctcttttctgcttcagagaattgatcacaaccatcagaaatggaaacatataagctataaaaataaggatcatccctgccattgcaaaggttcttactgatcttttctgaactcctgatgaactgttcattatgcagctacctcctttttcttagtgatataaacctggattccactgatgcatgcaacgatcaggaacaatacaatagcttctgcctggcctgtaccaaattgtctggatgtgaaagctttttcgtatacatgcatggctgccatttcagtggaaccatacggtgcgccgccagtaagagaaaggttcacatcataaaccataaatgctcttgaaagcgtcaggaaaagacagatcgtaatggatggcatcatcagtggaagaatgatattcttcatttttttccatccggaagctccatcaatgctggctgcttccataacttctgtatccagtccggtaaatcctgccacatagatcaggatcatatatccggacagctgccatacagttacaagcaccatggccgcaaacgctgtattcggctttgacagccaggagatctcaaaaagattccagcctgtggcttctccaatgcttacaaatactcttgaaaatacaaactgccagatatatccaagaacaattccaccgatcagattgggggtaaagaaaccagccctgaaaaaattctgtcctttaaaacctctggtcaacagatatgcgatcaaaaatgccagtacatttaccagcactactacagcgatcacatacttgaaagtaagtacaagagaactccagaactgagcatcctttgccatggcagcaaagttcttcagacctacaaaattctttacagacgacactccgttccaatcagtcaatgttaaataaacaccatataaaaacggtacgatcactactgccaggaaacaaaacaaaccaggcagtgcaaatatgcagaaatctttacctttccttttcgtattcatggttttcctccttttactgctcatcccaatagttctgaattgcatccataagttcttccctgtcgcatctgtccgccagatatttctgcatagcagcgccaagcacagaccagtgatcgtttggaacaactgctgctgcattataagtccggtcagtctgtaccttttcaaaaatatcacgactcaaaggatccagcggctcatttggattgttcttaaatgccgggatcagattacaggttttgacaagcatctgctgtccgatctcagaaaatacgatccagttcagaaattcttttgcagcatcctgctgctcctttgacgcctgctgaccatccagcattacctgctttgagggtgccgcctgtatctttgtatttacaaaatcatcagggtcattattcaggaaatatggaagaaaaccatactcatcatcacttttggcgccagcctcttgcatattgggccatgcccagttaccattaaaccagaatgctgtttttccatcaaccagatcaatggccatctcatcataatctgcaccaaggggatctccctgtgccacattgtattctttcagtacatcaaacaaatccagaagctgggatacgcgttggtaatcctttaccttcagctgtccgttttccaggtcttctactgccttggcagccccctccgaagttccatcgtaagtttcatacaggtactgaagatgatgggctcctaaagaccagtcttcctttgcaagagatactggtttttccattccggcatcccgcatttcattcagaagtgctttaaaaccatctagtgtattgatctcatctgggttcaagtttcttcccaaagtttcttcaatcacttttttgttataaataatgccttttccttcaacgcacaagggcatactgaaaatatgtccctgaatctctgttgcataattcccagcttcttttacccagtcttccccgtccagtaccagtgctttttcatctgccagagccttaacatccgtagtatccagaatcgccatggtaggtgcatttcctgaattatacatgcttacaactttggtataaggagaatctccctctgttaccggcataacctcaatatgcacccctgctttttcttcaaagatcttgctcattttctccagggcgacctggatctctgccttggaattcaaaagtgtgatcttcgttccctgcagactttcatcgtatgcaaaagtatccacagatgtatcaatgggttcctcttttactgtatcattttcatcatccggatcactggcaaatccgaacctgcatcccgataaggatgtaactgcaagcactgtgcttaaaccaattgctgcagttcttttccactgcctaagcttcatcatacattcctcctgtactttcccgttctttgcttccaattcttcttggataaccggttacgtaaccggttactttatatttcatatcctacctgtatacactcaaaaagtcaatatacatctttattttcgtgaatattgaactatttttatttttcatttttgtgcgtcttgcataaccggttactttcctttatgtaaccggttacttatggttgtataattcgattttgtttgctatactacaaacataataaaatagcagttacgaaaaaaggaacaattatgggtaaaaaaaagaaggtcaccttcagtgacattgccaaatttacaaacttttccaaaacaacaatttcaagatattttaatgatccagattccattaccccagagaaccagcagatcatatcggatgcactggtaaaactgaattaccaggaaaacaaagtggcccggatccttgccaatggaaagaccgaatttatcggtatcattatccctaacttatatctgcattattattcagagatgctgaatcagatcctctgcacctatgaacagtatggatacaaatttctggtatttatcggaaatgaaaatgaaaatacagaacgtcagtatattcaggaacttatggcttaccagattgaaggactgatcgtcctcagccacaccattccttccaaagagcttgcagatctgaaaatccctattgtggcaattgaacgagaagatctgtacatttccagtgtaaatacggataattattccggtgccagacaggcagtccagcttcttgccagccatcactgccagatcatgcttcacattaatagtcccacaaaggaaaatatccccgcatacggacgtatttcgggatttcttgattattgtcgggaaaaccagcttcctcatgaaatgtttattgaggacctgggaattaacgatgaggatctccatcagaaattcacctgtattctggatcagatccaaatgaaatatccagacaagaaaaaaggcatattcatatccaacgatacctatgccagtgtttttcttaatcttctgatccgcagatatggaaagctgcctgatgatttttatctggtaggctttgataattcccctatttcccgccaagcagtgattcccatcagtactgtaggacagcaaatcaacaagattgcccaggaatccatgaagcttctggtaggacttatggactcccagaaaaagcgcaatcctgcccctttatctgagcctgtccataaaaccatcccccctcttttgattctaagggatactacagaaaaaaatattttttagtgaagaaagaccatggcgaccgttcctgcagtaagcaggaacagtccaagggcttcttttttattcagcttttctccaaatacaaagtaagaaaatgcaactgtaacaagcacacttagcttatctaccggtgctactacactggcaggtcccagctgcagtgcatggtaataacaaagccaggatgccccagtagcaagccctgaacagcagataaacattccttcttttctggatatattttttatctcttttccttttccggtaacaaataccatcacccaggccattaccagtaccaccgtagtacggatggctgtcccaagatttgactccactccattgatcccaatcttaccaagaatggatgtaaggctggcaaatacagcagatccgcaggcgtaccagaaccagccaatgccattcttttctatctcttcaccagtatcctttttctggatcatcagatatatccctgcagtgatcacaagaatggctgctgcttttcccggacgaagcccttcgtggaagaagatcagtgccagaataatggtcagcactgtacttgatttatccacagacactactttattaacatcgccgatctgaagtgccttgaaatagcacagccaagatgctccggtggcaagccctgacaaaatcaggaaaagaagagttttactgctgatcccagggatctgatcctgggatcctaccagaaataccatcccccaggcaaagatcagtaccacgatggtgcgtactgctgttgccactgtggaatccgtttttttgatcccacattttgccaaaatagatgttacacctgcaaaaaatgcagatcctgctgcatataaaagccacatacaaatcccttctctcaagtaaatttattacgtcaacaactcaaatgtatggtacagatccattcttccatacccccactctctgtttgggtatggataattttcctcacgtctggcgcctcgctgaagataatttttcacactggttcctgtaaaataaggctggtttttgcggataatggcccactcaaacataagagctgccacgcctgctgtctgggcagctgccagactggtgccggaggcttccccataggtaccgttaagaagcggcacacgtatacccactcccggagctgccagctgcggcactaccattccatttggcataaatccccggcttgcatagagataaatactgttatcccgatattgatatgctgttactgttatactttccatagaatctccaggtgaggtaaccgttgtataaggagatggctccaggaaataggtttcatcggagatcagcccttccacaggcagccaaatatgaaaattaatattatgattttccctctcacgcacaaaaatcttccagattccggaagctggacttacaaacctgaaaaataccagagtattcccagtctggcgctcaatcgctacataattcacagagatctttgtttccacaaaaacaaaagacaattcctgggtaactgtccccagaaaggaacttatttccaggttttctccagtaggcgactgtatggaaagattgtaaatttccggtggttctccccagaattccattgtaaagcctttttccccaggtcctacccgcagttctgctacagactctcctctgcgatctcccaaagtaccggcaaagtgatgtctggacgccccctcatttcctgctgctacagatacagatacctgtgcaaaaccggccaagtaatccacatactggcttaaaggactttttcccagatgtgctccctgactggtaccaagccccagacagatggaaaggggcatgcctagtgcacgggcacatttcattgcaaaagccatccccatcataatatcatcttcctgaaacacgtcctcagcctgagacatctgataaaaatctttaatatatttcttggcatgtttaagctttatcacgattaaagaagcttccggtgcagcccctgaaaaatcctcctcaggtacaagattcccagcagccactgctgccagcatggttccatgtccattagtatctacagaaggaactgcctcaagaggcttctcctgctccatggcatggtcaatatcctgtttcatataaacctttccataaggagccatcccgtctccgtctcccataagggactgatcccagatacaggcgatcctggtgcctgaaggtgatgaaaaaacaggattctgataatcgatccctgaatcgatcaccgctactgcagccccctttcctttaagccccagataaggatgattatgaagcctggtaataccagatgcccccagcgcattcagatccatataagtataacacttaggaattgaattgtaagaatcactgtttatttccaacggagaaagctgcgccagcggcacatatagtactccgtacacctcactaaccggatacaggcttgctcccggtatctcttcaagaggacttggcatattctgtacatactttacaataaaatttccatactcttcactttgtgcaggtaccactgactgctgttcctgcaaaggaatttcctgattcagttcctcctgcgaaaagaacataagcataacctcacccaactacgaatcattggttaagcttatgcctatcgcttctgttttattctatttgaaagattcagatccgcatatcaaccgttttcttacgtacagctccgtataaaaacaacaggagccctgcacaaaacgtaaaaatcgaaataaactgagaggtagataaaatacctacatttcccctttccagatctcctctgtaaaattccaggataaaacgccccacactgtaaaggatcagatacaggcctgccacctggcctttctctttcagatgctttgccgccagaatcagcacaaaataatgggcaaaatcaagaacactggcataaatctgagttggaactaagggcacatagttaggggcaaaatcagaattagtaaaagtgattgcaaaatgggaagcggtttcttttccatagcagcagccggccagaaggcatcccagccttccaaatccctgtgccaatgcaaccgaagggatcaacagatcaaagtatctaagaaaatccatcttttttatatggcagtaaatatatgctgtcagtattcctcccaggatcccgcccagcaccacaaacccatctgtcaggctgtcaagcagaaatccaggatccttaaggatcattctccattcagtgagccaataaagtatctttgcacctacgaagccgccagccacacaccagagcacaatatagaatacctggttataatccatttttttctttttagcacggtactctcctgttaaataggcagcaagtatccctatagcaatcatcagaccatagccgtatacagtaaaaggtccaatggtcagcaattcattcttcataatcaaatcctttcaagacttcaagcaactcatgattcgcatgatcgtgtccggccggactccctgctcctccgttttcaggctcccattccccgcacacatcagcagcctgtaaaggaagctttctcgctttcagaaaactttgtaattcctccagacagctttttagttctgtcagagacatatctccctgactccaggttgtttttacctcctgctcattcagtacatccttatccacagacaaatacacaggcgaaaacttccctgtttttttctcatactctgaaagcatctccaaaaaagaagccgccacaccggaactgctgttagtttgccgggcagcttgcagatcttccctgctaaaaaatgtgacacgttccttatacacctgctgcacctggtggaatgccgactgatccggtcccacaagaaacacatgatccaataattccacagattccagtgcatctgctatccatccgccgcaggacaaaagacctccaaaagcagggggctgcatatctgtatgattatcaaatacaagcagagaaaacgggttcttagccttatccatccagatcctggtcatataatgataattgccggaatcaataaaatgtatccctgaaagtgtaaactctccgatcttttccctgattgccctgattgccggttcatcacaatagcagttggtaccggaaagatcctccagccgaacccatgtggaccgttcctctctccagaaatcctgctcttcatatgcccctgacaaattcatcagaaggattccgggttctctttctttttccataaatcagttctgttcctgttcttccagatgatcgctttccgggttctcttcttttgtttccgcttcggaaatctcctgggtgtcctctactgttacatcctctggaggaatcacctctgtacttacagaagctgccctggaattccactctggaatgatctctttctcttctgctgcctcttctgctgcctcttctgcctttgtatccggttctttttcggcatgtttctcaggggtttcatctgctgcagtctgtacttcccctgacagcccctttttcaacataacaaatgatactacatccagaataccgtccaccagaaaggcccatccggcaaacatcagcattccattaatgctctggaaattatacatcatcagaaatacacccagtcccacaaatacaaggctttcaatgagaaggaatttccacgtttcctgtgttctttttttcagcttcatgctaccccgaagagtccagatgctgtccaccaataccagtgctcccagcatcagcggaagaagtttcactacgatctgaggatttgtaaaaagaaacaggccgatcacaaatacgatcacacctgaaaacagatccaggatcgtagccttgtctttttctgcggcaaaaaggaaaatatggtacagacctgctccgatcaataccagtccaaatactactttacatagcagattcactgtacctacaggcataaatacaagacagatcccaaacaggatataaaaaacagatgttacgatctgtccttttaataacttgcttaatttttcgctcatggcacatacctccttgatgtattttagtatacctcttttgccttttttcgtccataggcattcctctcctgtttgtgcaatttgtgcaggattatttatctttaaaaacgtaaatttggaagtgcaaaagccccgtttacacttgaagttttccactgtggtattataatgaaaaagtcgaattatctcgaagatcaaaatctgattatattccattatgtatgatttgattgtattccattattatgtatgatttgattatattccattatgatttaggaaggatttaccattttgaaaaaacaaataaaacattcacgaattgttttgacggttatccccgtcgccgttgttctgacagccgggatagcttttttattctcacgttctgatagtgaatcacaagtatgccagcaaaatgttgcccgtttaaaggagcttgaaaatacagacatttcctctgtggagcaggccatttcggatatccagggacagctggatgcacaggcagatgcccaggcccgagaggatattgtcaattcttccggtatattaaccaatgtacagatccgtcaggcttttgcaggaagtgtgatcgtaggtgattccattacacaggccatttcagaatacggatatctggacacagacgtagttgtcagtaaaaggggcctgtctgttgtaaatgcccaggagcagttcagtaccgccatcagtctgaatcccagccatgtttttcttgcttttggtaccaatgacctggaaatctacaatggagatcctacaggctttatcgatgcctatagggagaaagttcagatggttaaggatgctctcccagatgtgccaatttatatcaacagcatcctgcctatccaggattttgccattgccagcaatccggcccttggctactattcacagttcaaccaggctttgtcggatttctgtgatgaaatggactgtacctttattgataacaccttccttgtggaggattccagcatgtacgaaccggatggtgaacatgtgatcatggattattatcctaaatggcttacttatatggcagaaacggcaggtcttatatgaaaaataaaaaatcacttatcataaaatcaacaatggtcatacttctggcagtttatctgatcctgctttaccgggccgattatgccaaggatgtttccatggataccattgcccagtccatggaaaaatatgacgccattacccagctagggcaggaagaccgggtgcagcttaagcgctgttaccagatcaatgatacagatacagacggttatttcttttacaaagcagcctcacctatggctgtagaagaagctttcattgtaaaagcaaaagacaaatcacaggcagaaagctttcttactgctgcccaggatcacctttccagccagaaaaacattttcggaggatacggaactgatcaaatggctcttctgaacaaggctgaggtaggttccaaggggaattatgtttactatttctgcggtgaggatgcatcctcctggcgtcaggcttttctttccctgatttaatatttgttcctggccatctggatctgcagatagcctaattacattttatggagattaatcattatggtattcagcagcattttctttattttttgttttttacccccgttcctgcttctctattaccttgtacctgagaagttccggaatattctgctttttattggaagcttgatcttttatgcctggggcgatccgatatatgtggttcttatgctgttttccagcttttttaattattacatggcactggagatcgatcatcttgacaaggatcccaaaggccgtaaaaagaatcttatttttgcagtcaccataaaccttctgattcttggatttttcaaatactggggatttcttctggataccttcagcacaatcacagggatttccattgcacatccccagctggcactgcctataggaatctctttttatacctttaagaacctttcctatatcctggatgtatctaagaaaaaagtgtcaccacagcgcaatttccttacatatgcagtttacagtaccatgtttccgcacatgtctgcaggaccgatcgtaagatatgcggatattgaaggacagcttacccggcgttccatcagcctgacccggctgggacttggtgctgaatattttaccaagggtcttgccaaaaaagtactgcttgcagataacctttctgccatttatacttccattctcagttctggaagcaattccgtactgactgcatggatcggtatccttgcatacaccttgcagctttattttgacttttccggatattcggatatggccatcggacttggcaaaatgatgggctttgatttccttaagaactttgattatccttacatttccaccagcgtttcagaattctggcgaagatggcacatctctcttggaagctggttccgggattatatctatatccctcttgggggcaaccgtgtttcagttccaaagcatatccgcaacatttttgttgtatgggcactgaccggtttatggcacggtgcaagctggaattttattttctggggattatattatggactgctccttctacttgaaaaatttgtccttaaggatttcctgccaaagcttcctaaatgggccgctaatctttacaccatgatcgcagttatgatcggatgggtatttttcagtcagacagatttttcttccatggggcattacctgtcagttatgtttggtttcggtgcatctgcttttctggacaggacagctgtttactatcttaaaacaggtctgatcctttttgtgatcagcatcctggcctgccgtccaggtctgtaccagtcctttaaaaaactgatccagcgaaatgaaaaggcagcagcagccgttaatctgcttctgtttttattgtgtattgcttatatggtatataattcctatacaccattcttataccagaagttctaaaccagaatttatgaggtcataaaatgaaaatgaaaagaaaaagattcagttaccagtatttcttccacatcatggggatcctttttgcaatcctgcttctgatctttatgatattcagcctggtaaagccagatcgtagtttttctgaaaaagaaaaccgggtgctttcttccagacccggctttgacttgtcccagattgtctccggcaattatgagacccaatatgaaacctatgtaaatgaccagtttcctctccgtgatctgtgggtcactataaaggcagccacagaccgtgtacttggtaaaacagatggaaacggtgtttatcttggcaaaagcggctacctgatggaggattttacaccaccttccaaggaacagcttgaccgtactcttaatgctatgacagcctttgcttctaaccatccggatctgaagcaatatgtgctgattgctccaaatgctgtaaatatactgaaagacaagcttcctgcttctgccccggtaaaggatcagaatcaatatctggatgcagtaagggatgcagtaactgctcagggcgttacctttattgatgtacgtgatacactgaccagccataaagacgatgggatctattatcatactgatcatcactggaccacccagggtgcctattttgcattcctacaggcagccggtgccatggatcttgattcctcttccattccatatgataagcttccggtaactacccatttccaaggtaccttatctgccaaaagcggttttcgctccaatgaaacggatgagattgatgtgttccttccaagaaatgaagatacacctgcttctgtagtaaattatgtatctcagcaaaaaaaatcagccagtttttattccacggagcagctggataccagggataaatatgccatgttctttggaggcaatttcccgcagatcaagatttccactgccacagaaagtgagcgtacacttcttgtattaaaagattcctacgcaaactgctttgttccgttcttagcaccttattaccggaccatcatcatgatagatcccagatactattacggtgatcttgaagaattaatggaagtagaaaatatccaggaagttttatatctttataatgcaaatacttttttcagtgatacctcattggaacttgccttaacaccacaacagggagcttaacgctccctgttttttcagctgatcgtctggaacagcttttccatatctgttttcatcaatgtatatgtggcctttccttttcctgtatattccggtgaaatattagaatgaatataacaggtatccatgccaaccttctgtgcaccttttatgtcgcaaatctcgtcatttccgatcataatactttcttccggctttaaatcatatttctgcaggagaagcctgaaaaactccggatctggtttcataacggaataatcggaagagatcagaatccctttaaaatatttttccagttccagaaaagccagttcataagcggtgaatatcctctgtgcattggaaagaaggtacagatttcctccctgccgggttaatctgtccaaaagctttggaactcccggatacaagcggatatattcagtagaaagtgcacggaacatctgtcctgcatgaacagccagttcctctgatggctgtgcccctttttctttaaacaaatctgcaaataccagctggatctgtatttccgggcaggcctcatggccgtcatttctcatcgctttcccctgttctctgtatttttccaccaatgcaccgtaggttttccacatttcttcccaagacctgtacacagcgccataatagccgtaaaacaaccgcatcttttcccaaagttcctggttatcctcttctgtatggatatctaccaaagtgccatataaatcaaaaatataattcttatatctcatgctttatatctcagcttctttatttaactgcctcaaatgctgcatccaaagctgcgatcagatcctctacacgctcaataccgatggaaaggcggatagtattaggcttaatgccctgatcaagaagttcttcctctgtgcactggctgtgagtagtagtggcaggatgaatcacaagagattttacatctgctacatttgccagcaatgagaagattgccaggttgtcaataaatttctgggcagtcttagcatctcccttgatctcaaaggtaaagatggatccgccaccattaggaagatatttcttgtataactggtggcttggctctgtaggcagtgaaggatgatgcacagcctctacctgaggatgtttagacaaataatcaacgatctttaaagcattgcttacatgtctttccacacgaagggatagggtttccagtccctgaaggaacataaacgcatggaacggtgaaatcgtagcacctgtatcacgaaggataaccgcacgaatataggtaacaaaagctgccggacctgctgcatcagtaaaggatacaccatgatagcttggattgggctcagagatccatggatacttgccagctgctttccagtcgaaggagcctccgtcaatgatcacgccaccaatggctgtaccatggccgccgataaatttggttgctgaatggatcacaatatctgcgccgtattccagcggacgtaccagataaggcgttgcaaaagtggaatccactaccagcggaagattgtgcttatgtgcgatctttgccagttcctcaagatccaccaggttagaattcggattacccagtgtctcaacaaagatggcctttgtattttcctggattgcagcctcaaatgagccgtcttcctcaggatctacaaatgtagctgtaataccgtttgtctgcggtaatgtatgtgcaagaagattataggttccaccgtaaatagtcttggaagctacaatatgctcaccagtcttagcaagcgcctgaaaggtataattaatggctgctgcgccggaagcgactgccaatgctgccacaccgccttccagggaagcgattctctgctcaaacacatcttctgttggattggtaagtcttccataaatatttcccgcatctttaaggctgaacctgtctgctgcatgctgggaattgtggaacacataagaagtggaagcatagatcggtactgctcttgcatctgttacagggtcagcctgctcctgtccaatatgtaactgtctggtttcaaatccccaattctttgaatctttgatgtctgccattttgtatttcctccgatttatctttcttattcttttcgcagaaagctttcagccttattctctgcttcattgataacatactaacactgtaggaaacatctgtctaatacacaaaaaaaatatcctgttatagtttgtttctatatcaaatgcaatttcataatgttctttaaattatcagaaaaatcagagtgtttcgttcatacttcccatccggtatccttgcagatccatagtcacataagtaaaaccatattctttcagttttgcaacgatctgttccctgttttccagaagcttttggaattcctcaggcatgacctcaatacgggccatcttaccatggatacgtacccgcaactgatgaaaaccaagatccagaagaagttgctctgcctgatctaccattcccagtttttccttagaaatagtctctccatatacaaatctggaagaaaggcaggcaaaggactgtttttcccaggtaggtagtcccatctccctggatagggcacgaatatctgctttataaagattgcaatgtcttagcggactttttactcccaactctgccactgcctgaagcccaggacgataatccccgttatcatccatatttgacccttccgccactgcagcaaatccttcttcttttgcgatctttcctattttctgaaaaagttcctttttgcaaagatagcatctgttctttggattttgacagaagccctcaatctccagttcttcagattcaacgatcctgtggcagattccttccttttcgcaaaaggcttttgcctcatccagttctcttttgggaaatgaacaggacattgcagttacagccatgcactggtctcctaatacatcatgcactgttttaagtaaaaaggtagaatctaccccactggaaaaagctactacaacacttcccagttctttgatatagttctttaattggtgaagtttatctctctgctccccggttacgatcatttcttcactcatttttcatccctcttttgtcatagtcatcaaggaaattataggtcatgtcatctttatgatatccgatcactgtacgcagattaatattccgcacactgttaaaaatattggtatcaatcacatcactggtcttcctgaattgtgcgatcagttctttcatctcatctctctttgaacctctgccgcctccacagcttacacagttctctgtaaatctgcaggcgcactggataaaatgcaggccattgtaatctctccaggatttgatcgcgtcctcatgtaccagatacaaaggacggatcagttccatcccttcaaagtgctggctatgcagctttggcatcattgtttctaccttaccgctatacagcattcccatcaggatcgtctcaatcacatcatcaaaatgatgtcccagtgcaattttattgcatccaagttctttcgcctttgcatacagatatcctcttcgcatacgtgcacaaagataacatggattcctgtcgatccctgctactgtatcaaaaatatttgtttcaaatacagtcaacggaatccccagaagctttgcattatcctggataatattccagttgtcctcattgtatcccggattcatgatgagaaataccggctcaaaatggattttgccatgcttttgtacttcctggatcagcttggcaagaagcatagaatcctttcctcctgaaatgcagacagctaccttgtccccttcctggatcagctgatattcatttaaagctttggtaaaaggacgccatatggtctttctgtatttctttataatgcttctctcaatatccgctgttttctgcttcttttcttcctctgaatctttttgcataaaccttgataaagtcagcttcaggtaggctctgtatccaccagttacatttactgcctgatatccctgctcttccagaagatgtacatattcctggctgtgctcccctgtatggcagatcagatagtatatcttttctttatcaagttccccaagtctgtcttcaaattcttccattggaatattcacagcgccagggaatgtacctcggctgtactgatcctgtggacggatgtcaataatctctcctgactggatttccttttgctccagttcttcaattccgattgttttcacctttgcttccatctctttcttatagattctttgtaaccgctcaatgcccaaacagctgcaccaattattttctttttacaatgtgtatctccggtattgccacattctcataggtaatagattcttcatgcttttctttgtccgtatcgtcattatgatccacttcccctgtgtgtatttctggaacagccagattttcacttgtcaccttatattcagcccttttcccttttttcttccttcccagcatctctcttctccttgccattataatatattaataaacaaagttaataccaaactattaataaaatctgcaaacaaactgcctaccagcggaacaagcagatatgcttttactgatggagcatatttttcgcagagtacctgcatatttgccattgcattgggcgttgctcccataccaaatccgcacacgccagaggacagaaccgccgcatcataatcccttcccataacattaaataccacaaaataagtaaacagaaagatcaggattgtctgacctgccagtaataccagcagtggaagagccaaatctgccagctgccatagcttcaaagtaatcatggccattccaagaaacagtgaaagactgataccgccaatatcattgatctctcccatgtaaatagtaaatttgccggagtattctccaatgttacggataaatgctgccacgatcattgcaccgatataaatagggaaggtcattcctgttaaagaaagaagtcttgatactaccgttccgatccccatggcaatgatcagctggaaaacagctgccgggtacatacttgtatgccgcgcatgtttcttttcttcctcaaccaacaggctgtcatcctctgtcactactgtatccaacagatttttcttctcaatcagacgttttccaaccggtcctcccagcatacttccggcaatcagcccaaaggttgcaccagctgtacaaagagtagttgcaccacttatcccgaaatcctcaagaactgttccaaaggcgccggctgtaccatgtcctcccaccattggaattgatcctgtacacaagcccacaagtggattgatcctcagaattttagaaagacctacggccagcaaattctgtgaaaagatcaacacaatcacaagtccaagaaaaacgatcaatgcctttccaccacttttcaatactttcaaatttgcctgaaatccaactgatgtaaagaaaaataccatacacacttctttcaagatgtcatcaaactgaaattccgctacccctgtcacataacaaacacaggtaaatattgcaaacagcacaccaccaatcactggtgccggtatacaaaatctttccagcatattgatcctgcgtttcaggaccttaccaagcattaaaaccagcacagcagctgccattgtctgatacatatctaattcaattttcatcgttactcctcttgttatttctcttttccgattttacacattgatgccacaagatttataatagctggcagctccttcatggaaagggattccaattccctgaactgctgcattttcattcaatgtaatatctgcagaaagcgcatattggatttcctgtttattctcaaataaaattctggtgatccattctacagtttctgcatccagatcatcactgaccaaaagcagtgcacgcacccctaccgtctgtacctcgtcttcctgtccgttatatgttccggcaggtatagtatatctggaataagcaggatttacagttatcattttgtcaatatttttttcgtccaggcttagcaaccggacatcacactgttttgacaactcactgattacagttgtctcggctccggctgtacagaaaaatccatcaatctttccatcccgaagctgctgtgctgcatctgtataatcaagatgtaccttttctcctaaattgtcccaaataccgtatattgaaagaatctgttttgcactctcttctgttccggattcttcttcacctacactgacttttttcccaagaagatcatcaattgtctgaatatctgactcatcacgtacaataatctggcatgcttccatataaagtcctgccacagcactatacccctgatatttcttaccacctgtccataagccagttccctggtatgcagccctggtcatatcttcctgggcaattgccatctggatatacccttcagataacagacgcaggttagcagcagaaccggcagttgtctttacttcaatttgcttctcctcctgatccgctgtgagaagatcaccaaaggtatctgcaaacgcatggtacataccgccgatgccagctgcaccaaatcgaatatgacctatcgaacctatacatccggttaaaagcagaaccattgctaaaaatagtattcccttttttttcatccttcttcctcctgcatactcttgattaacaaagtgggcaatcccactttaagctccatgagtttctcaatccatcccgctattacataaaaaaaagtccctgataatcaaggacttaatcaaaaaggcgcagaccggatttgaaccggtgaatcgaggtgttgcagacctatgccttaccacttggctactgcgccatgtcaactccccctgttggactcgaaccaacgacactgcggttaacagccgcatgctctaccgactgagctaag

SEQ ID NO: 99 - DNA, 334 bp, Unknown
  gut microbiota DNA sequence
caactggctaatccaacgcgggtccatcttataccacctcagtttttcacaccgggccatgcggccctgtgcgcttatgcggtattagcagccatttctgactgttatccccctgtataaggcaggttacccacgcgttactcacccgtccgccactaggattaaaccaaatctgccgaagcttcaatgaaataatccccgttcgacttgcatgtgttaagcacgccgccagcgttcatcctgagccaggatcaaactctctgataaagtttgatgtctcaagacaaccaactagcttagttatctctcgtcattactgttttaaagttcattc

SEQ ID NO: 100 - DNA, 1587 bp, Unknown
  gut microbiota DNA sequence
tccaaatcagatttgcttgctatatttaaggagttgggatatgaaatcgaattgtgatattttaggaaaccatattcgactgattgatactcggaacagagaatattcaattgccgaatacaaaaattaagatacttcaaagacttctttttcaggcaatcgatgaatttaagaaagttaataagattagaggtgtggaatttgaggacagactaaaaaaggttgtcgatgagtataataatcggcgtcgtggtgaagtgtatgccaatgaagttcttgagcaggcagagaattttaaaaagtatgctgaatgaataagttgtgatgccgcatagaaaggagcatgaaaaaatgacacaggaatcacagacaccgcataagaggcgggttcgatataaaggaaaatacccaaggaaatttgaggagaaatataaggagctgcagccggaaaaatatcaggatacggttcagcatgtgatccagaaaggaaatacaccggcagggatgcatatttctattatggtaaatgagattctggactttttgcagattcagcccgggcagactggctttgatgctacattgggatatggaggtcataccaaggctatgcttaagtgtctgaatggacaaggccatatttatgctacagatgtagatcatgaagaggctgcaaaaacaaaaaagagactggaagagcagggatttggagaagatctgcttacgatacgtttgcagaatttctgtacgattgatcagattgcaaaggaagcaggcggttttgattttattctggctgacctgggtgtgtcttccatgcagatcgataatccgaaaagaggtttttcttttaaaacagatggtccgctggatctgcgcctgaaccaggaagcggggatcagtgcagcacagcgactggatacaattacaaaagaagaactggctggtatgcttgaagaaaatgcagatgaaccatattgtgaggaaatcgcaaaggctattacggatgaggtgagaaagggaaatcatatagataccacttttaagcttcgacaggtaatcgagaaaaccttgtcttttattcctgagaaggacagaaaggaaacagtgaagaaaacctgtcagaggacgtttcaggctttaaggatcgatgttaataatgaatttgaagttttatatgagtttatggaaaagcttcccggtgcgttaaagccaggcggaagggctgcgatccttacattccattctggagaggataagctggtgaagagggctttgaaggagggatacaaggctgggatttatgaggattattccagggacgtggtgcgtccatctgcaaaagagtgtgccgggaatccaagagcacattctactaaaatgcgctgggcggtgaagcggtagttttggctttgccaagaaaaaatcagcctgagaagatatcagcctgagaagatataagtctgagaagatataagcctaagaagaaataagtcaggaaagtaattggccttgtatggaagaaatgattgttgattttcctggattatagggtataatcccatctttgacagttgtaaggtaaca

SEQ ID NO: 101 - DNA, 5217 bp, Unknown
  gut microbiota DNA sequence
ttcagcaagcgataatttcagttctcaaagagataatcaaaagaacgatcaaaacgtatacaaaacctcagaaaccttgtgtttctggggtttttctttacccatgcatcccagtgagatgctcagaaacgtggtggaactttgtggatatgtagcgcgtatgcatcacgtatgcagcaaaaatcacagcaactatgtggtcggatttttgatgaaacagagaggtataagaaaagcagatacgagtaagatttttatactcctgatatctgcttttttctgtttatataccttcctctccattttctctatcctccacaattttgtttacggcatcgatcaagatccgaacatcaaaatgcgtgtagacacgttctgtaagagtcattgctccggaatgtccgacaatcttccagatggacattttctttcttaagatccagaaattcgctgatacggcagccgttgtagagaaacatcagaacaatctgataatagggatcctcctgcatggtccatacacgttcaacttcttctttgctgaatttgttgcggtcaagtttgtttggattacgatccttatattttgcaacatcgacatacgtagaataatctttgttgcagatatcatatttcaaagcatatccgatgataatataattctgtttctttgtccctttttccggatcaagtgtatatccgtctgtttttcttacaacccagggatttcgtcttttccctgacatcttggttacacttccataaccatttggtaatttcataaataatagcctccttcttatcgcatacagcgattcttgggagcctaaaatccaaactgttcatctaataaagtgtttcttcttttgattcgatcattttctgtcaattcctcgacttccttttccgaaagcgttgtgttggcataataggcgagcgttttatctttccaattctgatacgcctgtgctgttagtgcataggaagcatattcttctcgtttctcattaaattcttccagaaacagacacatatcggcattttcagaagcggtggtatctttgccattgaatgtaacggaacattcccagccatcgtgatttggcgggcgtttcacatcaatggaaaagcctaattctttcaactgatctaaatagaagagaaactgcatcacatatgatactgctgtcagagtgccaataacttggccacgaaagtcatcttggacaaatatttggattgttgtaattgtcttgatgttgatagctacgcttgtacaaccagcgataaacttaagtatgcaaaaagccataactgtgaggatattcctttactggaattaaggcgttataaccgcaagacaaaatggttcttgtgataatcgaggagaccatcctttttcatctttccaagctccagcgacagtccgctacgctcaacgccaagataatccgcaagctgctgtcttgaaaaaggaatgtcaaattcgtattttccgagtcgctgtgcttctgcggaaatgtaggacatgatctttgcccgcgtggtacgctgtcccatatgcgtgagtttttcgttaaaccgcagatttttctcggcaagttcactgagaagatttcggattactcggctgtgatgtgagcatgcagacgggcacacatttaggatgcgctttacattcaaaaacattacggtgacaggcgtttccgctatgacgcttacattcagtctggaacctggagcgcaggcatagacggcagcaaaggtctgtcccggtccggcttttgaaaggatattccagtttccccaaatatcctcctgtataatcagtacacttcccgacagcacaataccgatcgaatctaccgtatcaccggcgcgcagcacaaaggctttctttggaaaatcctcttttcttgtgccaagacaggacaacatggatgtaagctcattctcggaaatgccggagaaaagctgagatgaccgaagaatggataaaaaatctttcataaaaaccctctctcgttgaaaattcaactgacttgttgattgtattatagtataatatgcttaaaaaagcaaggaggcacggttatgaaaagaagaattattgagatcgatcaagataaatgcaacggctgcggtgcctgtgctgccgcttgccacgagggcgctatcaccatggtggacggcaaggcaaagctgatgcgggacgattactgtgacggtttgggtgactgtctgcccacttgtcccaccggggcgatctcctttgtggaacgtgaagctgctgcatatgatgaacaggcggtactcgccaataaacagaaaaagatgcagcaggaggggatgcaccttcacggtggctgccccggaacacggatgaaaaccatgcagcacacagagccgtccggcgctacggctactcccgcccaggtgcaaagccgtctttcccagtggccgatacaaatcaagctggttcccgtgaatgcgccttattttggcggtgcaaagctgcttattgctgccgactgcacagcttacgcctatgccgctttccacgagcggttcattaagggacatatcactttggtgggctgcccgaagctcgacagcgtggactattccgaaaaactcaccgagatcattcgcaataacgacatcaagagcgtaaccatcgtgcgcatggaggttccctgctgcggtggactggagtatgcagcgaaaaccgctttgcagaacagtggaaaattcattccgtggcaggttatgaccatttccacggacggaaatatacttgattaaagaaagagaggctttcaagatggataacaagatgttttgctttcagtgtgaacagacagtgggctgcaccggctgcaccgggaaggccggtatctgcggcaagaccgccgatgtggcgaaacttcaggacgagctgacgagcgcactcatcgggctggccagagccacagacggcgataccccggtcaacgccgacacatggcggctgatgatcacggggctgttcaccaccgtcaccaatgtgaacttcaacgaaaagacaatccgcgagctgatcgaccgtgtacacgcggaaaaggaacggctggtaccaaactgctccagctgcggctctcgttgtgggcggaatgatgattacgatatgaatttgctctggaacgcgcaggaagatgtgcgcagtctcaagtcactcattcttttcggggtgcggggcatggcagcctacgcccatcacgccatggtgctgggctatgccgatgaagccgtgaatcgcttcttcgctaaggcgctctttgccattggcgaggattgggacatggacgagctgctgcctatcgtgatggaggttggtgagaaaaatctcaagtgcatggcacttctggacaaagccaacaccgaaagctatggaacgcccacgcctgttaccgtacccctgacagtggaaaaaggaccgttcatcgtcatctccggacatgacctccacgatctcaagcttcttctggagcagaccgagggcaaggacgtcaacatctacactcacggcgaaatgcttcccgctcacggttatcctgagctgaaaaagtattcccacctcaagggcaatttcggcacagcatggcagaaccaacagaaggaatttgcggagcttcccgcgccggtgctgttcaccaccaactgtctgatgccgccaaaagcaagctatgctgaccgtgtgttcaccacggcggtggtatcttaccccgaaatgatgcacatcggagaggacagggactttaccccggtgattgagaaggctttggaactgggcggttactccgaggacaagcctttcaccggcattaacggcggcaacgcggtcctgactggttttgcccgcagcacagtgcttggcgtggcagatcgggtcatcgaggctgtcaagtccggcgcaatccggcatttcttcttggttgccggttgcgacggtgcacgccccggccgcaactactatacagagtttgtcaagcagacgcctgccgataccgtagtgctgacccttgcctgcggcaaataccgtttcaacgaccttgacctcggcaccatcggtggtctgccccgtctgatggatgtcggacagtgcaacgacgcttacagcgctattcagattgccattgcccttgccaatgctttcggttgcggtgtaaacgatctgccgctgtctatggtgctctcttggtacgagcaaaaagctgtgtgcatcctgctgacgctgctgtacttggggatcaagaatatccgccttggccccacgctgccggcgttcgtttcgcccaatgtgctgaactatctcgtagagaacttcggaattgcccccatcactacgccggaagaggatctgaagcatctcctcaaataacatcgctgttcagggcatatacgggtaagtattacttgctcctcgtctccgtcttttgcccagtagccaagcggttaacggtttatattgacccttttcttaataactgcgctggtgacacagcaagaccgttacaatcggccttgcggcgcggaacggcggccttgaaatactacatttcaagccgccgttttccttgtgtgacagtaaaaataccccccctgctatgcagggggagggaagctctttagatataagtaatctcctgtgttaaaataaatgtaggtctgcaaaccacaaatattaaatcacaggaggttcataaaatgaacgtaaatagtttagctcatactaaatgggaatgcaagtaccatattgtttttgcaccaatattcgaaaagtgtacaaaaacggtgttacagattctgtcatggataactaccgcaggtatctggaaaaatagttaagaagttagcaggtaaacatatagattacgagattatcctgtgatatactttaagaacgaatatgtgaatagaaagcatagcattagatggttttggctgtgcatggagattttatttttcatacacaaccaagagtttgataaggagcaagaaaatgagtgatttaaaaggaatagagtataaacgatttgaagatatcaagcatatccgggaagatggaagcgagtattggagtgcaagagaattgggaccggcacttgattatgcaaaatgggagaattttgcaaaagtaattaaaagagcaatgatcgcatgtgaaaacagcgggca

SEQ ID NO: 102 - DNA, 339 bp, Unknown
  gut microbiota DNA sequence
tttcagcacgtgctttctctgcttttaaaattttaacttcagcacgcagcttttctaattcactcatctcatctggatgttttcgtttgccacggttatctcttaaagcttccactccaccagcttcatatttgactatataattacgagcctgttgataggacacctggtattgttctgctgtttgggcataattacgatcatgtgcgatacaatactgtactatttcaacccgttcttcaaaagtagtttttcttcctttggtcatgataatgcttcctcctgttccagaagattttaattcttcatgcccattatacttctttatccagatttgta

SEQ ID NO: 103 - DNA, 367 bp, Unknown
  gut microbiota DNA sequence
gagcatattttatgtctaaaagaaaagtatctgttgaggataagatatatgctgtaaatctatatctggagggaaaagaaagccaacggcgaattgcagatatgtttgatgtaagtctcgcatctgtccaacagtggattcgaaactatgaatctatgggagcaaatgcattcacattgaaaaggaataaaaaatattccaaagaattgaaacaacaagcagtcttagattatttagcaggctatggttctcaagatgatatctgcaaaaaatacggaatccgttcaaaagataagttacaaatctggataaagaagtataatggtcatgaagaattaaaatcttctggaacaggaggaagcattat

SEQ ID NO: 104 - DNA, 579 bp, Unknown
  gut microbiota DNA sequence
gaatgccttgaaaatactgaaaaaaatcaaaaatcaaacagatttctgaaaccatcttgacggattggcgaaaacagggtaaagtaacaatcaagaaatgggtttttacttagtaaaatcttcggattggaaaggcgtgctcgtttctttttttattgccataatatcatataagtacatcttctcatctgctgcatgtcttacaagtaaggatgcatggaatacattatatctctcgatttctccattttcatcaaaaacaggtagtgcaaatttggatatatagcgataccatccgaattttgcatctctgttgtggcgctccttgcggtttgcttcaaattccttatctgtggcaaatcgaaatccgtatatttttgtgattgggtttgtattttttgacctctccgtatataataaaaatgtgattaagaaacacaaaacttctaataaaagtgtgaaggagtgtgtctatggaacgattaattttgaataactgcgcgtcatttgtaaaagttaattccactttgtaagggtaacttccaccttgtaggactaaattccaccccttaaggtaac

SEQ ID NO: 105 - DNA, 15902 bp, Unknown
  gut microbiota DNA sequence
aaattcaagaatgcctcggcattcttgctgcgaggctatatcagctgggggattaactcccagctgatattcttcagataacactgcaaattatttttcaaatattttttactcttttccccaaaatgttgagaataaaatggacaaatccacttcaagctccatgcatttctgattctttgaaaaactcagggcatttgaagtactggatgcatttaatagatcttttcatctctttcaggtaatttccctactgctgattatcttatttataatcttgtttgacaatccgtttttttatctaactatttaatttacccgataacttctatgattacttctctgctgccttttcagcttcctgaagatttgccatcagcaattcataaaaatcatcttcaccttcaagcttgggagaattctccccaccgccatttgtactgcggcgcatctctgcataaaaatcttctcctgctgaaataagatccatctcatagagctcataaccaaggcttctgcacaagcagcaaaatacagtcaatggatccttctcactgcgtgtagcaagaagatgttttctcagttctctgtcacgtagtgcatctttctgcagtcgatccaatatatccaatgttgtcatacttactcctccctcacacgcatttttgatcaccttgctttttataactctgtcaattcttcctgttcaacctgacggatgccttctttttgcagtacttcaattgcttttgcaacatcttctacacgaaggatcatgcaggcagttccctttttcggggtggtaaatgcatacatgtattcaatattcactccagaatcgcctaaagtcttaatcacatgggaaagtccgcctggttcatctggaatcacagctgcaactaccttggtcatggaaaatacatatcctgcatcttttaaaatcgtagatgcattgtatacatcatctacaataacacgggcaattccgaaatctgccgcctctgctagagacaacgcacgcatatcaatcttattatcagataaaacatctgtaaactcagccagcttccccggcttattttcaagaaaaacggaaatctgctttactgtcataaatcttctgctcctttcactttttaataagcgtcaagcggatatttcaggtccgcttcactacttgcccataaccgaataactgctcaaaaattccacagcttactgctgatacagattacgtttatcaatcacacgcactgcttttccttcgcttctagtaatggttttaggatttaccagcttcactttcgtataaatacccagcatagccttcaacgcatctaccagttctttttcctttgcagctacagcactcagactgtcagagaacatttccgcagtcatctctacctgtatttcaattgtatcgctatgatttaccctgtcaacaatgatctgatagtttgctgggtatcctttgttcataagtacagtctctatctgggacgggaatacattcacgccctttacgatcagcatatcatcacttctgcctaatggttttgtcattttaacatgagttcttccacaggaacacttttctctgctaaggatacaaatatcccttgtacggtatctcatcaaagggaaggcttcttttgaaatacaagtaaagacaagttcccctttctctccgtcaggaagaacctctcctgttttgggattgatgatctcaggaataaaatgatcctcatttacatgcatcccggattgtgctgaacattcaaatgctactccaggtcctgaaatctcagttagtccatatatatcgtaggctttgattccaagcttgtcctcaatatccctgcgcatctcctcggtccaagcttctgctccaaaaatacctgccttcagcttgatctgatcccgtacgccccgctcgcaaatacactctgccaaataagcagcataagaaggagtgcaacacagaatcgtggatcccaggtctgtcataaactggatctgacggtctgtgttcccggaggacataggtaatgtaaggcaacctactttatgtgaacctccattaagaccagcaccgcctgtaaacagtccatagccatagcttacatgacaaacatcttcctttgtaccgccaactgcaacaatagctcttgcacaacagtcttcccaaagatcaatatcatgctgtgtataaaaagcaactacacgtctgccggtggttccgctggttgactggattctgacacagtctgatagtggtctggccagtaaaccataaggataaacttcccttagatcgtcctttgtaacaaaaggaagcttatgaagatcatctactgattggatatctcctggctctactccctgttcttccattttctttctatacataggaacgtgctcccacacattctgtacctgcttcacaagccgtttgctttgtaattcccgaatctgatccagggaagcgcactcaatctccggttgataatatctttccattatctgacatgttcctttcttttgtttttctgataatatctgtatttagctttcttttctatttagctttcttttattttatcttttagcatcatcaaattcatagtaatactatatcacatcacagtttcaacgtaaacaaaaaagtccggaaacattccagactttttatcctaggattttttcgttttaattaaatttttaaagatatttcttcagtcgttctatatttttttcttcaaaatccttcaggtcctccattaatttccgaatttccttatctgcatcattctcatactgatgcagtttctgcaaagcttcagtaatgcccatactgcttccctgtatcatcatttttgcaatatgagaaaccgactgatctgttaaggtctgcatgttgatcatcaaatacgttctcattttttcaaaggaatttaaccctttttcatcaaatccattctcatgaagcttttctcttgccttttcatgaaatctcatataatctttctgttgctcctttaatacctcccgaaatgattcatcttctgtcagatccagaatcctgtctatggattctacgcccatctgcgaattctggtatacataattcagtaattctgcgttttcattcattgttctttctcctctcttttgtgatattatccccatattcagagactttatgcatttcacatatcatagttctttcacacatcaaaagcatgatccccggaataagtcttttcccaaaaccatgcttctgaatcttacctctttattcgtacttgacgatttcttttctcagccttttcataatacgtttttccagcctggaaatataggactgggaaattcccaaaagatctgccacttctttctgtgttttctcccgtccatccgtctttccaattccaaaacgtaatttgataatcgtctgctcccttggggaaagttttgcaatagctttccccagtaatgtaatctccacctcatcctccagacgtctggatatcacatcttcatctgttcccaaaatatctgacagcagcagctcatttccgtcccagtctacgttcaaaggctcatcaatggaaacctccattctgattttactattcctgcgaaggtacatcagaatttcattttctatacacctggatgcatatgttgcaagcttgatctttttcacaggattaaaggtattgattgccttgatcagccctatggttcctatagagatcagatcctctacccctactcctgtattatcaaatttctttgcaatataaacaaccagcctaagattatgctcaataagaagcgccttggcttctttttcccgttctgttcccaaacactccaacacatcactttcctgctccggcgtaaggggtggcggcaatatatcattgcctccaatataataaatttccctgggtcttgtgaatacgaacctggaaaaaagctgaaacggataataacttacatctgctgctctgttcatagatattcccctcctgttacaacaatttagcattcaaaagcacctggcactcttttcccaaagcagagggttcctctggtaataccaacaccgggctttcaatatgaaccacttctttgggagtgtgaatgatcagatcttccagtgtcactgccagaagcatcctttctcctcctacactcctgcagatcagaaaatgaggatgcagccctgcaagttccgtactttcaatctcccctgggttctcttttaaatgtgttactttttctgccagcgatccaggcagtaaacctgccagaaattccggtgttacaacagaaaccggttttccactgattggatctgtcagcagattccctgtgtcatataatccataagatgactgtacttttccctgataagacagggcaaccggataaagattcctctttttcacatccacaacctgtgaaatataagccaggaacataaagcaaaaataagtgaccgccgaaaaaagaagaaaaatcaaaaatcctttctttcttccccgcataagcatatcccacaatcctcctgcaagaaacgcagcaagatacagcgacaaaattgcttttgccagaattcctttctgctttaatccatacgccaaaaaggtcatgcaacaggcacatccaccgtgaagcaaaatacttacagtcagaatcccatccatatgtacataaagaatcaggcaggaaaacagggcaccaatcattgccccggcaaaggttctcttctggcttttgcagcaggacagatatgtgccgactgcctgcagaagaatatagtccattaagagatttgttacaaagactacatctatgtatatcttcatacataaaaaccccctatgacctgtcaatccttcactttggtgagcgaattcattataaggtgatagggggtgcggattttgtcaaaacaaccaccaggatctttagaatttctcgtaacatttcgatatgtttcgactttttatccttctactttatctttctactttattcttcatttttcctgtcggttctgatcacttggtttcttgccgcctgttttcctgatgaagcgcctccatcattacacgaagctcctggatagggaactgccccggcgctgatgaagctcctactgtagcaaaagtaaggcaggaaccaaaattttctcctgcaatcctgctaatggatcctatacttcccatagacatggaaatcaatggtttgctggtacatgtgcacatttcctttgttgcctgcataattgcagcaacatcctcaaagttctttggcatcacagcaatttttaagatgtcggcaccggtttcatccattcttttaaatctttgaaccaacacttctttttcttccgttttttcaaaatcatgactggatgcaattaccctgcagtcttctttttggagctgtaagatcagggacttcttctcctcctcttctccaaatacttctacatccacaaaatcagctttttttgttctggctgcggccagattgatccttatatactcctctgtggataattctgcgtttccgccttctctttttgtgcgaatagtaaatatcaacggaataccatccaaaatccggatcaattcttccaatgtgtcccttaaatcatcctcattacaaagattgcagtaaaaatctgctctccactccaccagctctgctcctgccgtctttgcattcacagcttgtgtacatatttcctctgatttactttctgtgagaggaacacatatcttgggcattccctctcccagtataatgttttttacctgaatgggttttgtcatttcttgacatctccttttcactgaaataaaataaaagcaacacgatgatcacactgatctgtaaatggaggtatattatgattccaatcactggccatacaaaacttactgctcttcttggaagcccggttgcacacagtatttcaccatccatgcataatgaagcctttcgtctgttagggcttgattacgtatatctttgctttgatgtaggagaagagggtcttcctgctgctgtacagggactgaaaacctgtggtatccgcggttttaatctgacaatgccaaacaaaaacaaagcagtagagcttatggacgaactatctcctgctgcttctttgatcggtgccattaatacagttgtaaatgataatggcagactgatcggttataatacagatggtatgggatatatgcgtgcagtacaggacgccggctatgaccttatcgggaagacgcttaccataatgggtgctggtggagctgccactgctatttgtgcacaggcagcactggacggagtaaaggatatacacattttcgccaggaaaaccagccgtttctgggatcgcacccgcaggcttgtagataacatcaaccataatctgccctgcaatgcttatcttcacgaaaaccaggatcagaaggctcttaaaaatgccatttcaaaaagctacctgcttttaaatgccacatcccttggtatggctccaaatacagagaatgctatcatcacagatacctccatataccataaagatctgatcgtttctgatgtgatctataatcccagagaaacccgttttctgcaggaagcaaagcttgctggctgtcatacttttaacggcatgtatatgcttctgtatcagggtgcagaagccttccatctgtggactggccaggatatgccagttgaacagatcaaagcggctttcttctcaaaataaagcttataaacctccattttacaaaaggactgtatcgcaggtttttcccggattgcagtcctttcataatttcttttactgttttatttcttttactgttttattccttttgctggtttatttcttttgctggtttatttcttttcttcctgcacttcaaccttacggtttgctcgtgttctgatctcctctttaatatcagagacaaatacgctcaggtctttagctccttcatcaccaaggaaacggcttcttacagaaaccttgccttcttcctcttcctttgctcctacaacaagcatgtacggaatcttctgaagtctcgcctcacggatcttgtaaccgatcttctctgcacgggtatcgatttctgcacggataccattttccttcaggtcatcaagtacttttcctgcataatccatatatttgtcagaaataggaagtacctttacctgtactggtgaaagccatgtagggaatgcaccagcaaaatgctcaatcaggataccgatgaaacgctcaatagaaccaaatacaacacgatggatcatgatcggacgatgcttctctccatcagctccgatatattcgcagttaaatctcattggcagctggaagtcaagctggatcgtaccacactgccatgttcttccaatagaatcttccagatggaaatcaatcttaggaccatagaatgctccgtctccttcatttacagaataggacagacccaaatcatccaaagcaccctgaagtgctgtagtcgccatatcccaatcttcgtcacttcccatggaatcctcaggccgtgtggaaagttctacatgatatttaaatccaaacagctggtatacttcatcgatcagctttgcaacgcctttgatctcgtcacggatctgctcaggcatcataaagatatgggcatcatcctgtgtaaagcaacgtacacgcatcaggccatgaagctgaccggatttctcatgacgatggacaagaccaagctcacccatacgcagtggcagatcccggtaagaacgtggttctgactgatatacaaggatgccgccaggacagttcattggtttgatggcgtaatcctgctcatcgatcactgttgtatacatattctctttataatgatcccagtgtccggatgtttcccacagatgacggttcaagataataggtgtggaaatctccacatatccagccttctgatggatctctctccagtaatccagaagtgtattcttcagaaccataccctttggaaggaagaatgggaagccaggtccttcatcactcatcataaacagaccaagctctttaccaagctttctgtggtcacgtttctttgcttcttccatacggttcaggtattcttccagctctgctttcttggtataagcagtaccatagatcctggtaagcatcttattcttctcgctgcctctccagtatgcaccagcaagactggtaagcttaaatgctttgacaggttttgtgctcatcagatggggacctgcgcacaaatctacaaactcaccctgctgataaaagctgatctcggcaccttctggcagatcctggatcaattctaccttgtaaggctcatttttttcctcaaaataagcaattgcttcttctcttggctttgtaaagcgtgtaataggcagtgcttcttttaccacctttttcatctcagcttcgatctttgcaagatcatttgtctggatcggtgtctcactgtcaatatcataataaaatccctctgcaatagaaggtccgattgccagcttcacatccggatacagtcttttcagtgcctgagccaggatatgggatgctgtatgacgaaatgcagcttttccgccttcatcctcaaatgtaagaatgctgagctcacagtctttatcaataactgttctaagatcgacaacctctccgtccagttctcctgcacaggcaactctggcaagtccttcactgatgtcggaagcaatctcaataacagactttggttcggaatattcttttttggatccatcttttaatgtgacaaccatgttctttctccttttcacttattaatgtgagggttcccaacggatgcgtctctttttttatgaaattatacaaaaaaatcccttacaatgcatatgcactgtaagggacgaataaacattcgcggttccaccctgcttgccagatcatactatctgctgatactatcgtataaaatggccacttatttgatgataacggaatcaccggactgtattaaagtcactcggaggtggtcttcaactactttacgataagacaatcacacctatatgtctctctctgaatcgttctgcagcctactcttctcttcatcgtttttccttattacgcactcattatatatgcggaaattctgtttgtcaatgggctgactcagatattcccggatattttttcttttattagggctgctgtctcacgtatcacataatgtacctgcatgatcagatccgactttgctccgataccgcataaatcctgatatcctaactttcttgcaagacacagtgcacgataaatatgaaaatcattggacaagatcccgcaattcccatgactgcatccagtcaactgatcagaaaaaaacagattctccctggtacttacagaccgttcctcgaggatcatctgcccttttcctatcccatgtactagcagatactctgccatacactttgcttctgtgatatcttcaccaggtccctgcccgccggacaagatcaggacagtatccggattctccctggcataagccctggccgcctccagacgcatcttcaatgcctttgatggcttctgccctctcacctgcgccccaagaacaactacatactcaagtcccggttttccttttgcctgcatcccgtggatcacacagatcaacagaaatgtaaataagcaaatgcctgctgccagcagcgcataacctgccatactgatccagtcaggaagctgcagttcatatcgttccatgtgtcgtctgaccagacaccatccccacaaaagaacagttcctgcaggccagatccaggcaaaatctgccgtaatacctgcatggataataattactatataataggtcaggcaaagaatacctgccgaaaaaatgaatacgttcatcaaaaaaccgttttatttatttctgccacagcaatatttatatttcttgccgcttccgcaaggacatggatcattacggcccactttatgtggcttgatcacagttcctgacttcttctgctccaaataaagttcttttctcttctcaggagtaaagatcttatcccactgaggcagttcatacagccagtctgcttttgcatctaccatattcttatacagaagttctttgtcaaagcacagacttacagttgtattctcatccatagtctcaataggattcttcaccttcaggctgtcattaataccatccaggaaacctaccatggtaagtacttcctgtccatatttctcagcaagctcttttactgtgccggtaacaacctcatccggattctctaaaagctgctcataaatacctttttcaatgttaaaataatttgcccagaatctctggagtttattgcggtctgcctgctgatcataggcaatcccacgccactgctctaaaatggtcttgtcgctcatttcttggttcctcttttcaaataagattcatttttcatttccttaggtcctgcatctgcagaccggatttcatctattataacatcttttaaatcattacgcaattcttttagcagattacgcgtttttttccatgtataaaatcaattctatatgcctatactatgattgttcattgaaccccttcaatgacgtcattacaaatgataaagcaaaagtaactgttcagcaggcaggcttctgccggtaccaaacagttactgtaacttatatcctcccctggaaaatgcggaatgcggtacaaataaggactgctttccgcatttattttatgcccagcttctccagctcggccactgcctgcttaaaatcatgaaactggatggcatggatgccaagctgtctggctgcctcacaattctcagccctgtcatccagaaatacactttcttctgctttcagtccgtatctgcccagcagggtttcataaatatccttttccggtttcagctgctgcacttcgcaggaaaaaatgatcccatccatatttttcaggaaagtaagatccttttttgtttgttttaatgcataatcacagtaattggaaagcacatacagacgataccctttgcttctcaggtactttgtccaggtatctgcatagtcccgcaccttaatagttttaccagaaccttccagaaccttccttacatcctgtgcatattccggtaatgctctttcaaaagcctttacgtaagtttcctcatcataaaggccgcgatctctctcattccactgctggctgagaaataccttttcaccgatcagcttattctcttcctctggaaagccaaaagacttaagatacccctgccagtcaaaatcaaccagaaccagtcctacatcaaaaatcacatttttcattttaccctctgcactcccttttcttttatccagcagcctgtacatcatccaaaacagatatccaagaataggcacaagaatggctactccccaggaagccctgaacagattgctgtctgtcattgcaaaaaacattggcatacaggctgccagcagaagaaccactattcctaaaatcgcagctgccttttttaaatttttcataatacttccgccttcctgacagataaaaagaggggccagcaagctgttctccactggccggtccctcaaaacttttacctgtttctataaataatatcatttcttcccggtccgttagaaatcattgtgatcgggcactcgatctgcttctcaataaactcaatataatttctgcagttttccggaagatcttcgtatttcttgattccgcggatatcacatttccatcccggaagcttttccagtacgggttttgctttttccagcttgcaggtagttgggaaatcagttgttacctgaccgtcaatctcatatcctacacaaaccggaatctcatccagatatccaagaacatcaagaactgtaaaagccacatctgtagctccctggatacggcagccatacttggatgcaacacagtcataccatcccatacgtcttgggcgtccggtagtagcaccaaactcaccgccgtcaccaccgcgttttctcagttcatcagcctcatcaccaaagatctcagatacaaatgcaccagcacctacagcactggaatatgctttacttacagcaatgatcttcttgatctcatatggaggaactcccgcaccgattgcgccatagcctgccagtgtagaagaagatgtaaccattggatagatgccatgatcaggatctttcatagaaccaagctgtccttcaagaaggatctcttttccttctttcagtgcattccacaaaaagagagatacatttcctacatatggagcaaccatttctttgtattccatcagcttatccataatttcatccggattcagaagcggcttgtggtaaagatgctctaacataacattcttaacctggcaaacgctttcaaccttctctctcagtttctcattgtcaaacagttcatttacctgaaaaccgatctttgcatatttgtcagaatagaaaggtgcaatacctgatttggtagatccaaaggatctgcctcccagtctttcctcctcatactgatcaaacagaggatgataaggcataacgatctgtgctctgtcagagatcaggatcttaggtgccggtacgcctctactgacaatctcattatattctttaaaaaatacaggaatatccagtgccacaccatttccgatcacacttgtagtacgaccggaaaatacaccagatggaagtgtatgcagtgcaaatttgccatagtcattgacgatggtatgtcctgcattagctcctccctggaatcttacaacaacatccgcttcctgagccagcatatcggtaatctttccttttccctcatcgccccagttagcgcctactactgctttgatcataacacaattcctcctcgtgtctttttatgtttaccgtaaatccggaaacatcctatactatttttttattcaagaatgcctcggcattcttgctgcgaggtgcgcgtcatgcaattgcatgacatacttctcctgcgcacctctgcaatcctgccggaggctatatcagctgggggattgactcccaccactgataccagcttgttgctcaccacctataaaggtgggagtcatctcccagctgatatttctaaaacggcattaccagcttccgccgcctccgccgccaaaaccgccgccggaaaaaccgccgctgcttccaccggaagatcctccactgcttccgcctcctgatgaacttcccggatccaccttggtaagggtacttgttacatgctgcatgctctttgacatctgcctgctgaacatataataattccatgttaagtaatccggggaactgcttacataccactcaggtgcaggaatagctaaggtttccagtctctttgcaaatacatcagaaagaccgaacacataggtatatggcagtacgctataaaaccattccggattatcttctgccattgccttcagacggtcaagctctgccgttttaataaactctctaagcccaagcaaacgtcccatccagtccacacatttttcagttctttttttcataaatgctgtaaagaacagacatataaaggatgccactgctgccactgccagcccacgtgtaaaatcaaacacattctgctgtcttaagccagaaagataaatacctgtcacaagtgcaataccgcacaggtaaaaacagattcctatgaacccacctccaacacggccggcgcctcgtctgccatgccatttatcaacagcagagcagagaagaatcataccgatcaccatcaagatcagtgaaaacacactgaaaagctgctgcaggatccaaaacttattcagcacaagcatcatcacaagaaaggtgcacatgggcacaaagctgatcagggcagcaaacactcttgccacagtagatgaagtagtataaagccctccctttgccttcacataatccttaacctgactcttaaccgtatcaattgtacctgcacatttatatttcaaactggaaatcctgacagaatctccttttttgaaaagcttatcaaacagggtcctttcatatttgggagcatctactggtaatggaagtgctgtctttatcagtgtaaggtcctttttcttgcctgtatctttaatctgaagatgacctctgtctgcccagtaaagaatcagggacaaaacatccttatcctccacactgccgtcaataatgtatcctactgctgcactgtccagatctacagggggctggaactgtacagatgtgatgatctcttcgtcccttccgaaacatcggaacataaagagaaccagcaacaggatcaccacggaagcagccaccaggatcgtattcacaggagggatcagattgcttcctgtaaaataatcatctcccatctgggcatacatggtaatgccgctgccaaattccatatcccgggtcaacgtaccttccagggtattcccatcccagacaagatccatcagttccttcccatctgcagtcgatccgtaacttccataatataattccagcttttcatgatcaaaattctttggaaagcttactgtaaagctgctgcctgctggaatcacattctgccagcttaaaggaaacaggttgtaatatatatctgtatatgccttttcttgtactaacggtgtaactgagtactccatggaataggtctgcgggccatatactgtatgatccgcatctccaagcttaagaacatagaagccctcgtctgtactctcttctacatttgtattgcaatcttccaactctatatcagcaaaataagggatcttttccccttgcacattctgaatggtgcctttcattggaatatagcggtaaattccatgacgttcccgaagcatgtccacctggatcgtctcgcttaccaggtaactgttgtcttccccaagggtcacttccacatggtaattctcagtatccatattgtggtcatattcaagggtgctgctgtcaccacttacccctcccaggatattccctgtcatacaaaacatgattccaataacaaccagtatgccgatctggaatattgttgacagactgactttcttaaacatactttctcctcctgctcaggtttcttgtttgatgttaaaaagaaacctttacattttctctttcagcttcagaatttacttcataaagaggttttctcttgaagccgaaaagtgacgcaagaatattgcctgggaacatctctgttttcgtgttgtatttattaacaacaccattatagtatcttcttgaacctgcaatttcttcctcgatacgggaaagctgattctgcagactcaggaagttctggtttgctttcagatccggataactttctgtaagtgcaaacagacttttcagtgtacctgaaagtgcattgtcatttgctattttctgctccggactgttggcattcatagccatatttctggcattgatcacagcctgaagtgtgtcctgttcgtgcttggcataaccttttacagtttccacaaaattaggaatcagatcataccgtttctttaaggatacatccatagctgaaaaggcttcttcgcttttgttgcgaagtctgacaaatccattataggaggacacaagccagagcaccaaaagtacaactattgccagtacaataatcacaatttttaacatttttctttctccctccaacccggaaaaccatcaggctttccaaacagccacaactgtaaatggctgttataca

SEQ ID NO: 106 - DNA, 10233 bp, Unknown
  gut microbiota DNA sequence
ctttatgggcatccagcacaggggttactacctttgcaacaaagctttctgtctgctcttttgcacggccaacatacttcttaggatccattgttttctgcagttcttccaatgtaaggttgaaagcaggatccgcagcgatcagttcaagaagattgttatcctttccttctacctttacagtctttcctgcttccatggaaagctcacggatacgctcatgcagttcctggcggtctccgcctgcctttactgcatccatcataatgttctcagtagccataaacggaagttcagccatcatatgcttctcgatcaccttaggataaacaaccaacccatcaaccacattcagacacagatccagtatgccatcaatagcaaggaatccttccggaatggaaagacgcttatttgctgaatcatccaaagttctttcaaaccactgggtggcagaggtgatagccggattcaatgcatctaccatcacatatctggataaggaagcaatacgctcacttctcataggatttctcttgtatgccatagcagaagatccgatctgagacttctcaaaaggctcttccacttctttcagatgctgtaaaagacggatgtcattggacatcttatgtgcgctggcagcaatacctgcaaggatatttgcaacacgggtatcaacctttctggaataggtctggccggataccggatagcatgccttaaatcccatcttctgtgcgatcatcggatcgatcttgtcgatagtctcctggtctccgtcaaaaagctccaggaagcttgcctgtgtacctgtagttcctttggagccaagcagcttgatggttcccagtacatactccagatcttccagatccataaggaactcctgacaccataaggttgctcttttccctactgtagtaggctgtgcaggctgaaaatgtgtaaaagccagtgtgggctgatccttgtatttgtctgcaaacctggacagctctgcaacaacattcaccaacttcttctgaaccagcttcaatgcttctaccataatgatgatatctgtgttgtcccctacataacaggaggtagctcccaaatggatgattccttttgccttgggacactgaactccgtaagcgtacacatgagacattacatcatgacggacttccttttcccttgcttttgccacatcataattgatgtcctctgcatgggctttcatctcatcgatctgctcctgggtaatatgaagccccagttctttctctgtctctgcaagtgcgatccacagctttctccaggtacggaacttcatatcctgtgaaaaaatatactgcatctctctgcttgcataacgctcggataacggacttgtgtatctgtctgtgctcatcttcgttctcctatttctttgtatattcaggaactgacagttcctgcacatgataaaatgtatgtttccccgctttttacggataaacatacttattcgtctaaaattatataacattgcccatgcaaaagcaaccaaaaaggcatcaaccctgatggaatttacccaggaattccttcatacgggcatgttcggaagcaaatacctgctcaggtgtaccttctacagcgatcacaccatcatccataaaaataatcctgtctgaaatatctcttgcaaaagtcatctcatgagttacgatcaccatggtaatatgctctgcagcaagggccttgatcaccttcaggatctcaccggtaagctccgggtccagtgcagaagtaggctcatcaaaaaacaaaatatctggattcatgcaaagtgcccttgcaatggagaccctttgctgctgaccgccagacagctggtaaggatatgcttcttcctttccttccagtcccatctttttaagaagctctcttgcctgcaccagcacctcttcttttttacgcttctgcacacgcatcggtgcatcaataatatttttcagcacagaaaaatgaggaaaaagattaaagttctgaaataccagacctacttccccgttttttacgatctcgccggcatccggtgtctcaagccctgtagcacaccgaagcaacgtggactttccggaaccggaaggcccaatgatgcttaacacttctcctttatctacctccagcgagatatctcttaacacatccagtgcgccaaagcttttcttaatatgtttcatttcaaataatatcattttacttttcccccttatttgtagtaattcatcattttctcgatcttgttcatagctacagctacaataaggttaaaaatgtaatagaagatggcagcaaccagaaacggagtcatggtagtctgagcacttgcaatctgtttggcaatggtaaacatttcggcaacagatactacaaatgcaagggacgtatcttttaccaaagtgatcacctcattggtgatggacggaaggattcttttaataacctgtggcaggatgattctgaaaaaggtctgagacttgctatacccaagaatctgtgctgcttcatactgtcctgcaggcatggattcaatcccgcctctgtaaatctctgcaaaataagcagcataattgatagcaaatccgataaacactgcgattagactgtaacctctggatatacggatcccgaaaataaagtaagggccaaaataaaccaccatcagctgcagcatcagcggtgttcctctcatcaccgaaatataagcagatacgattcctttcaatattttattctttgacattcttccaaaacatatcagaagccccagtggcagtgaacagatcaaagtcacaaagaaaatttccacagtagtgatcattccgcctgccagttgttccaacattgtacttaaatccatatactttcctccattagcacaacaacagagggtgcaagctgtaccctctgtctgttatacattcgtcctgttttatctcagtcgagaagactcccacctctttcaggtgacagccgtcatcaaaatttatcactctgcctctgtttcttctgcttctgtttcactgtcatctgctgtcttagtatcttctgtctcagaagtctcctgtgcatcatcgtctccgatgcacagcatatcagcaacctcatactgctgggcaagcttctctacttcgccagcctcatacagcttcataacctctgcccatacagtatctctcagttcttcattgcccttcttaaagccgataccatactgctcactctgaataggctcatccatgatcacatatttgccctcttctcttttggacagctgatatttggcaaccccgatatcaacagcaatggcatctgctgcacctgaatccaggttcataaatgctgtattgtagttctcattctcagtaagagaagcaaaacttgcagtcagatctttattgtcatcactgttcagtgcatccagtgcagcggatgcagtctgtacaaccacattcttaccagccaggtctgacagcttctcaataccggaatctgctgccacaaccattacctgctcattattcagatatggatctgaccatgtatagtcatcctcacgaccgttaatggtaaatccattccagatacagtcaataataccagaattcaggtctgcatccttgctgtcccacataatcggtgttttcaccagctcccaaccaagattgtcgcaaactttctgagccagatcaagatcaaagcctacatattctccatcatcattcatgtatccaaaaggcggatattctgcatcaaagcctaccaccagtgtcttgctgtctgcatctgcgtaaaccggaacaacagataccattcccactgccattactgctgccagaactgcagccatcatctttttcttcatattgtgatcctcctcttcgtcttcctttaaaaaaattcatgttctaaaaccattcttttcgtaactgttcactgcctgataaattgttaccatttctttagtacgtagtcactctaccgtattaaagcatgttgatatggtagcataggaatccatagctgtcaagaggagtttttgtaaataccaggattgttgaaatacacaagtacgaaacaatccacagttatcatagaaacacaggttccttattgaatcaggaacctgtgcttctatgatattcttttgtaaattttaccaggcactcatcaatatgctgagaatacaccggtatctccggcttcttggcaaaccgttccagcgcctgctgcacagtctcttttatctggtcgcttacattcagtgcagtcagacggctttcatattcaataggtgtccggatgcttttataagcaagaagataggtgatcagggactgctctgtttcatccagctgatgcgcatgccaaaagcattccactgccttttccatctgaaaaagatagctgcaggcacatcccagattgtgatagatctgtgctgtaagccctgcctgtccctgctccagtccttcttttttcagaagcttctcatatacatggatggcacttaccagcatcccattctctaccaatgcatctccctttttcttctcacggactacaggggcttctgcatccatcttggaaagctttgcatttaatgtgcgaagctcttcatatgtaagataattgatctccttgaaaacaggatacagaatatcctctgcgcttgcaaacttacccagcttaggacgaagctttgcagccagccttggaagctccagttcctgggcgatccagctgcacaatgcttcattgataatcgtctgatccaccaggtaaatattgtgataaagataataacacaattcttccagtgtatagatattggtgctgatattctggataaaataaggagatctggcttttttagtctgacataaaatatatccgctcattcctcgttcctccttaccactttacggaatctttccataccttgccgctggagggatacatttctccaaagccaagatcctttactgtgatcctgcacagatctttggaaatatactgtagctccagggaaagcctggtagttttatttggacgcacaggcagtcctggaagccccatggaaatacgtttcttaccttcctgtcccatggtactcaccacaaacaccagttcctttgtatcatccaggatcaattcgcagccggctttacattcataccagttcactcctgcatggatcaacggatagtaggtaggggatcccatcacccgcatttccatacctacatctgtaagcaccaaggaaggactgaggtagcggtagcctttcagattcctgtcctctgttttttccttacctgctccgcaggctccctttgcaaaaagattgtttccaaaatacacttttcttctctgctggcacaatagtcttacagattgcttagcccactttggatcaaaccccttgccggtgatctggatgctggaatatagatctgttcccagagttttctgaatgaaagccagaaaatccgaatcacggtgcagggttgctttttctctggaagcttccgcctcctcggtcaaaagccctgtaaggctgcactctcccagatcttccagctgcaccagtacaggacctccgccctgcatcaccagcttacggaactgcaccctgtctccgttaaaatcataccagcctacgcttcggttccaggtttctcttttttgggtcataatatagtagaaaaagctttctccgtaatcaagaagcagatacttatcctccaaaaagcccagcgcctggcaagctctctgaaaattagacacttgcacctgatccagctcctgcgcagtgatcaccaggcatttggtatttttcaccacatccattacacctaaaaatttcagcattccttttaagaatactgccagcaactcccaaggctgctttgtttctgtgcccacctgcactgcttcctcttttctgcaaagatcatacagactgtcgatcaatatgcccccacggtctcttgcaaaatattcagcctccaaacctacacaataatccttatgctctcctctgtgacagagaagggtgggggcttcaaactgttcgctgcccaccttcatggaaacagacctgggctcatcaccctttctgtcataataacagatctgggagtattccttgccaaagtcaataccaataatcaagtcccgaatctcattcatcccttagtcctctttcctgatcacaaacatctcattcacatactgttcctgccgcagatactgtttcagctttgcagctacttctgcatccttgtccagccttctggctgacaggatctggttgatcatctgatatttgctgcctggtgcgccttccacccggctcatggtcatagtacgttctgcagtcttttttattttccctttatattctgactggaaataataatgcagggtttctccatagaaaagtgtaaatgactttgtgcggatcccttcgtatatatcataaagcggttcatttttgtattccggttctgctccaaggccagtatccaatgcataaaacagtgtaaccttccactttggactgccgtggaactctacataggtcttatcatccagctgataagggctgagaagctctgcagataatttatggaaaaaggcaaactccatgtttctgtccatgcattccttcagaagctctctctccatagaaaggatctcttcgctttttcctttttcccttacaagttctttaaaaagcgccagatggcagatcaaatctaccggccacttttccagatatgcctttttcagggattttttcacaagactgctcatggaaaactctttaacaaaaatcccatatgccacctgtgtcagataagcaccgatcagtctttcttttcctttatgcttgatatagtctgccagaatactctctccctcttttcgatagtcagaggtaaagatcagaagccccagcagcttttcttccatatcataagtatccatttcaaagcctttggcacttttccagatagaaaacatctcgtccattggcccaaacctatacttcatcagatactgaaggattacttcatcataaatcccgcttctgtatacttcagatgccagtgccagcaattcttcgtcctctgccatttcacagcggatgatcatcctgcttaccagcttcagaaggctcttcatatccagtccttcaaagccaaactcttccacaatggctgctgcctgcggaaaaagccctctggaaatcaatacagacaacaaagtttccctgtctaccaatgcatattccctgcaatccaaccttttcaggtatccgtccaggtcttccccatggatatgaccagcataataatccaggatctctttgcggattcctcccctatattcactgctcactccaggaagtctggccagcttctggaaaagttccagatcatccctggaaataggatgctccatgcaatagtgaagcagcacacctgtctcctccacaccaaaagccagcacctttggcatcatctcttcttcgtccaacatctttttcaaattatagccaacggtagaagcataccgtctttgctgctcatcctggaaaaggatcaccgcatcctctgtatagattcttggataggccaccccctgtacacatgggtacacttcttcctcagccatctggctgtgctttacgatcacactgcggatctttttgtcatcacagaaaagccggtaagtaaacatcctgccggcaatagcgtttgcctcttcctttgtctttgggtctgtaagaaattcctgatagattgccgcataatgttcattcatacatccttctgacaactttttctttgcaaaaacagccatactcttctgataactctggtaatttgctggatctgcttctttatcagcaattaccctggaataaatgaatgctttcttgttatcccccagcgtatcattattataagtaaaatacataagcagaggcttgggcagttcctgctggccggccatatccatggtctccacatagtactcatacaatctggtaatccgcaatccctgctgtacagcccggctgtaccatataaaatattcaggtttcctgggattcccttttatgatatatttgcacactgcttccagggtatcctcagatggaaagtactcatacccttttgccaacacacgataaagactttcattataattcttctcatatccggacaaataggcaatacgcatagccagctcctgggttagcagatccctttttgcagcaaacaaaaatacctgtacccagaacccatttaatctgtgcagaagggaaatattcctgcttaccagctcccaagcctccaaatacaggaacggacttttacatcctttttcataaagctcctccatcataaaaattgccttggacgatgactggcaaagctcaggatcctttcttagcaatacccataaaagagtaaagctatcctctttctgcatatggaaattgcgaagcttcctaagagcctgctcctgatctctgtaaatccctgtttccacacacaaatacaagtaaaatcctgcaaattccaggtcgtcctttgtaaaggctttgtcctggtatttttcaagaatctgcactgctccttcatcatttccttcctgatggagcagaaaagcttcatacatctgatattctggataatcacatccattttcacgcagctggttcagctcataatgagtgcttgccgcccatgtggaagcatccattttattgcacctgaaatccaggtagtccttaaggatagccagcttgtgctgctcctccactacccgcacattaacctctacctttggtgttcgtgacaccagaagctcataagtaagctgctgataaggactttttactacaatcttaccgaactggttgcctgcccccagcttgtcacagctgatcagataatccacttcataatagctgccaataaagtcttcatctgtaacaaccttcttgggaatctccaggaaatccccatatgcttctatttccaggcgcagatgtccccatccgcttctgtggatatgaaaagcctcctgcatatcctgcgtcacttcgtagtatctggcaccagggtctttcaaagaaacgctcacttgctctttcatgccaataccgatcaggaattcctccagatgctggtaagtcactggctgtctggaaagaccggcaaaaagagcctttttctgatcctcttcattctttaacaaagaggaaaaagaaggatcagtaaaaatacgaaaggcttctctgaaatctttttttgcaatctggcagaattcttccagatcactcactgtacctttcgctgtttttaattcttctttttctacatgtatctcaaaaccaagtctgtattctccgatattggtggtaaagcagatccagccttccagatcctgtcctggttccatgcctactgcatcaataccatatggcaggcagactgttgttccggtaaacttatcaagacccggcaccagccgtctggaggaggatgtaacatatccccggatcctgcagttatcttcggttccaagatatacttctccccgcctggtttctcctgctttcagggtcagggaaatcttttcttttgaaaaaagaagatggggctgttcatattcaaattttccatttaatagctgttctgtttttttcttcaatatccttcaccttactgtcttttgttattcgctgtactgttttccattataatgattttacagctctatttcaacgcaaaattagaagcaaatccaagttggaaaagcaccagcctccattttgcggcatagaatatagagaaatccctttcgaggtgcggacttgaagactttccagaaacccctgactcctgcacaggaacgcttctatcttcaacaataccaggagggaaatgaagaggcaaagaaaatcctgatagaacgcaacctccgtctggtagcccatatcgttaaaaagtatcaaagcggcgaggaagacctggatgatcttatttccatcggcactatcggtctgatcaaggcgatttctacttttgatatcagcaaatccacccggttatccacctatgcagccagatgtattgataaagcaaccctagtgctacggctcccttaggg

SEQ ID NO: 107 - DNA, 3595 bp, Unknown
  gut microbiota DNA sequence
cgcattaagatttgagaaaccttttgatgtaaaggtttctttttttatgcatttattctttttttaatggagaaaatctgttatacttaataagtatgacaaaaatcgggaaacttaacagggtatacatcagtatacctgaataaaaatggtggtgtagaatatttgaaagaacagacaagagtaacattcacaaaggaggaactggctgctaaagtaaaggttcctgcgattgtggaacaggatttaaaaaggatcatcagtgaccgtctggagcagtgcggattgtattaccgggttttttcacgtacaaagacggctgcatccatggcacataaatttgaattaaaggattatagtgctgaggataagaagctgcaggatctggtaggagtaaggattaacctttattttgatgatgatgtggagatctgccagaatattgtagagaatacttttgatgtagagggatggtccacatcagagcgcagcgaagaagagtttaagccaaccaagctgaacggggtatgtaagctgccggagtatcttagatctgagatttctccagaaacatgggatatgtgtattgatgacacatttgagattcagatcaaaaccatgttttttgaaggatggcatgagattgagcatgacatgcgttacaagggggaggagctttggcataattataagggattttcaagatactttaacagtattcttgctacattggagctgtgtgacaaatctatggtcactttatttgaggacctgggacattccctttataagtcaggcagatggagcgatatgatcaaaagccatttccgcctgaagcttggagaaggaactctttatccggaggttgccagccttttagatgaggataaagacaaacaggtagataatctggcaaaacgaatttacaaaaccagtaaacagactttggtggaacagcttttaaagcggcccaagaaaacacctattaatgtaaatactattattgcattgttaaatgacagccagtttcacgacagccggttgacagcgatctttaaggaacgagacgtgtacaatgatggccgtgaggagatcccaggtgagtccaggcattatgagatgaagccattgatccgttataatgttttccagatgaatacacgggtggatggaagcaggatcaaggattcttctgcctgtgatgctgtttctatttttcaaaaatcggcagatattatttatcagtggatcgtagagaaatatggcggcctgtttaagagtatgccaagggaaaccgtgacctatcacgcagatatcctggcttaccatgtggctgtgaactataatccggaagcacttcggatgaatatgcatgtgcgccatatggatctggaggttggcggacgtatctggtattcagaagccggtctggaagtgaaagatggacaggtgcttctgaaagtatgcaacggatatgcagatccgcaaagagagcattccgcccaggaacctggagtggtattcttcagttaccctggatattataagtctattgtagacgaggtgggaatcatcagcgggatttcctgctccaaccggcgcaggatcttaaaggaggatcagttttccatgctggctgcagcacttaaggatccgaagagaatgtttccagtagtgctggttatttccagaagcacaccggatggcatgatggatgaggattggctggggcagttccgtgtatcggattttacaagaactgtatggcggtatgcccatgtatttacctgccacgaaagcacaggtaagaagtttcttcatgttgcaggagttgatccaagacagattgaggatattcccagattatatattttctggccagggaaagagattgatgattatggacctgaggatgtggagaactgcagctttggccgtcacctggaggcaaggggagacgcccgtacctatgatattgtaagaggaggacaggcattttaccataagatcgttacagatctgagggaatggaatgtgtctgcagatatgtgggaaggctttaagctggagatccttactgagattccaaaataaaatccaaaacaaaatctaaaacaaaatccctgtggaacacggttttttaaattgttccacagggatttcttttcttgaagacaaaaaaagaaacctttctaataaaaggtttcgagaatactaatgcggaagatgggacttgaacccacacaagcgcaatgcttacaagatccttagtcttgctcgtctgccagttccgacacttccgcatgctgcatttcatgggctttttgtctctcgttttgtctctcgccctcgcaacaaaacgtagtatatcaaaagccctatggaaagtcaacagcttttttgaaaaaataaaataattttcaagatttttttgaaaaaaagaggaatttgcaattttgtgtagaatataattaataagaggtttgtctcagttgatccggcagagggatgtgctgccgggcacatggttgttctgtggaggaaattggatgaatatcagagagagcatggaacaaagagaacgggagcttttaagcccttatgctgctctaagcggtgattccagggggcgtggcagaccggaagaagaatgtgatgtgcgaactgtttatcaaagagacagggaccggatcctgcactgcaaggctttccgcaggatgaaggacaagacacaggtttttcttgcaccgcagggagatcactacaggaaccggcttacccatactctggaggtatcgcagatcgcacgtaccattgcaaaggcattgcggctgaatgaggatctggtggaggccattgccctgggtcatgatctgggccatacacctttcggtcatgcaggagagcgtgcactaaaccaggtacatccaggaggctttgagcattgcagccagagtcttcgggtggtagagcttctggagaagaatggggaaggactgaatctgacctgggagaccagggacgggatcctgaatcatcgtaccagcggtcatccttccacactggagggacaggtggtgcgctttgctgataagatcgcctatatccatcatgatatggatgatgcccaaagggctgggattctgacagaggatgatctgccagttacacttaggatgtttcttgggtataccacacgtgagaggctgaacacctttgtacatgatattattgagaacagcctggaccgtccggcgatcagtatgtcgcctcaggtacaggaagcaatgatggatcttcgcagcatcatgttccaggatgtttacctgaatcctgtagcaaagaaagaagaatccaaggcaatcaagatgcttactgaattatatcagtattatatagaacatccggaagctatgtctggtgaatacagggagctgatcagcaggaagcaggagtctgtggctcaggctgtatgcgattatcttgcagggatgacagaccagtattccatggaaaagttccgggaaatatatattccgaaagcatgggaagtatattagctgggagatgacgcccacctctataggtggtgaga

SEQ ID NO: 108 - DNA, 36204 bp, Unknown
  gut microbiota DNA sequence
tgaagaagtcaggatgaaaaatgatattgtggatgtggtttcacaatatgtgaagcttaccaggagaggcagctcctattttggactgtgtccattccacaatgagaaaacgccttccttttctgttacgccatccaagcagatgtattactgctttggttgtggtgcaggaggaaacgtatttaattttgtaatggaatatgagaattattcctttggtgaggctctttcccatctggcagaccgggcgggggtacagcttccaagaatcgaatattccagcgaagccagggaaaaggcaaagcagagggagactcttcttgagatcaaccggcaggctgcccagtatttttattatcagcttcgcagagaaagcggacagatcggttatcgatatcttacggacagaggattaagtgatgaaaccatccggaaatttggccttgggtactcggacaagttcagcgatgacctttacaaatttctgaaaggcaagggatatggtgacgatcagctgcgggacagcggcctgtttaatgtggatgagcgtcatggaatgtatgacaaattctggaaccgagttattttcccaattatggatgtgaataaccgggtgattggttttggcggcagggttatgggagatggaaagcctaagtacctgaattccccggagacaaagatctttgacaaaagccgtaacctgtatgggctgaatgtggctcgtacatccagaaagccatatctgatcctgtgcgaaggttatatggatgtgatctccatgcatcagtcaggctttaccaacgcagtggcgtcccttggaacctcgcttacttccgggcacgccagccttctaaagcgctacacccaggaggtgctgcttttgtatgacagtgatgaggcaggagtgaaggcagcattacgtgccattcccatattgcgggaagcagggatcaattccagagttgtggatctgaagcctcacaaggatccggatgaatttatcaagacagaaggagcagaggcctttcagcagaggctggatcaggcaagagacagctttatgttccgggtgagcgtatcagagaaggatttccctatggaggagccgcagggacagaatcgtttctttgaacggtgtgcacgtcttcttctggaattatcggatgagcttgagcggaatctttacatagaagccattgtcaggcagtatcacagatatgggatcagcgtggaggatctccgcaaaagagtaaataccctggctatgaagggaacgcctatagagcagcggcagcagccaaagactgtggaagcccgtcaggcacagaagaaggaatctgcagcagataaggctcagaaactgatgctgacctggcttgtaacttatccagggatttttgatacagttgagaaatatctgtctccgggggattttatcgttcctttatatcatgaagtggcagaaatgctttttgaacagcatgcccagggagatgtgaatccggcacggctgctgaacagctttactgacagcgaagagcagcgagaggtagcatcactttttaatgcaaccatccatctggaaacaatggaagagcaggaacgggcatttagcgacactctgatccgtattaagcaggaaagtcttgcagaaaaaaataaaaactgggatcctacagacatggccgggttgcaagaacttgtaagggccaagaaggaactggaggatctgggaagaaaaagacagcagctgcatatttcctttgaataaggataaaatataaacactatatggaggttaaaacacctatggaaatgaatatgggcaaattcagtgagaaacttgtagagcttctggaacttgcaaaaaagaaaaaaaatgtgctggaatatcaggaaatcagtgactttttcaaagaccagccactggatgtggatcagatggaaaaggtttttgattttctggaggccagtggtgtagatgttctccgtatcactggaaacagcggagaagacatgatccttgatgatgatgtggatattgacggcctggatgatgaggaagaagtggaactggacaagatcgacctttctgtacctgaaggggtaagcattgaggatccggtccgcatgtatctgaaagagatcggcaaagtgcctcttcttacagcagaagaggaaatcgaactggcaaaaaaaatggaacagggagatgaagatgctaagaaaagactggcagaggctaacctgcgtcttgtggtcagtattgcaaagcgttatgtaggtcggggaatgctgttccttgatctgatccaggagggaaatcttggactgatcaaggcagttgagaaatttgactacagaaaaggctataagttcagtacgtatgctacctggtggatccgtcaggcgatcaccagagccattgcagaccaggcaagaactatccgtattcctgttcacatggtagagaccattaacaagctgatccgtgtttccagacagctgcttcaggagctgggacgggaacctaccccggaagagattgcagatgatatggacatgtctgtagaacgagtgcgtgagattctgaagatttctcaggaaccggtatctttggagacaccgatcggtgaggaagaggacagtcatctgggtgattttattcaggatgataatgtgcctgttccagcagatgcagcagccttcacccttcttaaggagcagctggtagaagttctgggaacccttaccgaaagagagcagaaagtgctcagacttcgtttcggattggatgacggccgtgcaagaacattggaagaggttggcaaggagtttaatgttaccagagagcgtatccgccagatcgaggcaaaggcccttagaaagcttcgccacccaagccgcagccgtaaattaaaagattacttggattgatcaggagaagcgtatgcagttgtctttacgtttggctgccatcagtaaaatggtgcatggcggcaaccggctggtagatgtgggatgtgatcatggatatctgccggtgtacctggttttgaataaaaagatcccttctgcgattgccatggacgtgaggaaaggcccgttgcttcgggcaaaggagcatgtgcagcagtacggggtttcagattacatagaacttcgtctttctgatggcttgtctgcactaaaggccggagagggagataccttggtgatcgcagggatgggaggtcctttgatggaacggatcctgacagaaggaaaacaggtgcttgattccttccaggagctgatccttcagcctcagtcggatgtgtgccatttccggcattttatccgggaacagggctgggagatccgggaagaggagctgatccttgaggatggcaaattttatcctatgatgcgtgtgaccaggagcatagaaggatgtgttccttggacaaaggaagaagaggcctttggtaaatttcttttagaagccaggcatccggtgcttaagttatatttgcaaagagagcttgggatccgtaagaagatcctggagaagctggtggatgcaggagaaggcgccagggagcgaaaagcagaggtagaggaggaaaagcagcttttaatggctgcgcttacaagatatgaaagcaagtgaactgacggactggctggagaaggagtttccttcttcggcagcagaggactgggataatgtaggacttttggtgggagatgatcagaaagaaatttcgcatatttttcttgcactggatcttacagatcgcgtgctggaggaagctgtttcctgcggtgcagatatgatcattactcaccatcctatgatcttttcaggcctgaaaaagatcaatacccatgattttacaggcagaaaggtgatccggctgatccaggaggatattccttattatgccatgcataccaattatgatattcttggaatggcagatctaagtgcagaatatattggtatttcacagaccagcgttttgtctgtgacaaaggacggcttggatggaacacagggatttggaagagcaggcaatcttccaaaagagatgagccttggagaatacgcaggttttatcaaaacatctttaaagctgaaggatgtgagagtgtacggagatttaaacatgcctgtaaagagggctgctgtttgcacaggatccggaaaaagcatgatttcggatgcgctggcagcaggagcagatgtgtatgtgactggagatattgatcatcattcagggattgatgcattgcaggctggtttggcagtgatcgatgcaggtcattatggtacagagtacattttcatggatgccatgaaaaaaagaatacaggaagtatttgacgggctgaaggtaacatgtgcaaaggttcagtgtccctataccctgatggcagatttgtgataccatcagcatgccatagaaatggaggtgctatacatggaaacagtaaaagtaaccataaacgaaaccgtaaaggaatatccaaagggaatttcctatatggatattgttaaagaatacccggcagatgagaaagcacctgtgatccttgtagtttcaaatggaaaactgaaagagcttcacaaaaaagtaaacagggactgcaccctgcgctttgtcacaaccagagaaaatatcgggaaccatgcatacaggcgcagtgcctgtatgatctttctgaaagcagtttatgatgtggccggcaaaaataatatagaaaaggcagtgcttcattattccattggagcaggctattattttaccatttccggcaagcagcaggcggatcagcagtttctggatcaggtaaaaacacggatgcatcagcttgttgatgcaaagatcccgattatgaaaagaagcgttgggacagatgaggccattgaattatttcacaaacatggcatgtatgataaagagaaattgttccgatatcgtcgtgtatccaaggtgaatatctacagtattgaaaattttgaagattattattacggttttatggcatgcaataccggatatataaagtattttgacatggttttatataaggatggcatcgttcttatgcttccggaggcacaggctccagatcagatcccagagtttgtacctaaagataagctttttcaggtgcagaagacttccgaggaatggggagaccggctggatatttctactgttggggaactgaatgaccagattgttgttaaaggtctgcgtcagatccttttgatccaggaggcattgcaggagtctaagatttctgagatcgccaggcagatcgccgctgccggagataagaagtttgtaatgatcgccggaccttcttcttccggcaagaccaccttttcccacaggctttccatacagctttctgcacatgggctgaatccgcatcccattgctgtagataattattttgtaaacagagaggatactcctgtagatgaatacggggaaaagaattatgaatgtctggaagcccttgatgtagagcagtttaacaaagatatgcttgcattgcttgcaggaaaacgggtagaaatgcctgtattcaatttcaaaacagggcagagagagtataaaggggactatctgcagctggggaaaggggatattctggtgattgaggggattcatggattaaatgacaggttaagctatgcacttccatcagaaagcaaatttaagatctatatcagtgcactgactcagttgaatgtggatgagcacaatcggatcgccaccactgacggacgtttgatccgaaggatcgttcgggatgcaagaacccgaggtacttctgcaaaggaaaccattgccagatggccctctgtgcgaagaggagaggagcagaatatttttccgttccaggaaggggcggatgttatgtttaactctgctctgatttatgaactggcatgtttgaaagtttatgcagagcctcttctatttggcattaagaaaggggagccggagtacttggaagctaaccgtttgttgaagttcctggactattttgtggcagtgcccagtgaagaaattcctaataattccatactcagggagtttgttggcggcagctgttttaatgtgtaagtgattttgggctttacacacagaaaaaaccatgctagaatagcatttgcgtaagcagaccaggtaatcgcggctggacagacgaaagggttcaggtgaggaaagtccgggcttcatagggcaggatgccggataacgtccggtggaggcaactcccagaccagtgcaacagaaataaaccgccggttttccggtaagggtggaaaggcagtgtaagagactaccgccggcctggtaacaggacgggcacatgtaaactccatttgaagcaaggccgagaagaaagcgatacggctgcccgtcgtgctttcaggtgggccgcttgagccattcggtaacggatggcctagatagatgattacccaagacataacccggcttataggtttacttacgcagtaaaataacaaattattttttataaatagcagcagccccggatccatggacccgaggctgtagttttgttttatggagattatcttatttatttctgtgtccggaatatttctcttcacagtatttgcagcggtagacctctttttcttcatcagccagtacaaatacctggtcaagcccctgctcgatagaagtaatgcagcggggattcttacagcggatcacatttactacctgctttggaagacgaagctcttttttctggacaatcttctcatccttaatgatattaactgtaatattgtggtcaataaaaccaagaatatcaaggtcaagcttctcgatagggcattcaaccttgatgatgtcctttttgcccattttgttactgcgggcattcttgataatcgctactgtacagtcaagcttgtcaagcttcaggtcatggtagatggtcattgcctttcctgctttgatatggtctaatacgtaaccttcacgaagtgcacctacatttaacatggtaattctacctccagtaatgtgagaatcagagccatgcggacataaacgccgtactggacctgtttgaaataagctgctcttggatcggagtcaacctccactgcgatctcatttactcgtggaagaggatgaagtatgtacatgtcttctttggcaagctccagctttgccttgtccagaatatagaagtctttcatgcgtacataatcttcttcgttgaagaaacgctccttctgcacacgggtcatgtacaggatatccagtgcaggaatagcttcctccagacgttctacctcctggaactcaatgttatttcgcttcagaacatcttcgcggatatagctggggatccgcagctcttctggggagatcaggataaatctgacgtttttgtaacgtaccagtgcttcaataagagagtgtacagtacgtccgaatttcagatccccgcacagaccgatggtaaggttgtcaagacgtccatgaagggaacgaatggtaagcaggtcagttaatgtctgagtgggatgctgatgaccgccatcaccggcgttgatcacaggaatgttagatgcaagagaagcaacaagaggagctccctctttaggatggcgcattgcacaaatatctgcataacaggaaacaaccctgatagtatcagcaacactttctcccttggatgcggaactggaatcagcagatgagaaaccaaggaccttgccgccaagattcatcatggctgcttcaaagcttaatcgtgtacgtgtgcttggctcataaaaaagagtggcaagacgcttgtcatcacacagatgtgcatatttcttaggatccttctcaatatcgctggccagatccagaattttttcaagttcttcggtggacagatccagcggactcattaaatgtctcatttcatacctccatgtatgatcgtgatttgtaacaggttttattctaaaatcctttcggtctataatataatacttaggtgattttttcaagatggttttgtaagtattttttcaaagagaagacctgtgataaaccataatggggcataatccagacggatcagtcctttgtactgaagaggagcatcattgtaattccaggggcacatatgaaaatgcttcagaatgctaccgctggtaaactctgtaaagaaaatccctgctgtatatacaagacctctgcaggctgttgggatgcgggagatcctttgatagacaattgggattacagaggcacagccataaataggaaacatcagcagggaggtttttcctatcatagtggtttcaccttgtaaaaatgcatgaaggcctgtccagaaaatttccaggcaccagcctgtaagcccgcaaagaataaaattttttttcatatgatctgacacctattttacaattattttacatgaaactagtattgcctgccttgaaaaattaatacgtgtaggatataataatatgaaaatctggcccgtccaatatccatgcacctgcttatacaggcgtggctgctgtccgggacttttataatacattagaggagcagtagagatggactatggtgaaagccgtgcatatattaaggatgcagagagatacggaagtgttctcggccttgataatatgtatgagatgatgaaacgtcttggtaatccccaggacagcctgaaggttatccatgtggctggtaccaacggcaaaggatctgttattgcatatctgtattctgtccttggaaaggcaggatatcgtgtaggacgctatgtttccccaaccctttattcttatcgtgagcgtcttgagatctgtggggagagaattacctgtgaagaatttgcggagtgtgtgactgagatttcggaagtgatccgggaaatgaccagggaaggcctgcctcatccaaccccttttgaaattgaaaccgctgccgcttttttatattttaaaaaagaaaactgtgatattgtactgctagaagtaggaatgggcggcgatctggatgcgaccaacatcattaaacagccggtactgtccataattgtttccatcagcatggatcacatgggatttcttggcagcaccctgggggaaatcgcagagaaaaaagcagggatcatcaaaaaaggatgccctatgatcaccgtgaaacaaaaaccggaggcagaggcagcacttaaggaaagatgtaaaaagatggaggttccttttgtgtatgcagacagcagtgaggcgcagatcacggaagaagggatctggggacaaagcttctggctaaagggagaggaatacaggatttccctggcaggagtttatcagaaagaaaacagtgtgcttgcattaaaagctttggaacttttggaagagcttggttatcctaccagcctgaaggagagaaaggaaggacttctggcaactagctggaaaggccgttttacagtgatccacaaggatccgctgatgatcgtggacggggcacataatccgggagccgctgatatgatggcagagaccattcggcattactttatgaggaaaaatgaaggacagaagctgatctacattatgggcatgttcagagataaggactgcaggagtgtactttccaaaacacttccatttgcacagcaagtgtttaccattcagactccggacaatgagagggcacttccctccggtgaactggcagatatggccagggaatttcatccggatgtaacagcctgtgatcatattagtgatgcagtagcacaggcttttcaggcagcaggaccaaaggatgtgatccttgcatttggatcgttgtcctttatcggagttcttacagaggctgtaaagcaatataagacaacggaaagaggaaattgatagaaaatatgactgatttacaacaatatcgtcatgaaattgacaggatagacaatgagatcgttcgcctttttgaagaaaggatggaagtctgcgaaaaggtggctagatataagatacagacaggcaaacaggtacttgatccggaacgggagaaggtaaagattgatggagtaaaggcaaaggcacatacttcctttaatgcaatgggtacaggagagctgtttaagctgatcatggccatcagcaggaagagacagtatcagctgcttacccagaatggcattggaggcagcagcggttttgaacagatccaggagcttccaagagaaggagtaactgtagtgtttcagggtgtggagggagcctacagttacggggcaatgcgtgcttactttaaagaaaatataaagagctatcatgtgaaaacctttaaggatgcaatggaagaggtgtcagagggcagagcagattatgcagtccttcctatcgagaattccacagcagggattgtggcagatatttatgatcttctgatggaataccagctttatatagcaggagagcagatcatccgggtggagcatgtgcttctgggactgtccaatgcacagcttgaagatatacagacggtatattcacacccacagggacttgcccagtgtaaggcatttttagatgagcatccttgctggaaacaggtgaaggctggaaatacagcagcttcagcaaagaaagtcagcgaagaacagttggtttcccaggctgctattgccagccgtgaagcgggagagttatttggactgaaggtgcttgccaagaatgtgtgtaagaatgatgggaatgccaccagatttattattcttggaagaaagccggtgtatgtaaagaacgcttccaggatcagcatctgctttgaagctgagcatgaaagcggtgctctgtacaatatgctttctcatattatatataatgggctgaatatgactaagatcgaatctaggccgattccggacaagaactggcagtaccggttttttgtggattttgacggcaaccttcaggatagtgcagtgaaaaatgctttgatggggattcattcagaagcgaatatgctgcgtatacttggaaattattaaaagagggatttaaaaatggcaagaattgaggaatgtatcctttacagggattttgaacatggtgagatcttaaaacagattacctttttgatagatagatatgaactgacaggagaaaaggaatttgaggaagaaaaagatattttttataaaagtgtaggcggtcttgtggaaatggccggtatgtatggcttttccggaaatctctggcacaattatcttacttttcttctggtaaatcatgaaaatgcatttagcacagcctgtgagattagaggtgctgtggagggcagcatcaatcagctggcacttcatgatttccggatttttaaagaactgtatgattttgaccttcaggtatttgaccgggtatttcatactacctgctgccaaagccttaaggattatgagaatattaacggcaacagtaaaatgtttaatcaaaggatccgggatcgaatctgtgatatgagcaagactcttgctgccgctgcaaccacagaagagtttatgaaggatatggtgcagttttacaaggactttggtgttggaaagctggggcttcataaggccttccgtattgagcatgtagatggggaaggggcaaggatcatacctatcacaaggatcgcccatgtgaagcttgaagatctggtaggctaccagatccctaagcagaagctgatcgagaatacagaagcctttgtaagaggaagaaaagccaacaactgccttctgtttggtgatgcaggaaccggcaaatcttccagtattaaaggaatcctgaacaaatattatgatgaggggcttcggatcattgaggtgtacaagcaccagtttcaggatctgaatgatgtgatcgcccagatcaagaatagaaattataaatttattttatatatggatgatctttcttttgaggaatttgagattgaatacaaatatctgaaggcagtgatcgagggaggccttgagaagaagccggataatatcctgatctatgcaaccagcaaccgccgtcaccttgtaaaagagaaatcaacggataagctggaaatcgcaccggatgacgatcttcattcctcagataccgtacaggagaagctttctcttgtatacaggtttggggtacggatctatttcggggctccggacaaaaaggcattccagaatattgtaagagttctggccgaaaggaatggggtgcatatgccggaagaccagcttatgctggaggccaacaaatgggagctttcccatggaggacttacagggcggactgcgcagcagtttattgattatctgcttggcaaacctgtggatgaataaagcaaaggcactttcagggatgatctctgacatggtaaataaaagtgaacgggtcccctcaggggcaggaaggagcaaagaatggcagttactacttttgcagccatagatattggttcatatgaagtaagcatgaggatatttgaactgtcaaaaaggatcggtttccgggaactggatgatgttcgatttcggctggaaccgggaaaaacggtatattctacaggtaccttaagcatggagatggtagattccatctgcgaagtactcatcgatttcaaacggatcatggcagagttcggtgtggaagaatggagagcctgtgctaccagtgcattccgtgaattgaaaaatccgctgatcgtgatcgagcagatataccggcggacagggatacgtatagaggtacttagtaatgcggaacagcatttccttggatataagtccattgctgccattgaaacaggatttaaaaagatcatccagaagggcactgcgattctggatgtgggcggtggaagcctgcaggtttccctgtttgataaggacgcacttgttactacccagaatcttaagatcggaagtctgcgtatccgtgaaaggcttcgtgaactggaaaagtcttgcaatcattatgaccagttggtggaggaatttatccgaaatgacctggttggttttgaacggctttatctgaaagaacgggatatcagaaatgtgatacttatgggagatttccttacagataccattttcagggaagaacggcaggataatattattacaaaagaagaatttatgaccaggtatgagcagatcgtacataagtctgcacaggtactggctgaggatatggatattgatcaggaatctgcgtccctgatcgtgcctacattagtagtccttaagaattttatggatgcatttcatgcagagtctttgtggcttccaggggtttcactgctggacgggattgcctatgatttcggagaaaagaagaaatttattaaaagcggccataattttgaaaatgatatcctggtggcttccaagaatattgcaaagcggtattctaccagcaaaagccacatccagggtacgacggatgtagcacttgctatttttgacagtatccgtaagatccatgggatggaagcaaggcagcggctgcttttgcagatcgcagctcagctgcacgattgcggaaagtatatcagcatgggagatgtggcagaatgttcgtataggatcattatggctacagagatcattggactttccacagaagaaagaaagatcattgccaatgcagtgcggtataatactacggattttgtttcttatgaattgctaaaggatgaagaaacaggactggacagaagccagtacctgctgatcgcaaagctgacagcgatcttaaggcttgccaatgctatggacagaagccattaccagaaggtaaaagggatcaaggcggtattaaaagaaagagagctgcagctggtagtggattcagatcaggatatttccctggaacttggactgcttaaggataaggtgcagttctttgaagaagtctttggtgtgcgcctggttctcagacgtaaaagaaaaatgtagaggagagcatcatggataaaaaaaattttgaaaaaccggaatattatgtgaatcgtgaattaagctggctgaagtttgatgaccgggtgctcagtgaggccagggacaaaaaccttcctctgtttgaaagactgaaatttttaagcatcacttcttcaaatctggatgagttttacatggtacgtgtggcttccttgaaggatcaggtacatgcagattatgagaaaaaagatattgcaggaatgactccaaaggaacagttaaaggagatcagctctcagacccatgaactggtgaatgttcagtataatactctgaaccgttcccttctgccggcactggaaaaggctggatttcatctgatggcaagacatgaggatctgaatcaggaacaacaggagtatgtggatcgctattttgaagacaatgtatatcctgtgcttactcctatggctatggattcctccagaccctttccactgattcggaataaaacattaaatattggcgcactgatttccaaaagggacaagaaaaaaggaaaagaatccactgtatttgctactgtgcaggttccctcagtgcttccgagagtgatccagatcccatccgttaaagaaagcgacactacagtgatccttctggaagaagtgatcgagaaaaatatcggcgaactgttccttgggtatgacgtggtatgtgcacatccgtatagaatcatgcgtaatgcagacctgaccattgatgaggatggagcagaggatctgctggttgagatccagaaacagctgaagaaacgtcagtggggcgaagtgattcgcatggaagtagaagaaaaaacagatgaaagactgctggatatcttgaaaacagagtttgagatcaaggatgaggatattttctatattaacggtccgctggatcttaccatgctgatgaaagtttacggtgtggaaggctatgaggagtacaaggcgaaaaagcatgtgcctgctcctgtaccagccttccagaacgacaaagatattttccaggtgatccgtgaaggagatgttttccttcatcatccatacatgagctttgatcctgtagttaattttgtacgccaggctgcaaaggatccggatgtactggctatcaagcagactttgtaccgtgtcagcggcaattcccctattatcgcagcccttgcgcaggcagcagaaaatggcaagcaggtatctgtacttgtggagctgaaggcaaggtttgatgaagagaataatattgtatgggcaaaaatgcttgaaaaagcaggctgccatgttatttatggcctggtagggttgaaaacccacagcaagatcacacttgtggtgcgtagagaagaaacaggcattcgcagatatgtgcatctggctaccggtaattataatgattctactgcaaagctttacacggactgtggtatttttacctgtgatgaacgttacggggaagatgcaactgctgtatttaatatgctgtccggatattcagaaccaaaaagctggaaccggctggttgtagctccgatctggatgaaggaccgttttttgaagcttatcaacagggaagcggaaatggcacagaaggggattccggcttttattgtggcaaagatgaattcgctttgtgaccgcaagattattgcagctctgtatcaggcttctgcctgcggagtacagatctaccttctggtaagaggaatctgctgtctgaaggtgggagtgccaggagtaagcgagaatatccatgtaagatccattgtaggagattttctggaacacagtcgtattttctatttccataatggcggtaatgaagagatttttatgggaagtgcagactggatgccgcgtaacctggatcgtcgtgtagagatcgtattcccagtagaggatgaagagattaaaaaagaaattaagcatatcctggatgtggagtttaaggacaatgtaaaggcgcatatcttgcagccagatggaacctatgaaaagatgaatcgacgtggaaaagcaaaagtgaattctcagatgattttttgtcaggaagcggaagataaggctaaagctgtgaaaaagcagaaaacagatcatggacgtgtatttattccggcagaaccggcagaagatattgaataatcataatatgattacagtgtcaaaaggtctgattccacctgtgcttgcacaagggtgggagaatgaccttgggacacgccctgatatgagcataaaagtgggatgttaatcctgcgatatgcgaatagcgggaaggattgattctttattacacaaaaaaagaactgtaaaaacagttcttctaaagcagccagtacgagaatcgaactcgtgtttccgccgtgagagggcggcgtcttaaccccttgaccaactggccttgcgtcaaccgacttgcttagtatatactacctttcagaaaaatgcaagcacttttttaaaaaaattttcatgcttgcaaaaaccgtaggatctggggtatgatatagaacgaatgtttgaacgtaataaagaacaagtatatctgttcagccgatggaagtaaagatgggactgggcagttaagaaaggatctgaaacagtcatggcaaaaaaagatacctatgacgcaggcagtatatctgtactggagggattggaggcggtccgtaaacggccgggaatgtatatcggaagtgtatcgcgaaagggtctgaaccatttgatctacgagattgtggataatgcagtagatgagcacctggcaggatactgcagcctgatccatgtggttctggaaaaggatggctcctgtacagttacagataatggacgaggcattccggtggatatgcacgaaaagggaatgtccgcagaacgtcttgtgtttactacacttcatgcaggcggtaagtttgaccattctgcatataagacaagtggcggacttcatggagtaggttcttctgttgtaaatgcattatctgtatatctggatatcaagatcagccgtgacggctatatccatcatgaccattatgaaagaggaatccctacgatacctctggaaggcggtcttctgccgaagctgggccggacaaagacaacaggcacctgtgtgaatttcctgccagatccggagatttttgaaaagacccgtttctctgctacagaagtaaaaagccgtcttcatgagacagcatatctgaatccggaattgaccatccgctttgaggacaaaagaggggacgcgactgaggatattacctatcatgagccagagggtatcgtgggttatatccgggatctgaatcagaattcagaaacactgcatgagccagtttattttaagggtgaagcagatggaatccaggtggaagtggcatttcagtttaccaatgaattccgggagaatgtgctaggcttttgcaacaacatttataatgcagaaggcggtactcatctcactggctttaagaccactttcacaacagtgatgaatacttatgccagggaaattggcatattaaaagaaaaagatccgaattttacaggggcagatatccggaatggtatgactgcagttgtgtcggtgaagcatccggagccaagatttgaaggacagactaagactaaactggataatcaggatgctgcccgtgctaccggcaaggtaacgggagaacagctggtattgttttttgacagaaatcttgaaaccttaaagactgtactttcctgtgcggaaaaagctgcaaagatccgcaaaacagaagaacgtgcaaagaccaaccttcttacaaaacagaaatattcctttgattccaatggaaaactggctaactgtgagaaaaaggatcctgctctttgcgagatctttattgtagagggagattctgcaggcggctctgccaaaacagccagggataggaattatcaggctatccttccaatcaggggtaagattctgaatgtggagaaggccactattgacaaggtactggcaaatgcagagatcaagaccatgatcaatgcttttggctgtggcttttcagaaggctacggaaatgattttgatattacaaagctgcgctatgataagatcgtgatcatggcagatgcggatgtggatggagcacatatttcaaccttgcttcttacgttattttaccgtttcatgccggaactgatctatgaaggacatgtgtatattgccatgcctcctctgtataaggttatgccaaaaaaaggcgaagaggaatatctgtatgatgataaggcattggaaaaatacagacgtacccacaaatccggtacctttaccctgcaaagatacaaaggtcttggtgaaatggatgcccagcagctgtgggaaaccaccctgaatccggaaacaagacggatgaagagggtggagatcgaggatgcaaggcttgcatccagtgtgacagaaatcctgatgggcagtgatgtgcctcccaggaaggcatttatctatgagcatgctacagatgcagaactggacgtatagtcagtgcagagaggatatagaagatggaaacaaagcaggataatataattgctgccgattattcggaagtaatgcagaaatcatatattgattatgccatgagcgtgatcatttccagggcacttcctgatgtaagggatggcttgaagcctgtacaaaggcgtaccctttatgatatgtatgagctggggatccggtatgaccgtccttacagaaaatgcgcccgtattgttggagataccatgggtaaataccatccacacggagacagttccatttatgaggcattggtagtgatggctcaggatttcaaaaagggcaagaccctggtggatggacatggaaacttcggctccattgaaggagatggagctgcagctatgaggtatacggaagccaggctggaaaagcttacccaggaagtattccttgcagaccttgataaggatgtggtggattttcttcctaactttgatgaaacggagaaagaaccggaggtactgcctgtacgtatccctaatcttcttgtaaatggtgcagacggtattgcagtaggtatggctaccagtattccgccccacaacctgggagaagtggtggatgcggttaaagcatatatgaagaataatgagatcagtgttaaggggctgatgcgttatatgaaaggcccggattttcctaccggaggtatcattgtcaataaagatgagcttctgaatatttatgaaacaggaaccgggaagatccgtatccgtggacgagtgcagattgaaaagcaaaaaaacggcagacagctgctggtgatcacagaaatcccgtataccatgctgggagcaaatattggtaaattcctgaatgacgtagctgccctggtagaaacaaaaaagactacagacattcttgacatttccaaccagtcttccaaagaagggatccgtatcgtactggaactgaaaaaggatacggatgtggagaatctgaccaatatgctgtataagaaaaccaggctggaggatacctttggcgttaatatgctggcagtggcagagggcagaccggaaaccttaagccttaagcaggtgattgagtatcatgtggattttctgtttgaggtcactacaaggaaatataccacccttcttgcaaaagagatggacaaaaaagagattcaggaagggctgatcaaggcctgcgatgtgatcgacctgatcattgaaatcctgcgtggaagcaagaaccgggagcaggtgaaaaaatgtctggtggaaggtgttacaaagggaatccgttttaagtcaaaggcaagtgaaacagcagccgggaagctgcatttttctgaaaagcaggcaacggctattctggaaatgcgtctgtatcgtctcattggtctggagatcgaagccctggaagctgagtacaagcagaccatggacaatattgccagatacgaagatattctgaataattatgattctatggcacatgtgatcatggatgatctggatcggatcaagaaggaatatactgtaaaaaggcggacaaccattgaaaatgcccaggaagctgtatatgaagagaaaaaaatggaagagatgcaggtatgcttcctgatggatcgcttcggctatatgaagctggtggatatgaatgtttacgaaagaaataaagaagcagccaacagcgagaataaatatatctttacctgtatgaatacagataagatctgtctgtttacagacggtggacggatgcattccattaaggtggcagacattcccctgggacgattccgggataagggcacacctgcagataatttgagcaattacgaaagtgcaaaggaacagatcatatatgtggcacctatggagcagattcgaaatggctcccttatgtttgtgacagcagcttccatgtgtaagctggtaaaaggcgaagaatttgacgtggcaaaaagaacgatagcttccaccaaattaaacccggaggattacctgatctttgttggtcttgcagatgagatggagcaggtggtatttcagaccagggagggatatttcctaaggttcctgaaacaggaagtctcatccatgaagaaaacagcagttggtgtaagaggcatgaagctgacagagggtgatgctgtggagcacgcttatttgttggaaggccacagggaatataacattacttataaagagaaagagtattccctgaataaggtgaagctggcaaaaagggatacaaaaggggtaaaaccaaggctgtaacacatttattaaggaaaaagcccttgcaattccctaggattggtgctacaatggtaaaagaaactaagaacttgttggcataggagtgggcagacgcccactctttttgctgataaagggacatgttggaaaggcaggtgggaagcatgagcagacgagaagaatatcagcagagggcagaagcacttttgactcctattgtagaagaacagggctttgaattggtagacgtagaatatgtaaaggaagcaggatgctggtatttgcgaggctatattgacaaacccggcgggatcacagtgaatgactgtgaagctgtaagccgtattttcagtgataagctggatgaacaggattttatcgaagacagctatattatggagatcagttctcctgggcttgaccgtccactgaaaaaggaaaaggactttgccaggagccttggaaagctggtagaaatccggacctaccggccaatcgaaaaacagaaagaattttgcggtgttctgaccgcatatgatggtaacagtgtgacaattgacgaagatggacagaaccgagtattcgataggaaagagatcgcactgatccggctggcaattcagttttaaggacttattaggaggaaaagagaaaaatgaacagagagttaatggaggcactggatacgctggaaaaagaaaaaaatatcagcaaagaaactcttttggaagcaattgagcagtctctgatccaggcttgcaagaaccattttggaaaggctgacaacgtgcatgtaagcattgacagggatacctgcgacttcagcgtatatgcagaccggaccgttgttgaatatgtagaggatccggtggaggaagtatccctggaggatgcaagaaagatcaatgcaaatgcagagatcggcgatgtggtaaaggttcagatccattcagataagtttggcaggatcgctacacagaatgctaagaatgtgatccttcagaagatccgtgaggaagaacgtaaagtgctgtatgatcagtattacggcattgagaaagaagtggtaacaggtattgtacagcgggtgatgggcagaaatgtaagcattaaccttggaaaggctgatgcagtccttagcgagaatgagcaggtgaagggggagacattccagcctacagagcatatcaaggtttatatcctggaagtaaaggataccccgaagggaccccgtattcttgtgtccaggacccatccgggcctggtgaaacgtctttttgagtctgaagttgcagaagtaaaagacggtactgtagagatcaagagcattgccagagaggctggatcccgtacaaagatcgctgtatggagcaatgatccggatgtagatcctgtaggagcttgtgtgggtgtgaacggttcccgtgtaggagccatcgtaaatgagcttcgcggagagaagatcgatattatcaactgggatgagaatccggctattctcatcgagaatgcattaagccctgcaaaggtgatcgccgttatggcggatccggatgagaagactgcacttgttgtagtgccggattaccagctttcccttgctattggcaaggaaggacagaatgcccgcctggcagcccgtcttacaggtttcaaaattgatatcaagagtgagacacaggctaaagaatccggagacttctatgactatgatgaggatgaagatgaggagtattacgatgaggacgaatatgaggagcctgtagaagcagaagtacaggattcccaggagcctcagccggaaactgacaaagagccatcttcagaagaaacagaggaagcatgaaaacaaaaggcaagatccctatgcggcagtgtactggctgcagggaaatgaaaaataaaaaagagatgatccgggttttaagaaccggagaaggagagatccttctggatgcaacagggaagaagaatggccgtggtgcgtatctctgtttttccaaggaatgcctggaaaaggccaggaaaaatcatggactggagcgttccctgaaggtatccataccggatgaggtttatgacagcctggaaaaggagttcgacggaattgattcaaaataaagcattatcattgttaggtttggccacaaaggccggaaagacggtaagcggcgaattttccactgaaaaatccgtaaagtccggcaaaggttatgtggttcttgttgccggtgattcatccgataacacaaaaaagaaattccggaatatgtgtgcttattatcaggtgcctttgtttatcctgaaagaagacaaggaaatgctgggaaaagccatgggcaaagaatttcgggccagtgcagcagtgcaggatgagaattttgcaaatgctctcattaagaaactggctgatagtggtgtgtttccggaagaggcataaccaccagctgttacagattccgttttgcaaaagagaaataaagcagttcatctgctttacaggtatttggtaagaaggaggaaggtaaatgaccagaatcagggtacatgagcttgccaaagagctgggaaagcaaaatcgggagattatggaattattaagagctgaagggattgacgtaaaaagccatatgagcaatgtggaggaatcccaggcagctgttatcagaaaaaaaataaaggatctaggaaaggagaaagatacgaaattggagactcctaagacagaagaaaaggtagttacggcgaagacggatgctgaaaaaacagaagcgccgaaaaagaaaaaaaatattatccgcgtatatcatgcacagaatgccagtgatggcggaaaaggaagaaagaaaccgcttggcgagaagcgccagagaccacagggggcacgccctgcacagccaagaagccaggcagtgtcaccggcaaaacctgctgcagcaaagcctgcagagaacgtaaagccggcagaaagtgcaaaaccggttgagactgcaaaaccatctgcagcaccagtacaggcagcaaagccagtggagagcattaaaccggcagaaagtgcaaagccggctgagactgtaaaaccagcagagacagcaaaaccatctgcagcaccggtacaggcagcaaaaccggctgaagcaaaaccggctgagtcaagacagggatctgacagaccgagaaatgaaggcagcagaccacaaggcgcaggcagaggagaaggccgtccagctggaaacagcaacggacagtccggacgaggattccgtgggaatgataaccgtaatggggaaagaagaagctttgaccgtcagggcggcggccgtcctcagagaaacggagatagtacacagcgaaatccaagattcggagaagcaggcggacgcccggcacgttccaatgagggaagaccgtcaagaccaggagattccagaccaggacagcgccagggtgcaggccagggcggacgctttggccagggcagaccacagggggcaggcagaggagaaggccgtccggataatcgtgataacagaggtgaaggaagaggagacggacgtttcagccagggaagaggcggacagcgtcagggtgcaagaagaagcacaggtgcttccgatacagtatttactccagaacttaccaaaggcaccaaggacagcaagcgtgagcgtgacagagaaaataaaaacaaaaagaaagattttgataagacaagtggcggacacagaccaaaccagggtggccggggtatggtatccagactgccaaaggcacttcagaagctggctccccagcagaaacagccggaagagaaaaaacagcctgaagtaaaagaaattaccctgccggagaaaatgaccatccgtgaactggcagaagctatgaagatgcagccatctgtaatcgtgaaaaagcttttcatgcagggacagatggtaactgtaaaccatgagatcgattttgaaaaagcacaggaaatcgccatggaattcgacatcattgcagagcaggaggaaaaggtagatgtgatcggcgagcttctgaaagaagatgaagaagatcagtccactatggttcccagacctccggttgtatgtgtaatgggtcacgttgaccatggtaaaacatctcttcttgatgcgatccgtaagacaaatgttacaagaggcgaggctggcggtatcactcagcatattggtgcttatgtggtagatatcaatggtcagaagatcacattccttgatacaccaggacatgaggcatttacagctatgcgtatgcgtggtgccaatgctacagatattgcagttcttgtagttgcagcagatgatggtgtgatgccacagactgtagaggcgatcagtcatgcgaaggcagcaggagtggagatcattgttgctattaacaagatcgataaaccaagtgccaatattgagcgtgtaaaacaggagctttccgaatatgaactgatccctgaggactggggcggaagcacagcctttgtacctgtttcagcaaaaacaggggagggtattgaggatctgcttgagatgatccttcttactgcagaggtttccgaactgaaagccaatcctaaccgtgcggcaagaggtcttgtgatcgaggcacagttggataaaggtaaaggacctgttgctaccattcttgtacagaagggtactctccatgtgggagactttattgcggcaggtgcctgcagtggtaaggttcgtgcaatgatggatgacaagggacgccgggtaaaagaagccggaccatccacacctgtggagatcctgggtcttggtgatgtgccaaacgcaggagaggtgctgatgtcctttgagaatgataaagacgccaagaattttgcagcagcctttgtatctgagaataaaaaccgtctgctggaagaaacgaaaggcaagctttctcttgacaatctgtttgaccagatccaggcaagtgacctgaaagaactgccgatcatcgtgaaggcagatgtacagggatctgtggaagcggtaaaacagagtcttgtaaagctttctaaccaggaagttgtagtaagagtgatccatggtggtgttggtgctatcaatgaatctgacgtaagtctggcagctacctctaatgcgatcatcattggctttaatgtacgtcctgatactactgcaaagcagctggctgagcaggaaggggtagatctgcgtctgtacaaagtgatctatcaggcaatcgaggatgtggaagcagctatgaagggtatgctggatccgatctacgaagagaaggtgatcggccatgcagaggttcgtcagctgttcaaggcttccggtatcggtacgatcgcaggaagttacgttctggacggtatgttccagagaaactgcaaagtacgtattaccagaggtgaggagcagatctatgaaggcgagctttcatccctgaagagatttaaagacgatgtgaaagaagttaaggcaggctacgaatgtggtcttgtatttaatgatttcaatgacgtaaaagaagaagataagattgaagcgtatatcatggtagaagtgccaagatagaacatccgggcaagcgtcaggataggagataattatgaggaaaaacagcattaagaataccaggataaacggtgaagtgcagaaagaattaagcaagatcatccgtgaagagatcaaggatccacgtattcatccaatgacatctgtcatggcagtggaagtagcgcctgacctgaaaacatgtaaggcatttatcagtgtcctgggtaacgaggaagcaaagcagtccacgatcaagggtctgaagaatgcagaaggatatatccgccgggagcttgcaaggacattgaatctgcggaatacaccggagatccgttttattctggatgagtccattgaatatggcgtgaatatgtcaaagctgatcgatgacgtaatgatgaaggatgcaaaaacatcacagcctgaccaggaagagaaatcaggagacggaagggaagagtgacgaggtaagatatggagaggattgaagagatactgaatggcgttaagacattgggaatcggaggtcatgtccggccggatggagactgtgtaggctcctgtatggcattatatctgtacatcagaaaatattttccgcagatcaaagcggacatttatctggaaagcccaaagccggtttttcattatatcagtcacattgaagatattaagacagaagcagacggggacagacagtatgacctttttgttacctgtgatgtaagctcaagagacaggctggcagttgccggggaatattttgaacatgcaaagaaaactgcctgcgtggatcatcatgtaagcaatcttggctttgcagatgtgaatcatgtggagggagaagtcagttcagcctgcgaagtgctttacgggcttctcgatcctgaaaaagtggataaggacattgcaactgctatttatacagggatcgttcatgatacaggcgtgttccagtattcttccaccacaccaaaaacgatgcggatcgctgccacgctgatggaaacaggatttaatttcagcaagatcattgatgaatctttttatcagaaaacctacctgcagaatcaggtaatgggtcgtattttggcagaaagcattatgctgctggatggaagatgcattgtaggctgcatgaaaaaaagagacatggatttttacggtgtggaaggcaaggatctggatggagttgtaagccagctccgccttacccagggcgtagaggtagccatgttcctgtatgaagtagaaagccaggtgtttaaggtttctctccgatctaatggcaaagtggatgtaagtgcgattgccgtttatttcggaggaggcggacatatgcgagcagcaggctgtgatatggcaggttctgtatatgatgtgatcaataacatatccgaacagattgaaaaacagctgttgggacaggacaaataatggacggaatcattgtaatcagaaaagaaaaaggatatacctcccatgatgtggtagctaagcttcgtgggatcctatccatgaaaaaaatcggacatacaggtaccctggatccggaggcagaaggtgtgcttccagttgctcttggcaagggtacccgtctggtggatatgcttacagacaaagaaaagacttatgaagcggtacttcgcctgggagtggtaacagatacccaggacatgaccggtacggttcttgaagagcatcctgtacatgtaaccgaagagcagatccaagatacagtaaatggcttccttggagagcagatgcaggttccacctatgtattctgcactgaaggtaaatggtaaaaagctgtatgaactggcaagagaaggtaagacggtagagcgtaaggccaggcctgtatttttctacggtatagagatccagaagattgccctgccgcttataaagcttacagtcacctgtagcaaggggacatatatacgtaccctgtgcaatgatattggagaggcattaggctgcggaggctgtatggaaagccttgtaaggacaaaggtgggacgatatacgctggaagaagcctatacgctggcacaggtggaagagataagagatcagggaaagatatcccatcttgtgattcctgtggaacaggtccttggtgagtatcccagactgatgtgtacccaggctggtgacaggcttcttcaaaatggaaatcccctgatccaggagctggtaaatgaaaatgttaaagaaggctgggtccgtatgtatggcagcacagggaattttgcagggatctatcagtgggatcaagggaaacaaaggtatttccctgtaaaaatgtttatttgaatgagtgatatttttacaagtattggacatgaattgaattaaggagcagatgatggaatatctgaagataaacggggaatttccaaggcttgcaccttgcggtgtgaccctgggaaagttcgacgggatccacagaggccatatgcgtctggtggaaaaggtactggaatacaagaatatgacaggctctaaggcagtgctttttgccattgatgtaaatgaaaagatgatcctttcccgtaaggaaagggctgatttccttgaaaaagcaggtatagatgttttggtggagtgtcctttgactgacagctttaagcatcagaaggctgagaattttataaaagagattttgcttggagatttgcatgccggttttgtagcagtaggagaagattatcggtttggatacggcaggaaaggtactccccagcttttgaaaagttttggtgcaaaatacggtttccatgctgaagttatctcaaaagagatggatggcaaacgaaaggtaagcagtacgtttatacgggaagaactgaaaaagggaaaaatggaaaaagtagaggatctgctgggcagaccctattttcttgccggagagattttgcatgggcgaggccttggacacagaatgcttcttccaacaacaaatatgattcctgatccggataagctgatgcctccaaacggtgtttatgtaaccgtttctcattttgaaaaccaggtatatgggggaatcaccaatattgggtgtaagcctacagtgggaggagaatcctttatcggcgttgagacctacctgtttgactgcagccaggatctatatggaaagccctgtaaggtagaatttctgcattatctgaggccggaacataaattcccatcccttgaggctttgaagacccagcttttaaaagatgcacaacagggaaaagatttcatggacaaaaaccaaaatatcatatatagttaatgatgtagctactgtaaagaaacagtaaaaaaagtgtaaaatacaagggagataattgagcaatggcagagattattcttggacttatgggagggcttgggctcttcttatatggtatgaggttgatgagcgacagcttggaacaggcggctggagccaggatgagagcgattcttgagttctttacaaagaccccattacgtgggatccttgtaggtactctttttacagcagtgatccagtcatccagtgcctgtacagttatggtggtcagctttgtaaactcagggttgatggatctgtaccaggccgcaggcgtgatcatgggagctaatattggtactacagtcacgtcacagctgatttcatttaacctttccgcactggcacctgccattgttatggctggtatcatactggtaatgatttccaagaaggtgaaagtccagagagtgggcgaggtacttcttggctttggtatcctgtttatgggactgaatacaatgtccagttccatggcagttttgagggaatcccctcaggtagttgagatcatgggatctcttaacggtcattttgcagcattgatcgtaggtcttgtggttacagcagtccttcagagctcttcagctacggttggtattgtgctcctccttgcaaatcaggggctgctggatatgaggatctgtttcttcattatccttggatgtaatattggagcctgtgtatctgcacttcttgccggtctgaatggcaagcgtgatgcaaagagagcggcaatgatccatctgctgtttaatattttgggtacgatcatcatgtatgtggccctgactgttgcactggaaccgatcacacactttattgaatttgtttccggaagcaatccgggccgtgaggtggcaaatgcccacacattgatcaagatcgtggaggtattgatccttgcaccgtttatcaagcagatcgtaaagatgaccggctgggttgtaagaggaaaggaagagacggaagaagaaggcttccatcttcagtatattggcgaaaaatcagtttattctcctacaactgctgtattcgatgcgatccgggagatggagcgaatgggacatatggccatttccaatctggagcgtgccatgaatgcactggttacgctggatgagcaggagatcgaacaggtatatcaggtggagaggcagatcgattatttgaatcatgagatcaccagttatcttgtaaaggtaaatggtactactcttccggcagatgacgcaaagagcattggcggtttgttccatgtggtgaatgatattgagcgtatcggggatcatgcggagaatattgcagacgcagcagtagcccggttgaagcagaatatcggcttcagcgaatctgccaagcgtgagttgtccagcatgctggacatggtgatcaagattaccacatatgcgctggatatgttctcaagcaataatcaggaacatatgcaggagatcctggatctggaagatcatgtagatgaaacagaaagggaactgcaggagtcacacatccagcgtcttaccagaggcgaatgtacagccagcgcaggtatgatgttctctgatattatatccggtttggagagagtatctgaccatgctaccaacattgctttttcccttttggacgacgatcctattgagcagcagaaagaggagcgtgcaaaagctgctggaagataaagctgtatatggtaacaattaaactgggaaagcagctgaatagttttataaaaacaactgaaaagttctatggaaaaaggtttacagaaaaaggcggatatgctatactgtcttttgtgtgggtacagcccatattcagaggttggaaactccgaccgtctcttaatatgcggcgtttacctgcaggcttacggtaaggatttgccggagcatctataatattattttaaggaggaaatcaaagatgatttcaaaagaaaagaaagcagcgatcatgaaagagtatgcaagaagcgaaggtgatacaggttcaccggaggttcaggtagctatccttacagcaaggatccaggagcttaccgagcatcttcagagcaaccacaaagaccatcattcaagaagaggtcttctgaaaatggttggacagagacgtggtctgttagcttacttaaagaaaacagatatcgcaagataccgtgcactgattgaaaaattaggtttaagaaagtaattagtatgcggaagggacggatttccatccgtccctgttttatgttaaggcagcagaagttattccgagactactgaaaagcccagttgctttggcaggcaaatggttttttcagttgtttcgggcttctgtgtcagatcaaagaaaataagagaattgaaaaggagaaaaaagatgtacaaaagttattccatggaattagctggaagaacgcttactgtagacatcggacgtgttgcaaagcaggcaaacggtgcagccctgatgcattatggcgataccactgtactggcaacagctacagcatcaaaggagccaagagagggaattgactttttccctttaagtgtagaatatgaagagaagatgtacgccgttgggaagatcccgggcggattcaacaagagagagggaaaggccagtgagcatgcgatccttacttcccgtgtgattgaccgtccaatgcgtcctctgtttcctaaggattatagaaatgatgttacattggtagatatggttatgtctgttgatccggagtgcaatcctgagatccctgcaatgctgggttcctccattgctacctgtatttccgatattccatttgacggtccatgtgcaaccacacaggttggcctgattgatggagagtttattatcaatcctactcttgcacagaaggatatgtctgaccttcagctgacagttgcttccacaagagacaaggtgatcatgatcgaggccggagccaatgaggttcccgaggcaaagatgatcgaagccatctacaaggcacatgaagtcaatcaggagatcatcaaattcatcgataagatcgtagcagagtgtggtaaagaaaagcatacgtatcagtcctgtgcagttccggaagagctttttgcagccatcaaagagatcgttcctccagaagaaatggaagtggcagtattctctgatgacaagcagacaagagagaacaatgtggcacaggttactgagaagctgaaagaagcttttgcagataaagaagaatggctggctgtacttggtgaggctgtataccagtatcagaagaagactgtacgtaagatgatcctgaaggaccacaagcgtccggatggacgtgccatcaagcagatccgtcctctggctgcagaagtggatattatccccagagttcatggttctgccatgtttacaagaggacagacacagatctgtacagtgactactttggcaccgcttgccgaggcacagagactggacggactggatgagtttgaaacatccaagagatatatgcatcactacaacttcccatcctactctgtaggcgagacaaagccgtccagaggaccgggacgtcgtgagattggtcatggagcactggcagagagagctcttgtaccagtacttccaagtgaagaagagttcccatatgcaatccgtacagtgtctgagacttttgagtccaatggttctacttctcaggcaagtatctgtgcatctaccatgtctctggaagcagccggagtaccaatcaagaaaccggttgcaggtatttcctgcggtcttgttaccggagatacagatgatgattacatcgttctgaccgatatccagggtcttgaggatttctttggtgatatggactttaaggtagcaggtacccatgatggtatcacagctatccagatggatattaagatccatggtcttaccagacaaatcgtagaggaagcaattgcacgtaccaaagaggcaagagagtacatccttacagaagtgatcgagaaatgtatcccaggtccacgtccaagcgttggtgcttatgcacctaagatcatccagatccagatcgatccgcagaagattggtgatgtagttggacagcgtggaaagaccatcaatacgattattgagcgtacaggtgttaagatcgatattacagacgaaggcgcagtttccatttgtggtgttgatgccaagagtatggaagaagccaagaaaatgattgagatcattgctacagattttgaacagggtcagatctttaccggccgtgtgatcagtattaaggagtttggtgcatttgttgagtttgcaccaggcaaagagggtatggttcatatttccaagatctgcaaggagcgcatcaaccgggtagaggatgtacttacacttggagataaggtgacagtgatctgccttggaaaagacaagatgggaagaatgagcttcagcatcaaggatgttccggcagaagcaagaaaataaattccattattacaataagagcaaagggctgctgcaggattgatgtggcagctctttttacaggagttagaattatgagaagaatcggaaaattccataaagtaagctttgaaagatttgccggtgactggaaggattcatttccggaaatgaaagaggaagaagtaaaggctgtatatgagaatctttctcttcccagaagagccactgcaggaagtgccgggtatgatttttttgcaccggtaagttataccattaagcctggtgaaactgtgaagatccctactgggatccgtgtggaaatggaacaggactgggtattgaaatgttatccaagaagcggtcttggatttaaatacaggctgcagctgaataatacagtagggatcattgacagtgattatttctattctgataatgagggacatatttttgcaaagctgaccaatgattcaaaggaagggaaaattgtggagattgctgcaggcacaggcttcatgcagggaatctttgtagaatacggtattacagtagatgatgatgtaacagatgtgcgaaatggcgggtttggaagtaccacaggaaaataaggaaaacctggcagacaaaaaagaggccggagcccctggaagattattccaggggagctccggcttcttctgcatcccgtgcattctgaaggacaacatcaaaagcaacggctgctttattgtattcttcatcatcttcaatatttgccagcattggatcgccggattctgtgcgggtgaaggagtaaagatatacctctccatcagtattctgaccgttctcatccagaggaagaagtgcaatgtattcttttgcatctaccgggaagatggtcaggatggcacattctacttctgtatcatcctccatggtgagagtgatggtacggtgggaagaaatgtcactgccgccacagccgcctgcacaggaagcgcagtcgctggggctgcaggaagtactgccactgcagccaaattctgtatcgctcataaaaatgaacctcgcttttctttaatatgatacctgtggatcgctttatactttgcaaacccacaggtatcattatactaacagatatgtaaccagattgcaatgactggtattgtttatttacttaatgtatgactggtattgtgtatatttactcaatatatcactggtattccttatttgcttaacgccctggaagaggaacgggagtaaagcaatttcaggaaaataggtgtgatcacggaagataccaggatcagcaggatcacagctgtgaaatacttggactcgatcataccaacctgaaggcccttttgagcaacgatcagggcaacctctccacgagtcatcatgcctattccgattttgatagaatcttcgccgctaaaaccaagtatcttggacatcagtccacagcctataatcttggtgatcagtcctattgccacaaaaagtacacagaaaagaagaagagcaggtgtcagctgatcaatgtttgttttcaatccaatgctggcaaagaaaacaggagcaaataccatgtatgaacttacatctgccttgcgggcaatgtattctgcatcatcaatgctgcacaggataatacctgccacataagcaccggtaatatcagcgatgccgaaatatttttctgcaatataggccatggcaaaggcaagtacaaagccgaaaataggaagtctccttgtatgaggataacgcttgtccagccactggaagaacttgcagatcagaacacccaggatgaagaagatcaggaaaaacagcacagtggaaatgatcaccttggaaggcttggaattaggatctttcataccaattacaaaggtcagtacaatgatcccgatcacatcgtcaataatcgcagcactcataatggttgttccggtttctgttttaagatagcccagttcctttaaggtggcaaccgtaatacttacagaggtggctgtcaggatcactccggtaaagat

SEQ ID NO: 109 - DNA, 4942 bp, Unknown
  gut microbiota DNA sequence
gggatgaaaataatctgattcaggttgagaattgaaatgatagattgaagagtcatgggaggaagagatatgtattgtacaagatgtggaagaaagctggaagaaggggaggtatgcacctgcacacaggatcaaaagaataagaaggtacaggagaaggctcccacacagccatctaacgagaatcagaaggcagtggaaacggcgcaggagcagccgtcaaaacaggcagaatggttacaggagagtggtacacaggcacttaagtgtatcaaagaatttcttggaaaagtgttacagatcctgaagaaacctgtttcagaaacagaaaggcttgcagctgaaaatacgaaaacaacaggcatgcaatttattttggtaaaagcagcgatcgtattgatccttgtgttagtgactgcagcaggaatcagaaaagaatacggcggtatgatcgaagtaccatatgccagcgtgttgatccttacattgctaactaccattggatacgactgtatggaagcacattttatgaatttttttggcagggcatttggcggtattacgtctgtgaataacatgtactgcgtagttggtgttcgggcagtatttgattttgtactgatagtggttactgcaattttatctgttttttcagacagtctggcagtatgtgtttatcttgggattatgatgctgatcccctttgttcagtttgcttcgttcagggctgccattaatgcagatgaaaataaaaaggtgtatgccttttttgtatctaagctctgcagtattctgatcataggaattttagtatatctgattggcaaagatacggtaaatgatatgatgagtacgttatcatccgggttttacagtgctttttaagaaagaaaaaacgtacatataatcccagcataaggaatacagctgtaataagaatgatcggggctggagtatgtatgaaagattctgaacatgatcatgaatatgactgtgtggaaatgctgtcggagtccgggataaagctatacttggaatttccgaaacaagcagaggcgaacgatataaaggtcctgcaggaagcaagggaaatcctttcgggaatgctgaaagaaagcctgacccggtcaaaaggcggtttattgcatgaagaaagtgcggatcctgttaagagtaagctctaatcagcagctggaggcagacggagatttaagtgtgcaaaggcagcttgtgaccgaatacatacagcagcatcaggactggaagctggatgcaaaggagtattttgagggaagcagcagcggttatcaaaatactgttactgaccgggatgtgctacaggaagcactggaggacgcacgaaagaaagaatatgatattctggttgcgtacaaggacgaccggataggacgccgtatgtgggagatcggtgcttatgtgatgtcactgaaaaaatacggcgtagatatttatactgtgaaggacaattgcatctcaccggaatcagacgatattatggggcaaatggtgctggcacttcgttacgggaatgcacagaaaagcagttcggataccggcatgcgggtaaaagatactgcaaaaaagctggtacaacaggggaaatttatgggcggcaaagcaccctatggatacaaactggaactgtccggagagatcagcaaacatggtcgggcgctgaagcaccttgtgatctggcaggaacagtgtgaggtggttcgatttatctatgaacaggccttacataaggaatatggctctgtaaaaatcgccaaaatcctgaacagccatgaaaagtataagcacatggctcccaatgatgtgtggaaagccggaaccatcaccagtatcctgaccaatcccatatatgccgggtatacagcatacaacagaagaaccaggattgatggaaaataccacaagatcggtagtgagaactggatccttgcggctgcgcctgatcctggtatttctattgttgatgcagatgcatggaaccgggttcagtatatgcgaaaagaaagagcggacagaattgctaaaactgaagaccagcagaaacggaattttgtggtgatccggaatcatctgggtactttagcccttattgatgttctgtattgcagctgctgtgggtgtaaaatgaccaatggcacccgatataattattggaaaataaagggcaccaaagaacagagatccagtaagaccagagtttataaatgtcagaacaaggataggggaatacctcatccgggaacaggggcatacagggcagataagattgaattaattgtttttgagatcatttctgaatatgtagaaaagcttcagaaaaacaaagatgtggccgaagaaattaaactttataagcagttcgaaaagaagacattaatagcagtattggaaaaagaacgtcaggcgctggacaggatcaagaaaagaattaatgtgatggaagatcagattccacaggctatgaccggggaatatccattgtccttagaggaacttgttcctctgatagataagcagaaacaggcgtgttcccgacagcagaaaataattaaggaaaaagaaatgatactggaaagcatggacagacccgattctgaatggaagctttccacggaaaatgttcctacatggaagcaggtatttatgggtgcagatccccataccaaaaggattctgatcaataaactggtagaaaaaatccacataaaggagaatcaggttacaatacagcttcgtgtcccgttggagaaatttaacataaatgaatagtatatagaatatttgaggggcgcttttaccccctcaaatcctgaatgactatataacaggtggtaccggaataaaggctatgattttaccattacgtcatccacagcctatgatcataaatggattcggggaaggaatatttttgattccattgaacggatcgtggatgaactttttgaaaactatctttccaggccaaatgtgcgtcagccgatcctgacccagtattgtgatggccggaaggtagagtgccagagccgtgggtggatgacacagtgggggagcaaagctctgggtgacagaggatattctgctatagaaatcctcagatatttttatgggaatgatatgtatatcaatgtagccgaggaaatctcaggagttcctgcctcgtggccagggtacgatctggatattggtgcgtccggaagtaaggtgctgcagatccaggaacagttaaatgctatcagtcaggcatatcctgcacttccaagggtaaatgaggacggaatctatggaccgcttacaaaggcttctgtgcggaaatttcagaacattttcggacttccggaaactgggatcgtggactacagtacctggtacaaaatccaggaaatctatgtaggtgtcacccggatcgcagagcttcagtaaacagaaaatctgctgggatgtacaaataaaagaatgaatcaataatatgtgcgtttactatgtttatttgtaaaaaacggtggtacaatatacgcaaacataaaaaggatatgagagtacaaatgaagaaaaaactgagaaacggattattgatatttttattccttttgcttattccgcaaatggtgtgggccggagatatgcaggtgcattttctggatgtaggtcagggtctgtccatattggtacagtcagaaggagagaatcttctttatgatggaggtggcagggatgcttccagttatgtggtttcctatctgcaaaatcagggcgtgcagcagttggattatatgattgcatctcattatgatgcagatcacattagcggtctggtgggctgccttagcagttttccggtagagaatctggtaggaccggattatgtgcatgattcccagctgtatacctcttttatgaataaggcaaaacagatgggattaaagatgcagcatccatctgttggggatgtgtatccggttggcagtgggacttttactgtgttggcaccgcaaaatgccagtgatcaggatagtaataacagctctgttgtgatccggctggataatggagaagacagctttttatttaccggagatgcggagcatggcagtgaggaacagatggtatcagccgggcttgacctggaatgcacagtactgcaggtaggccatcacggttcagccagttccacaagctgggatcttcttcaggcagcagtgcctgaatatgcagtagtcagctgcggcagtgggaacagttacggacatccggatgcagataccatggaaaaactgcagtccatggggatccaggtattgcgtacggataaacaggggacagtgacagcgtactccggagggaacgggatcacctgggatgttcctccttgcgatgattacacacctgggaatccggacgataccggcacaatggcaggcgatgcaggtgttggtgcatatgcgtacacacagggagaaaccgaaaacagccagagcactgatgcagatacacaggatctgggggatgggaactctgatcaggatacaaatgcagagcagcaggtctggatctctgcaactggaagcaagtatcacagcagaccagactgtgggaacatgaatccttccaaggcagtggaaatgccggtggatcaggcggtggcacagggatatgaggcctgcaaaaaatgctggtgacagccgccgggtgtgaaagcagataaatctttggatgaatagaaaaatctggaaaaatagataaaaagaaattctaaaagtagacaaaaagaaattctaaaaatgtcttgacttctaaaaaataatttgctataattctatctgttgcgagggcgaaagacaaaaagcccatgaaatgcagcatgcggaagtgtcggaactggcagacgagcaagactaaggatctt

SEQ ID NO: 110 - DNA, 7458 bp, Unknown
  gut microbiota DNA sequence
ctatatcagctgggggattgactcccagctgatatactttgttccctccatatctgccgatccaggaggtttttttatgggtaaactggaatcaaataagaaaaaaaagaaaaacgcattgtataccacagcttttgatcttttcaccacaaaaggaattgcaaagactacgatttcagatatcgtagaaagcgctggtgttgcaaaaggtaccttctatctttattttaaagataaatatgatatccgcaacaaactgatctctcacaaaaccggagagcttttttacgatgcacatgaagcacttcttcaagcacaccttacagattttaatgaccagattcattttattgtagattatatccttacacagcttgaaaaggatcataaccttcttgttttcatttccaaaaatctggcatggggaatttttaaaggagcctttgaagaaaaagtaacaactgaaacagacgaggactattatttttatcagtcttttcttgatctgcttgcgttaagcggcaggacttttcgctctccggagcttgtcctctttacgattattgaactagtaggctctacctgctatagctgtatcctgtattctcagccagttactctggaggaatacaaaccatatcttcatgcttcaattgatgcccttcttaatactttttcagaaaaaggagatgtctgtccatgaacgaaatcataaatgctctttattcccggaaatctgtcagggtatttacagatcagccagtttcccaacaggaaaaagagctgatcttaaatgcagctctgcaggctccctctgcaggttgccagcttttgtacaccatcctggatatcacagatcaagcaaaaaaagaacggctttcctttctttgcgatcatcagacttttattgccaatgcacctattgttctgattttttgtgcagattgccgcaaatggctgtctttctatagagaagccggacttatcccaagagatccaggacctggagatcttttcctttctattgaggatgcgctcattgctgctcaaaatacagtaactgctgcccaaagcctgggccttggctcctgttatattggtgatattatggaaaatgctgaggatgtaaaagccctgcttaacatcccagaatatgtatatcctgcatgcatgcttgttcttggttatccaactgcacagcagcagaccaggccaaagcctgatcgtttttctctttcccatatggtgtgtgaaaacggatatcaggataaaacaagtgaagaaattcaggatatgttcactggtcataccggtgccaaaaattatcaggactggatgtctgctttttgcacacgtaaatatgaatccgatttttccagggaaatgaaccgttctgctaaaatttacctgaaagattttatggatcagtctttgaaagaaagcaattaaaattattaatcatattcatctcatcatattcatcagcaatcagccaatgcagctgtgccagaagaagctgttcactatcatcttttttcgttccatatctgtctttcctgaagtatgaccattctgttgcttaataaccatttttcatgttttctcataagctatatggtaaccgttgttattattcagaaaggacatctatatggaacgaaattcttctatgcgtccctgctgtcgtccctaccagcgaacctgcggaatgatgaaccagacgcctatgcccattcactcagatgattccaacaataatttctgttcaaatacaccttcattcaaaaaatcctgccctatgcccaaaccttcagaaaatatttctgaaatgtttcagcatcttcaacatcttccagttacaatggcttatgttcctgatcaacaaatgtcttctgtttatgaaccagggtatgctttacaagcaggtaccattttcccacagctttgcaaaccattttgtggaaagagaggtggctgcagatgaactgttctaaaaatcaggccagatccaggcttttaaaccaaattaacgaaaacagttttactgtaaatgatattcttctttatctggatacccatcctcatgaccagaaagctctttcttattaccaagaggcagtttcatgtcgtaaaaatttaatggcagaatatgctcggacctacggccccctcacagtagatgatgcttctatggacaccagcactgtctggaactggatggatcagccattcccatgggaaaaggaaggagtgtgagcaagtatgtggaattatgaaaaaagactacagtaccctgtaaacattaccacaccaaatgccaaggctgcacagtatatcatgagtcaatatggtggcccggatggagaaattggcgcatcacttagatatttgtcccagcgctttacaatgccaaatcgaatggcaacagccgttttaaacgacattggaactgaagaactggcccatttagaaatggtctccaccatcgttcatcagctcactcgagatcttactatggaagaaatcgaaaagtgcggtttaggagcatattatattgatcataccgtaggtatatggcctcaagcagctggcggaatcccttttaatgcttgcgaatttcaaagtaaaggagatcctatcaccgatctttttgaagaccttgcagcagaacaaaaagcacgcgccacatatgacaacattcttcgcgttgtaggtaacacgccggaaatcgcaaacccgattcggtttcttcgtgcaagagaagtagtgcattttcagcgttttggtgaagcacttcgttccattcaagaaaatctggatgcaaaaaatttctatgcatttaatccaagctttgacaacccttgtactgcttcatgtaaggaatgcaattcataaatcaggatactccgttatatcttattcttattttaaacagcatcgcacctgcggtgctgtttgctttgatgcactcattctcaaaattatattcaagaatgcctcggcattcttgctgcgaggtgcgcgtcatgcaattgcatgacatatttctcctgcgcacctctgcaatcctgccggaggctatatcagctgggggattgactccctccactgataccagcttgttgctcaccacctatagaggtgggagtcatctcccagctgatatactgttatatactacccgacttataaaaatacggtttcaaaaccacagcaacagtgatataataaagtgggtattttcaaaatatcatattacatgatacaaatatggaggaattatgcaaatcattattgttggatgcggcaaagtaggacgcacccttgctgaacaattacaagaagaagatacagacctaacactgatcgatatttctgctgacaagatcaactcaatatctgatgatattgatgcattgtatgtgattggtaatggagccagcattaataccctggtggaagcaggtattgaaacagccgatcttcttatcgctgttacggcttctgatgaactgaatcttctttgttgcctgattgcccagaaaaccggacattgccacaccattgcccgtgtacgtaatcctatctacagtgatgagatcagtttcattaaagagcgtctcggtgttaccatgatcattaatccggaattagctgcagcccaagaaatctacagactgctgcgctttccttcagccatcaagattgatacctttgcacgtggccgcgtagaacttctgaaattcaaagtccttccagaatttgggctggatggaatgcagatttcacgttttgctgatacatttcgctgtgatatcctgatatgtgctattgaaagccgctcaggcatggccattcccggaggtaatcatgtgattcatgatggagacatggtatccatactggcaactcctcaaaatgcagccatgtttttcaaaaagattggtttaaaaacacatcaggtaaaaaatactatcattgtaggtggtggcacaatttcctattatttggctaaagcactactttctatgaaaatcaatgtaaaaattattgagcagaacaaagaacgttgtgaagtactcagtgaccttttacccaatgccacgatcattaatggcgacgggacatcaaagccacttcttatgtcagaaggacttgctgatgtggaatcctttgtagcacttaccaattttgatgaagaaaatgtatttctgtctctttttgctaaaagtatttctgatgggaagcttgtagcaaaagtaaaccgtctggcatttgatgatgtaatagattccctggaaatcggcagtgtgatctaccccaaatatatcacagctgatcatattctacagtatgttcgtgctatgcgaaattccattggcagtaatgtagaaactctttatcatattctggatggtaaagccgaagccctggaatttgtgatccgtgaaaattgtcctgttttaggtaagactctgtctgaactgaatcttaaaaagaatcttcttgtaggctgtcttcatcgaaacggcatggttcgtattccaagaggtcaagatacgatccagattggtgatactgtaatcattgtaacaactaataaaggtctctgcgatatcagtgacatcctggatcggtaaaggagtacagctgttatgaattattcaatcattgtttacattatcggttctattctgaagctggaggccgtttttatgctgcttccctgcatcacagcactgatctatcaagagcagtccggatttgcatttttgattacaatggtcatctgtctgatcattggtttcttgcttactatgaaaaagacaggaaataaagtgttccatgcaaaagaaggatttgttacagtagctctaagctggctgattcttagtattgcaggtgccgctccctttgttataagtggaagcattccagatcctgtagatgcattgtttgaaacagtttccggttttacaacaacaggatccagcattctttctgatgtggaagctttatcccattgtatgcttttctggagaagttttacacactggattggtggcatgggtgtacttgtattcatattatgcctgctccctttaaccggaggatatcatatgaacctaatgaaagcggaaagccctggtccttccgtaagccgtctggttcctaaagtacagtctactgccaaaatcctttatactatttaccttggcatgacactgttacagattcttcttttactgattggtaaaatgccattatttgataccttatgtattacctttggggctgcaggtacaggaggttttggcataaaaaacagcagtatagctggctatagtacttacatccaggtgattgttaccattttcatgatcctgtttggtattaactttaatgtgtatttcttactccttacacgcaaatttacacaggctttcaaaaacgaagaagtaagatattatctagggatcattgtattttctactattataattgccctgaacacaaaacatctgtttcagaacataggcactgcatttcagcagtcagctttccaggtgagttcaattatgaccacaaccggatatggcactactgatttcaatcagtggcctgccctgtcgaaaaccattttgattttacttatgtttatcggcgcctgtgctggaagtaccggtggtggcttcaaggtatcccgacttatcatattgtgtaaaactgcacgtaaagaattgaccctttgtctacatcccaatgcagtcaaaaaggtcaaaatggacggaaaagtaatccctcatgaagtagtacgaactaccaatatttttcttttcgtctatgtgttaattttgggattatctgttttgctgatcagtatagataatcttgatctgattacgaattttactgcggtggcagcaacctttaataatatcggtccaggcctggaaatagttggtccaacgcagaactttggattgttttcccatttttccaaatgtgtacttatttttgatatgttagcaggaagacttgagattttccctcttcttattctctttaaaaaagatacctggaaaaaattctgattagcttgtactacgtgcagaaatctaccaaatgacaatactcagaaagaatgactacgatggtgatgtgataaaaaaattttttcatggttttaaaaaattctaattattcatattttgttcatattagtgtcattatatagacatatctttaatgtatattgatattcgtagaaagcattatgtctttcttaatttaatatttttctttttcatacgcgccggtacgaaagtaccggcctccttccatttataagatctttttttattataccccttcataatcaaaatctggaataaagctttcttttgctgtatcaccttcctgaaagaatccattacttattcccaattccaacgcagcatttaatactttttcatattctcttacagttacttttcgattcaactctttatatttttcctgtttgaacacgggtgtatattgattcataatactgataaatatatgatctccatatgtttttttcagatactccatcacttttatggcattttttgtatgccctggcaatattaaatgcctgaccattgtaccccggatcatatacccctctctgtcaaacacgcagtcaccagtctgtctgaccatctcttttaatgccagcttagctgttgttggatattctggtgcattggaataatctgctgcaagttcttcctctgcatacttaaagtccggcagatatacatccacatacccttccagacttcttattgtagaaatactttcatatccgctggaattatatactactggcaaatgaaatcccttatccctggctttttccaatgcctctatgacctgcggaacatattgcgtggctgttacaagattgatatttgctgcacctttttgttccagttccagaaaaatatcagctaaacgatttactgtaattatttttccactttttccaatagcaatgttatgattctggcaaaaacaacatcgcagtccgcaacctgtgaaaaatactgctccagaacctttctttcctgaaatacaaggctcttcccacatatgcaaagcagccctggccactctcacttgaccatccatcccacaatatccggttttcccatgtatacgatccacgccacacttccttgggcataacctgcatgacgtcaatgttttgattctgtcttctaccatattttcctctttctttattaaacagaagtaacaggtgagggtactaaacaattacaaactaactaatttttatatacaaaaaaagcaatgaaccaagtccactgctcaaatgcttttgtaccttcaaaaccacatacatgctgacatcctttggaatcgtgaaatcctgctttttggtcaagc

SEQ ID NO: 111 - DNA, 13428 bp, Unknown
  gut microbiota DNA sequence
acaaaggacttacggattatttttattttccatatttacgggcggatgatcgaaccggctttttccattgtttcaacaatttcgtacatgttagtaacagtaccgatctgcagctgttccttcaaattatagaaatcaagacaggtgccgcaggtcataatctttacaccctgtgcctctaaggtgttcagatcttccagggaatcagatccggtacaggtaagataagccccggaattgtaacataaaatggtttccggaagtatgtcctgttttgtaagggcaaaaataaaagctttcattaaggcctttccaagcttttcatcaccagttcccatagtgttgccagaaagaactaccacagttccctgtctacgggcatccggattgcaaacagaagcttctgaggagattggtgaacacgctgtcacttccatagtcacagaataatttgtttcgttttctttgcaggaaacggcttcaaatccacggctggcagcaaatttaagcagattctgtacagcgatctcattatctacaagaatggttagagaaccaccttgctgcatttcctcagatttttttttggcatttacaactggaagagggcatgccatacctcttgcatcaaaagtaattttttccatttttttactcctttatgttataaatcatccgcatatgatcaaatgtatgcggtttttgaccttgataactgatgcttgaatgtcaagcggatattcgcaatccgcttcgctacttgctcataaccgaataactgctccgcagtttatcagaaggagcttgcactcctcctgatacaagcaagtccccacccactgcttattgcttttcgcaattgaagcaggggacttacttgattcggttaaatcatgcattgatagataccttccggctgaacctggatatagtcaagcagcgtctgtatgtccttttcattattaacatttgtactccaggccagtccgcagctggcagaaatcatcctgggcaccgggatcagaccaccggagatctgattttctttacaggactgttccagaagtagtgcatccgttgtagaagaaaaggtgattaccagacgcaatttcctggagatcatgacggttgctcctgactgcttataatcttctgggggcatagagtaccctgtaccactggttcgatggtgccttccatgagtctgtgtactactgtcatgccgccattatcccggaaagtggcaaaaatcagtttgttggccagttcctctgttacagattccagcccctccatgatcattcccttgccaggtgtttccaggaagcggatctggatctgtctgtcctggaaaaagatatggatctttcgactgacacactcctctagaaaggtaagggtaagcttaagtacaggggtaccattttcgtcagaggtgaattcaccggatgtggcgatcaggtaaggctcttcatggatcgtgagccaggtctgtctggcagttgaaaaacctaccggaatttggtgaatggtatcaccttccagaaacagtacgtaaaatatgcctttttcataggagaaagagatttccctcagcccctccgtcatattattgtggaaaacttgtataaacagtggaaaaaggccaacagattgtggagaaagctgataagttcttccattaagctgtttgaacataggatacggatccggctggcagtttgtagtacaaggttttcctggatatcgggcagatattctggctgattttggccagccgccatgaatggcaggagctttaccaccggtttggatagaaccgatcagtttttgtagaataccataagcacttggatcctctgtcaactgttcctttggcatatattctacaggaaaatatttgcggatgatattcagcataacacaattctggaacaactcgttgttccctgcattggttacaagtaccatgtccatatccggatatacaaccacattttgaccaagcattccattaaattcaaagctttcgggccgctgctccatccagatctgatagccgtatccaaatgtacctggaatgctgtctgtatgcttctgtgtggaagtttctacccatgctgcaggaatgatctgctgaccattccacatgcctttttgcaggtaaagctggccaagctttgccatgtcctccatacataggaaaagtccccaccctcctttggtgatccctttgggacaagtctcccatagatatcgtgtgatcctcagaggctcaaaaagccgtggcttcagataatccgttagagtttcgccggtacgtttggtcacaatggcagataatacataagtattcaggctgttatactggaacgtggtgccgggacggcccgaaacctgggaacttagatagcttccaagccagtcattaccggaaacaatgccggattcgttaaaggttacgccactggtcatggtaagaagattatccactgttatgacgggacggagcaccttggtaaaaggattcagctgatcctcaaaaatcttatatatattttcgtccagggttagctttccctcgtttacaagcaggccaatagccatagaggtaatgcttttacacatggaatgggtaatatgccacatgccggcaggataaggggcaaagttacattcacagatcacttttccatgtcgcagcaccatcagatgatgcatatctgtatatttggagctgtaaagctcacggatcatagcactgagcaggcgggaagatacaccctgactttccggggttgctcttggaaaaggctgttcatagggtaaatcctccgggaattttttcttttgcggaaaaaaatccacacggcttacattttctgtttttccaaggatcagattcatgatcagttccgctactgcaagttgttctttggccatagacaacctcctgatatcagaattcattattgccatcataaaactgacagacaactctttttatgcattatactcattttacttaaaaaaagcaatgaatgtctctggaatttacaatgtcccccaatgccatcctggtaacatattctctttcttaagatatgctttcaatatacttacaatcctgtgacgtatattgtgttttatctgcaatttctatataatcatattgtacgaaggagaaaaaaatatgaattacagaaaaatgataaaaagaaaagcaagaatttcagtcaaagaacattatgggatctgggtggtactgtgtctggtacttatgatcatttccggcggaaggcttgtggattacagtattgccaggacagaagtaacagccaggttgaacctgccattcaaaggaaaagatccggtaagtgaggagatttatgaggaagatcctggaatgggcagtcagtttatagctattttgaagaatttatttgatggaaacagagaagaaggaagacgtctggcagatgagcggatacagaagcaggtaaactcctcaaaggataacaagaaagccgtgctggggcatagccgtggaatgctttcaaagattgtaaataagatcacatctggagcatttatcgtgtcgattgctgtgggtatttcttctattgttggttcagacagtgttgcagtgatcatattaatactggtcagtctggtgatcgttttcctggtttggtttttgtttattaatgtttataaggttgtcatggtgcgtatgtttatggaaggcatgcgttatgaaaaaatccatacacagagggtattttatcttctgaaggtacggaaatgggttcaggcatgtttgaccatgtgtgtgatgcgggcatataaattgttatggtggtttacaatcgtggggggattgatcaaacactattcgtattttatggttccttatatcgtggctgagaatccggagattggagcaaatgaaacgatcacgctttccagaaagatgatgaatgggcataaatgggaattgtttatactggatctttctttttggggatgggaaattctgggagcttttaccggctggatcgtgaatatacttattacaagaccttacaaagaaactaccatgtgtgaatattatgccatgctgcggaggataggaaaagaaaagaaaattccaggcagccagcttttaaatgacaggtatctttttgaaacaccttcacaggaaatgcttttgatggcatatggagatgtgctcaagaagcgggaaagcgaagaagacattctggcacctatgagaggaatccacagattcatgatcaagaatctgggcatcgtattctttggagataaaaaagaacgtgaatttgaaaagaagcaggcagaaatgctgcaagggacagaattacgtgaggcatatgaaggaaagatttatcctgcccgactgggccctctatcggtaaaaaataagaataccaggcaatggctttctcaaatcaattatatgcgctgttattctgtatggtcagtgatcatggtcttttttatcatgtcctttggaggctggatctgggaggtcagtcttcacctgatcacaaacggaaccatagtaaaccgtggggttctgcatggtccatggctgccgatatatggaagcgggagcgtactgatcctgttattgctgtaccggttccgcaataaccctgcaatagaatttgtaatgaccatggtggtttgtggtgggatagaatatcttacttcctatgtactggaacttataaacggaaaaagatggtgggattattctggctattttcttaacctgaatggcaggatctgcgcagaaggcatgctggtctttggtgtaggaggcctggtgattatttatgtgctggcccctcttctggacaatctggtacagcgaatgaatcacaaactgcttgtggtgttatgcgtaagcctgatttgcgtattcctgacagaccagggatattcatccagatatcctaacagtggaaagggagttactactgttacaaagatccgtaaataacaataaataacagtaaataacagtcccttttccttataacgggagataaaatgctgtcccattactgaaagtgtacagtgatggggcagatctcacagttggtgcctactcgcatatccggtccccatacacctacgcctgaagtaacaatattgtgcatcttgtcttttttcagataaccaaatgaattttcccagaacagatggataaacaggtttccagggaagatctggccgtcatgggtatgaccgcaaagatccaagtctgctccggcatctgcagtttcctgcagttgttttggttgatggtcaatgaaaataaccggtttatcaagatcaaggtctttggtcagctgagccggagaaagtcgttgtccgccaagcttgtgggtgcgggaagaatcatttcgtcctacaacataaaatttatcatcgatcaattctgcttcgtctgtaagaagatggatattggcatctctaagcagctgctccatacgtggatcagcctgatcttttttctttccgccaaaagtaaatccggcaagaatgggttcatctaggtcatggttgccccagcaggcatataccccatatctggatttaatggatttcagtgcgttacacacttcttcaggatcgctgatggcatcgtaatcattatcaaaaatatcccctgcaatacagacaatatccggatcctgggcattgatcttttctaccattttctgtgcatgtcggcagttaatgctgtaaccgaaatgggtatctgcaagaaggacgatcttaagggaatccatgtcctttacctttttgttgacggtcatttcataaggcgttactttgatggtacctacatgcagaataccgtaagcgctgatgagaataatcagtgccatacagacaaagcctgtgatcacgaaggtgctgcgaaattccagaaatcgggcatgaaatacatacttaaggatcaggcgtacaaggtcgactactacaattaccaaaataatgtagagaaatgtgccgagaaaatagttgccagtgtttttcaggatgcggtgaagaaattccggcttgttgatcaggaagcctgtaagcagtgaagaggctatcagaatataaaaaatgataaatacagcacggaaaactgcagactggaaaatatggctgcaggcacccatccagcggatcatccaacgaaccacataaacattcacaagaatataaaatggcgccagtaaaaaagctgtcatggctatgtaacctccaaatgtgtgatttgcggtaactgatcagtgactatgcagttacgatttatttagtataccgtaattttgacagggatacaatattcaatccttctcgctattacggccatagcataattttatgagaaaaaaacatatactgaaaaaaagacaaccgggaaatagcttatgaaggaaaagatcagaaatattctgtgtagcctgccggtacttctggtgctcccgtatcttatggttataatagtaaatggggcagaacaggcacttacagtacatacttttgatcctgaagagtggatcgcctgcatgctggaaggacagatacctgcaggatatgagacggaagcagtaaaagcccaggcagtggttacaagaaccaatttttatgatgaaatgtatgagggcagaagtctgcgtgatattgtgataaagaggcaggagtatggaatgccagctggaaaatttccggagcttttttttcggaaaaaagaagaatgttatgaggaagcagtacatgaaacggaaaatatggtgcttacatggaatgaggaattgaagctggttccctatcaccagatcagcagcggaagcaccagagatggtcaggaggtttttcatagtcaggagtacagttatctgaaaactgtggacagcagtgaagataaaaaagcggaggagtatttatcttcattttatatccctgcatcacagatgcccaaggtactggaaatccgggaaagggactctaaaggatatgtaagctggatgatggcagatggaaagcctgttgagggagaagcctttcgtacaggacttgggctggcttcagcggattttaaagtacagaaaataggcagcaggtatcggtttttgtgcaagggaaaaggtcatggacttgggtactcacaatatgggggaaattgtctggcaaaagcaggatatgactgggaacacattcttcagacttattttcctgaaatggaaataaaaaatattgtacagattccaaaagctggtgtatagccggcaaaatttctggacaccctataattacaggtggagcggcgaacaggctctggattatgatgatagaggtgaacagaatatgaagaaaaacagaacaatgaaggttattttcaatgttggggcgctggctgtgctggcagcacttggaatcagtgcatatcagcttggaacatcccaaaatggggagatcattcaggagatcctgccaatggaaagtgttcagaaaagtgatgccaaggaagatgagataaaagaggaagccagtgcacaggcagatacccgtctggtgcaggcggaaacaggcagtggcagcatcacagcaggagaaaatctgatacaagaagagacacagacagaagctatcaaaactgcttcgtctgcagaagcagctgcaaaaacaggcgccggtggaactgcaggactaaacatggcaccggagatccttttttcagaagatacattaatggagtggccggtaaatggaaatatcctgattgattacagcatggacaatactacgtatttccctacgttggatcagtacagattaagttccggcattgctgtccaggcagtgcagggcgccccggtccagtctgcagttaatggaaaggtactgaccattgcacaggacgcacagacaggaaccacggttactatggaacttggaaacggatatcaggcgatatacggtcagctgacagatctgcaggtagaacagggcgatacagtgaaaaagggtacaaccatcggatatataggtacacctacaaaatattacagtaaagagggcagtaatctgtactttgcaatgaagaaagacggaaagccaattgacccgatcgtatatctgccatagggattcacaaaaagtaagagagcacgtataataaagaaggtaggaaaatatgtggccggtttccctgccaacagagatattacggaaatcctgataagatacgtttcttaccggctgcttttatatagaaaaggggtaacagttcagtatccttacagttacaaaaagggaatgccaaggcattcctttacatagaaagccagggattataaatgaattatacttatatggtgaaatgtgcagacggaagcctgtatactggttggacaaattgtctgaggaaacggctgcaggcacataataaaggccaggatggggcaaaatacacccgcacaaagcgtccggtgacgctagtttattacgaggggtatgagacgaaacaggaagcaatgcaaagagaatatgcaatcaagcagctgaccagaaaacagaaactggagctgcttgatttttaacttataatggcatgcgggcaacgaaggaatacataaggatgaagtggcatgcactgcctagcatgataaatacatggaagatctcatgggaaccaaagttcttgtgtctggaattaaatagcggaagctttaaggcgtagatcacaccgcctactgtgtagatcagccctcctgcaagaagccagccaaaggctgctcttggaagtgctgtgaaaatcggcataaatgccagtacacacagccatcccatgccgatatagagcagggacgaaagccatttgggacaagttacccaaaagcctttgaaaagaatcccaagaatggcaactgtccagaccattgcacatagaatatagccgatgcgattatgaaggacgatcagacatacaggtgtgtagctgccggcgatcattacaaagatcatcatatgatccatcttgcgcagcctgcggttgactttttcggtagaatctacggagtggtaaatagtactggctgcatatagaagcatcattgtaaggataaatatgctaagggcagccaggtgcaggtgatctgtacagccagctgcacggatcagcagtggtgctgcgcccgccgctgcaagcagaaatgcgataccatgagtaatggcgctgccaggatcttttaatttgaatttcatgtgaaaacctcctttgaatgattacaggaatcctatgatcttaaaaataatacggcatcaaaaacagtaacatgtagtatttaaaactacataataagtatgtgaatactataacatgaatattataaaaagcaagtcttttttatattttatcagtctttttttattttttatcaggttgacgaaactttttttcatgttagaatgaaacaatatggtaacggatggaaaaggagtatacatgaaaaaggagaagctatgggagaaagattgaaaaaagacaacatattgaccattcccaatctgatgagtttgttcaggatcctattgataccggctattatatggttgtacagaagaggagattataaacaggcgattgctgtggtggcactgtctgcactgaccgatgtgttggacggaaaggtggcccgcagatttcacatggtttctgatgtaggtaaggtgctggatcctgtagccgacaagctgacacaggtgtctatgattttctgtctttcctccagatatcaaagactttgggtgatgatccttttatttgctgtaaaggaaggaatcatgctttactggggataccagactctgaaggtgagagatcagatcaacagtgcaaaatggtacgggaagcttagtacagtagttttgtatctggtgatgactgttttgtttttctggcaggagatcccagacgggctggcctggtttctgatcgtttcctgtgctggaattatgcttatgtcactggttctgtatggaagattttatcacgggatcctgaagatgcattttctggatacagaagtaaaacaaaaggatgaaaagacgatatcaaagacaatataaataaaggctaataaataaaagttaaaaaataaaagttaaaaaataaaagcaaaaaaataaaagctaataaataaaatgtgtaatggggaagatagatgaaggtaacagaagagcttctgaacaagatgaagcaggacagtaattttagtgacgggatcattatgccggatggagattaccggctgatccaggacggcggacatatggaggctttgatgggattactgccctacacttcggatgagatattcaaaatggtgccacaggatgattcaccgctgttttggctgatcgagaagacaggatgtgtgatcacagactataattccactgtggggatggatatgacccatgagcaggaacgggtatttcaggcattggttgcccatgggtttatttccagtgagtattttaacctgtccagtcagagaaaaaagttccatgatcaggaagatcaaaaagacaaaacagttcccagtctctgaacatcctcctgagtggttgcccagcttgttacgaaacggatcacggtatgggaatcatcatatttttcccagaaactgcattcaacctgggacaggagacgatccattacagaattatctataatgcagaaaatctgattggtgggagaatcataacaaagctgaaatccattgctcttcaacatgtcccggatctgatcggctgtcgaaatggcagacttcccgatatgctcgtaaagatggttggtaaacaaagtatcaaactgaatacctaacagcctgcctttggccagcagggcaccatgctgtttgataatggtaaagaaatgagggatcagtccgggaacagtgatcacgactgcctcaccgaataaagcaccgcatttggtgccgccaatataaaatacatcacaaagggctgcaaggtcttgcaatgacaggtcgttttgggggcaggctagtgcataagccagcctggctccgtccaggtataaaggaatctggtgctggcggcagatccggctgatctcttcaagttctgagtgggaatataatgtgccatattctgtgggatgagagatataaaccattccaggcataactatatggtcatggttcgcatcctgatcgtaatccacgagaaaccgggataattctgctgcatcaatcttcccgttatgggaaggaagagtaagaaccttgtgaccgcaggcttctactgctccggcttcatgtgtggcaatatgtcctgtgctggcagaaactacgccctgatagcttttaagaattgcagagatcacggtggcatttgtttgtgtgccgccggtaagaaggaaaacctgtgcctccggtttccggcaggctgatttgatcttttcacaggcagaacgtgtataatcatccagtccgtatcctggagttttgatcagatttgtttctgtaagcttttcaaggatcgccggatggcaaccctccatatagtcgcatgcaaatgataaatttgtattcatatttataatgctccttaagttcgatattagagatgtgaggcataaaatacatgctctggcatcgctttttttattttaaaacaaataaatttaaagtgcaaaggtttttggaagctttgatgttgcatcggtagccgtcagtgcagatgatattgttgaaggcggtttcttatgctaaaatagtgcaaagagcaattacggaaatttgaagataagtattcgatgtggaggatattataatggcagaaaaaacaaacgccaatattggatttgaaaaacagctttgggatgcagcctgtgttttgtggggacacatcccggcagcagagtatagaaaagtaattataggattaatttttcttcgttatatttcggctgtatttgataaacgttataaagaacttgttgatgagggtgatggctttgaagatgatcgtgatgcttatgaaatggacaatgtattttttgtcccggaagaagcacgttgggataatatcgcatccaaggcacacacaccagaaattggcataatcattgataatgcaatgagagcgatagaatcagaaaataagaaattgaagaatgttcttccgaaaaattatgcaagcccggatcttgataaaagaattttgggcgatgtggttgacatattcacaaataatattgacatgagcgatacagaagcaagtgaagatcttcttggacgtacctatgagtattgtattgctcagtttgctgaaaaagaaggtgttggcggtggagaattttatacgccatctagcgttgtaaaaacactggtttccattcttcgaccatttgataattgccgggtttatgactgttgctgtggttctggcggtatgtttgtgcagagtgagaagtttattgaagcacacagtcataaaagaggtgcaatttccgtttatggtcaggaagcaaacccggatacctggaaaatggcaaagatgaatatggcaattcgtggcattgatgcagaccttggtccgtataatgcagacacttttacaagtgatttacacccgaccttaaaggcagattttattttagcgaatccacctttcaactatcatccatggggacaagataaactgatggaggataagcgttggaaatatggacttccgcccgccggtaatgccaactatgcctggattcagcacatgatccatcatcttgcaccgaacggaaaaattggtcttgttcttgctaatggagcactttctacacagtccagtggcgaaggcgaaattcgtaagaaaattatagaggatgatttaattgaaggaattattgcgatgcctacgcagctgttctacagtgtaacaattcctgtgaccttgtggtttatcacaaaagggaaaaagcaaaaagggaaaacactttttattgatgctcgcaaaatgggacacatggttgaccgaaaacatcgtgattttacggatgaggacattcaaaaactggctgatacttttgaagcatttcaaaatggtacacagaaggatgtacttggattttgtaagattgcggatattcaggagatcgaaaagcaggattatattcttacaccgggacgttatgtaggcattgaagaacaggaagatgagggagaaccatttgaagaaaaaatgactcgccttacaactgaactttcagaaatgttcgcaaagtctcatgagctggagaatgaaatcagaaagaaactgggggcgattgggtatgaaatttaaaacatatagtatcgctgaattgat

SEQ ID NO: 112 - DNA, 4087 bp, Unknown
  gut microbiota DNA sequence
accagactatccagcccaagcttgatcaaaaagctgtttaaaatacctttttctgttggaaaataaataaagttccacaaaagtgctactgctgtgacagacaggatcatcggaataaaaaatgctgccttaaaaaatctctgccactttttaaagtgatggatcagaagacccaggccaaagccgatcggtacctgaagtactacactgatcatcatataaatcagtacatttttcaaagactgcagaaaaacgccattggaaaacaattttttgtaattgttcagtcctacaaatttcagtgggattgcctggattcccggccagtcattaaaagaaaaataaatggacatgatcacaggaattacttcaaaacaaagataaatcagtactgcaggaagcagaaaaatgaaaattatttttttattttttcttattttttccacaaaattctctcccttcatctgtttttgggtaaaaagaagagaggccgcagcccctcctctttctttttgttattgcggacggtttgcatcaatgtctgcctgaattgttgctgctgtatcttctgctgtatcagaaagcatcatattcaggattccatttctggatgtatccactaatgtagagcatgtatcataatcaaaatattcacctacagaatcggaaattgtgcctgtatactctaccatatccttaaagatctgaggtgcatcttctggtgcgtcaatatctttatacggagccacacgcatagctgcatccatacgttcctggattgcatcctttgtagtcatgtattttaccagcttcagcgttgcttctttttcttcgtcactcatagtacctgaaatcatccagccagaagtataaactacatgagtatctttaaattcttctttgtctgtaaaatatgggaatgggaagaaggaaatatcatccagaatctcagactcagagttcagcatttccggaatgatagggctgctgtgggagatcattgccacttcgccggtaaggaactgattcatctgcgtattgtaatccattccttcaaatccctcagcaaaagcacctttctctttcagatcttttgtaatctgcagacattctacaacatcctcatctgtccatttcttttcacctgtaccaagctttataatgccctctctaccgatacgttttgcaaggatgttattgaaaatgtgtcccataacccatgtatttttgccgcctacaccaaatggagtaattcctgctgctaccagcttgtcgatagcatcataaagatcatccatagtctgtggagtttcggtaatgcctgctttttcaaaaagagctttgttatagaaaatagcatctacattcaattcattgggcaaagcatagattccatctgctccatatgcactcagatcataagtctccaaagctccatccaggaaagagtccttccattcctgatctgcatccagggaatctgtaagatccagaagaacaccattctgtgcccactctgtcagacctgcaattgccggataatagaaaatgcttggtgtctcgccggtagataaagcaaccttcagtttgttattgtacgcagcttcctcatagatagaatcgttctgaacctcaatgtccgggttctcttccataaagcgggcaatctgatcttcatatacctttgccattggtgtatctccgctgtcacggctcataaatacaaccttggtcttgtctccgtctgccagtgcgggaactgcactccccagtgtcattgctgctgccagtgctacgcttaacattgcttttccttttctcatgttgtaaaatcctccttttttattacattattttttatagcttattgctgccataaagtgtccgtttactttatcaatttcaaaaaatacttggttttctttctgaataaatggaatctctttctgatcaggtacggaataaatcttttccaccttacccgcagtttccacttccatctttaggttctccagtgggatcacatcttccacgatttccagattcttacattttttaacaggtacataatgaagaacatgtaaaatatcacggttctctttttcctgacgaagcagatttacctgtgtagtaaatggtccattgtgagaaaccatcggctttggaagaagccttttcagttcatttgctatcagctttttataccaggcaggcgcccaattctgataggtagtaaataccggatggataaaatatgccgtctgttttgtttccacgattcccggatattcctctttccgtccggatggtgaatgaagatgtgagcaaaaatgttcatatgtccggttaaaaaccggtgggatcaccttctgtacaaattctgtctctccggatacctctaccagagttcccttgtcatacataacatgctctgcatctgcaagtcctgcagccaaatgctcctttggccaaataaaatccggactgtatggagcttctcctttatatgtaaccatcagctggtgaaggccaaattccttcctgtctgtgcgaagtcctgaatgataagaagcaagtattttaccgcctttttccagatatgcagtcaatttttcttccagcttttcatccacaggaatcacatctggcaggatcagaagcctgtatttatcaaaatcaagggtgctgtcaataaaatcaaactgatatcccaattctgtaagaatccttgctgttccttcagaagctcctacaatctgtccggctacaccagttgcataaaattcctcagctgtaaatacaccgatttctgaaagcggaactgcttccttgcaccagggctcttttgcctctacagaagcataaacccgtccaatctgccggtacatatctttgtttaattttccccagtaatccatctgatctccgatggtacatttacacccctgagccagcatggaaaaaacctcatactccatagccgcttcattgcggaatgcgtggaaatcgccccattcagtatggaatcggctggtaagtcccaaacattcctttccaaaatttctcatatattttgcagatacagggaaatccatatatccccattccacacctggcaatgattcaaaggaaaaataagaatattcatcaatcaccggcttatccaaatatcctacatgacctttgttgtagcacacatggaaagaggaatcataggattttgcaaaagcggtcagatcacgtaccatatcataataagtccatcttgcaaattcctgacgatcttcctttactgccggatttaagccctgttcccgcatcagcttctgacaggtagggcagcagcattcattcataaatgctgcatcataccagacaccatcacccgggatagtttccagtacctctccaaactgttccttcaggaaatcacgataaggtgtgttcacacataggtttttataaaatcctgcttcaaaatatccttttcctttgtagtcctgaagtgctccattttcatcaatgcagatccactccggatgctcatcggctactcttttgttccatcggatcgttgtgtacagatttacctggattccccgcttcctgcaagcctgcgcctgttcccgaagcaaatccttatgtacaagtcccggatggatcatttccggaaatttttttgaattgtaataaagatttccatgatgtccgcatgaaaataaggtaatagaattcacatgagcgtcttccagtgtctgcgcaaattcttctgcgtcaaattccccacatactccctggatcttctcgcttgtatgaaaatccaaatgaatctgtcgaaatgggatttctttttccttcataagatgcccctcctcatttcttatgttctgtctcatatatttgtgtctctcaacttctgaacatatcttatcatctggatttttcaatgtgaatgtagattttttagacaaatgggaaattatttggattcctcaaaatattttgagggtgttatcccatactgatttttaaagcttttactgaaatagtacacatctccataccctacttcctccgaaatctgaag

SEQ ID NO: 113 - DNA, 18456 bp, Unknown
  gut microbiota DNA sequence
cttcagaatgcttttgggtgtgggaaagcctgatagcttgcgctggggctgatttggtggtaaaatgattcaacaatcctaagatgcaggggacagattctgccctgaatccatgagaacggagaattaataatgaagatagatagagatgcccctgttggagtatttgattccgggataggcgggttgactgtggcaagagagatcatgcgtaatcttccttcggagaaaatcgtatattttggtgatacagccagagttccatatggaagtaaatcaaaggagacgatcgtcagatattccaggcagatcatccatttcctaaaggaacagcaggtaaaggctattgtcatagcctgcaatacagccagtgcctttgcactggatactgtaaaggcagagcaggatattccggtgattggagtgatcgaggccggtgcaaaggtagctgcttcagtgaccaggaatcaccgcattggtgtaatcggcacagaaggtaccattggcagtgggatccatgcaaaatatctgaaaaagctggatccgaagatcacagtgatcggccggccctgcccgctgtttgtacctttggcagaagaagggtggacccatgatcctgtaaccacccaggtagccgaaaggtatctggaggatctgaaaaaagagaacattgatacactgatccttggctgtacccattatccattgctgagatccaccatcgcacaggtgatgggagatggtgtacgccttgtgaatcctgcctatgagacagcgttggagctgggacggcttttgaaagaaaaagatatgctcagtgcaggaacaatccaggaggattttccttatagatttttcgtcagcgatctggcagacaaatttacaggatttgcaaattccatcctgccctatgatgtgtctatgacaaagaagatcgacatagagaaatactaaaaggaccggcataagaacagggacataacaaaaacagagaattataacacaggagcaggatgcatatccaaaaggccggctccggtgtaatgcccaaagatatatcagctgggagatgcctcccacctctataggtggtgagaaacaagctagtatcagtggtgggagtcaatcccccagctgatatagcctccggcaggattgcagaggtgcgcaggagaaatatgtcatgcaattgcatgacgcgcacctcgcagcaagaatgccgaggcattcttgaacagaaaaggaaatgaacataacatggaaaaacaggtgctggtgcatgtaagcggattgcatatgatggaaggagatggacaggaggaaccggtagagatcgtggttccgggggaacactatttccgcaatggcagccattatgtgcgatatgaagaaatgttggatgacagcaataaaccaacagtaaattatatcaagatctcccctaaggggatggaggtgcgtaagaaaggcctggtgaatacccatatggtctttgaacagggaaagaagaacgtggccttttataccacaccctttggcactctgcagatggggatcgctgctacgaatctggaatttaaagaaaaagaaggatgcctggatatgaaagtggactatgccctggaaatgaatgagggttatgtggcggactgctgtctttctattctggtagaagaaaagaacgatcattttgctttatagaagatattgaagatccgggtaatccggatccaaaaaaacctgtatatacagcctgggaagcaggtctgtgtatacaggtttttgtatacggttttagcttgttcaaaatgtctacgcagcgtgtagacatttcgtatagtgccgaaatacggcttatttctttttcttgtttttcttgtcggttgtattggtattagctgcagcagttttggtattttttgcggatttgccggactgctttggctgtgactggacttccggagctttgtcttttttgaagcgggcaaaaaagccttttttcttcttgactggagcctccagagtaccatggatacccttaacacctacaatatataatccgctgacttctgccttgatctctttctttactgggatcaggtcaaaaaccttctcatctgcgatcaggatagaaatcttcgggccgacttttgcttttacgatcggcagtttggaacggcgcagaagctttggagtctggtcaatgaccatctgtggaagaccggactgcttcagcggcaaccgttttttgtcgatgaccaacatggaaaccgtctgtttggaagcttcgatctgtgcctgctgctcctcttgcttcttctgggtcttttttccgaaaaaatacaagccgatcaacaagcctaccagaacaaccagaatgacaagaaggacgatagttactgtactcatatacgcatcctcctgtgtgtaatttgtaataatactcacgcagagtttattttaacattgtttgaggtaaaacgcaattattaaaataaaattaaaacggaataggaatgtagaatttaggagaataaacggttataataaaaaatacgatattgggaatcatacagataagaaaaactttttggacggatgcttttgtatcgcccatgaagaaaaaggagtatattgaatgagggagatgaagccggaacaggaggacagcagggagattaaggacgaactgcagcttcctgaggaagagaagccaggattctggggagacagtttggctgattccggggaaacggatacagatgagaaggctgaagcggcttattatgaagcacgcagacaggaacggcatgagcggatcctgcttcgcagaaagagaagaaagcggaacagaattcttggatcggttcttgctatattggtactgtttacctgcggagggattctattccgtaaggatatcgggaagcagtttggcaggatccggacggctgtgacaaatggaagtaagacgaccggtaataagaacagcacagataataagaaagatattgatgtggcggcagtgacaggaatcacaccaacgccggaggtgacagaagaagctacacctacgccggaggtgacagaagaagctacacctacaccggaggtgacagagggagctacgcctacaccagaggtgacagaagagcctacaccaatcccggatccggcggcagctgcagaggcagagcgaatccagcaggtattggctcaggcagagaactgtgcagttcagtatgactatgaccaggcgatcagtcttcttcagaatgatgctgcttacggaagcagctctgatatgcaacaggctgctgcaggttatcagcagacaaaggatgcctgtgtggcatggagccctgagcaggtaacacatatcttttatcattctttgatcgtagatccatcaaaggcatttgatggagattacaaacagggcggttacgaccaggtcatgactactatgagtgagtttaaccagatcacccagaccatgtatgacaaaggttatgtgatggtgagcatttatgaccttgcccagatggatgagaatggtgtgatgcagggaaaagaggtgcatttgccggaagggaaaatcccgtttgtgctttcacaggatgatgtgtgttattatcattcgcaggatggagacgggatcgctacaaaactggtagtagatggagatggcagggttcggaatgaatacgtggaggatgacgggagtatctctgtgggggattatgatgtggttcctctgatcgaccgttttgttgaagcgcatccggatttttcctatcatggagccaaaggcattgttgcacttactggatataacgggatccttggataccgtacagatatcagttatcagaccagaccggatgatctgaatgatgataagaaagcctggttggatgcacatccggattttaatctggatacagagcgtgcaggagcaaaggcagtggcagatgctatgaaagccgagggttggatttttgccagtcatacctggggacataagaatatgtccagtgtatccatggaacggcttgtgacagatacgcagaattttaaggagaatgtggatccgctgattggcggtacagatattattatctttgcatttggcgcagatattaatgatggcggcgattatactggagatgagaagtttgaatatctgaagtcacagggttataactattactgtaatgtggactctagcagatattttgtacagatcagagacggttatttccgtatgggccgcaggaatgtggatgggtacaggatgtactacaatccggagatgctgtcagatctgtttgatgcatctgctgtgtttgatccttcaagacccacgccggtaccacctatgggctgatgccggggggatcattataaagatggcataaacaggagaaaggaagacagaaaatgaaacgaaaaacatgtgtggcagtacttgccatgtgtctgatattggcggctggctgcgaaaataatgaaagcgataacgcagacaggacaaagacagaggacacaaagaccgatacaacacaggatacagatatgaacaagagcagccaggactcagacacccgtctggtctctgtagatgatatagataaatatattacactgggtgaatataagggaatcgtcttgacgaaaagtaatgtgcaggttacagaggaagatgtggacaaacgtgttacagagaatctgaaggacaatatgaaggaagttacccagaagggagcgactgtccaggatggagatgcagttaccattaattttgtaggcaagaaagacggagtggcttttgaaggcggatcagggaacaattatgatctgaccatcggagacggcaccatgatcccaggctttgaagaaggtattatcggtatgaagaaaggtgacaccaaggatgttgaagttacatttccggagaactacagacagacagatctggcagggcaggatgctgtattccagatcactttgcagagctttcggagagcacctgagtttacagatgagtgggtgactgataataccgattatgccaatatggaagaatacaaggcaggggtgcgtacccagctggaagcagaggctgtaacaaatgcagatcaggctttgaagactcaggcatggtcacaggtattttccaattctgaggttaaggaatacccgcaagcggatatggatgaggcttctgcagagtacaaacgtctggtacagaagtatgcagatcaggcagggatgaagctggaagagtttgtagagtctcagggactgactaccgaagattttgacagccagtgtcagtattatgcacagcagaaggtaaaacagaatctgatcgtccagaagattatggatgccgagggcattgcattggatgatgaggaatgtctggctattcaggatcagatcctgcagcagtcaggtgcaggagatatggctgtattgattgatacttacggacaggcagcagtggatgagacgattggactgctgcgtatcgaagatttcctggtagccaatgccaatgtggagcagacagaagcagctacggaagcagaagcaacaggtgcagatacggcaaatacggagacaacagacacagaagcaacaggtgcagatacagtaaatacagacacagcagatacagatgtaacaggtgcagacagtacggaggctcagtgatgatcattcagggcgggatggtgttccaggaggacggaagtttccgcagacaggaactgtatattgaaggacacaggatcgtatccggccaggagcagctgacggactgcactgtaattgatgcggagggattgcttgttctgccgggactgatagatatccatacccatggagcctgcggacatgattattgtgacggagatatggagggactgaaggctatcctgagatatgaaaggcagcacgggatcacatcctgctgtccaacctctatgacattgccggagaatagtctgaaggacattttcagcaatatccgcagtctgggagaatatcgggaaggggcaaccgttcaggggattaatatggaggggccttttcttgatcctgtcaggaagggggcacatagggaaagctgcatcctaaagccggatccagaactgtttggcaggctgaatgggtattccggcggacggatccgtatcatgacccttgcacccaatgcagaaggggcaatggagtttatccgggaatttcatgatcaggtatgtatttcccttggacatacatcagcagattatgatacagccaagacagccatgcaacagggagcacatcatgtgacccatctgtttaatgctatggagcctttggggcacagggcacccgggctgatcggcgcagcctttgatgaccctgaatgtatggcagagcttatctgtgacgggatacatgtacatccctcagtagtgagagcagcatttcatatgtttggacctgagaggatgatcctgatcagcgattccatgatggcaaccggaatggaagacggtacttatcatctgggcggccagttggtacaggtacagaataaaaaggcgcttttgcaggacggcacgattgccggctctgcgacagatctttttgactgtatgaagaaggcagtatcttttgggattccgctgaaggacgctgtttttgcagcaaccaggaatccggcaaagagtatagggatctatcatagaaccggatcagtaacaattggaaaggaagcagatcttcttctggtaacaccggaattggatcttattcaggtaatatgaatatagaagtgggatgttaatcctgccatattcgaataatcatacaattggttaatcatagttaagagtggggttattggtgaaatgaacagaagaacagcacgcgagaggatgcgcaggaaaaagcgccagatgagacgaaggaagatcatcaggcttgccacatatttggtggctatggttctggcagtggtatttgtagtaagagggatcattattccaattgccaaccgtatcagtggaaaggatgaaagcaagtcggtagaggtacaggccaatatatcaatagatccggatgcagccatccgccagcctttaaaggggcagcaggatacggctaaggtggcatatgtggctccaggatggcatgaagatgaaaatggcaagtggtatcagaatgctgatggtacatattatgcaggagggcttcaggatatttccggaaccaaatactgctttaatgataatggttatgttcagaccggctgggtatcaaaaggaataaaggattactattttaatgaagatggatcttatgaccccacacagaagcgtaaattactttgtcttacctttgatgatgggccgggacagtatacagatgatctgttgaactgtttggaagagaacaatgcacatgccacgttttttatgcttggacaaaatgtggccaattatccggaacaggtacagcatatcctgaaagccggatgtgagatcggaagccattcatatgatcatccgaatcttaaaaatctggatctggattctgtaaagaaacagtttacagatacagatgatcttctgatcaaagcctgtggtcaggcagcaacggtagccagggcaccttatggagaatggaatcaggatatcattgatactgttggaaagccgttttttacctggagtgtggattccagggactgggattataaggatgcagatcttgattataagtccgttatggagggggatctgtctgatggaagtatcattttgatgcatgatattcatcagcctacagtagaggctgcaaagaggatcattccagagctggtggcacagggctataagctggtcacagtaagcgagatggctcaggccaaaggagtgactctgcagctggcatcctattctgatttctggcaaagttcttttgataaggggatcattgctggggcttcttctgatggaggagatacttctggcgaaagtactgatggcaatacggatgaaagcggcgaacaacaggaatagtcagaaataacagatttatgcataaaatacaagaatgtgggagggtatgttgtcatttaacattgacgcattgccctcccattggtataatattgactatgaggcggttctataatatgacttttttgaacaaagtgcatagatacagacagaaaaggtatgggattgcctaaattacgatccggcagatattacagagtgcgaaaatgccggatgagtggacttaagagtaggaggcataaaacattgagcaaatggtatgaagaagcagtattttatcacatgtatccaatcggaatgacaggtgcacccaggcagaacacacaggaggaagtaacacaccgctttcaggagcttatggagtggcttccgtatgttcagtcattaggctgcactgcgatttatataggaccattatttgagtctacttcccatggctatgataccagagactataagctggttgatcgtagattgggggacaatgaggattttaaagcttttgttgcaaaagcgcatgagctggggatcaagattgttgtggatggagtattcaaccacacaggcagagaattttttgcatttaaagatattcagcagaatagggaaaactccccatactgttcctggtttaaggggatcaatttcggatggaattctccgtataatgacggtttcggctatgaagcatggcggaattgttttgaactggttaatctgaattactgggagccaaaggtcagggagtatatccttagtgtgatcggcttctggatcgatgaatttgatattgatggtatccgtctggactgtgcagactgtctggaattttcctttatggaggagatgcgccgttataccaatgagaaaaaagcggatttctggctgatgggtgaagtgatccatggggattacagccgttatgttagtgtagataagctggacagcgtaaccaattatgaacttcataagggtctttattctggtcataatgatcacaattattttgagatagcgcataccattcgcagggaatttgatgctaacggaggcatttacaaaggattgaagctgtattcctttgtagacaaccatgatgtggacaggattgcttccaagctgaatgtaccaggacatatttatccggtacataccctgttatatacacttcctggtattccatccttgtattatggttcagagtggggcattcagggaagaaaagaaggggcaaacgatgatcctcttcgtcctgcagtagatctgaaggaggcccttgagcatgttccagacccaaagcttcttcagtgggtaaaaacactgggacgtatccacaaggagcagcctgcattgtctgaaggacggtatcaggagctgcttcttacgaacagacagtatgcatttgcaaggattctgggagatgaaggagtgatcgttgcagtgaataatgacgataaagatgcatacttaagcatccgtgttccgatgcagggtaagacatataccagtcttctggacggatcggtaataaaagaagaaaacggtgctcttcaggtgaagcttgcacctaatgagagctttttagcagctatgcgctgatatgctaataaatgttttctaggaggtattctgtatgggagagagaatgcagttcacagagctggatcagtatctgtttggacaggcaacgcattatgatatttacaagaagctgggagcccatccggtttcttatggcagacagaaaggggtatattttgctgtatgggcaccgaatgcacaatatgtatccgtgatcggcgagtttaatgattggaatacccaggcaaatcctatggaaaaggccgggcctattggcgttttccaggtttttgtgcctggagccagagaggggcagctgtataagttttatattgtggggatgcatggcgaagagctttataaggcggatccatatgcaaatgcagccgagatgcgtcctggaactgcctcccgcattacagatatttcctcatataaatggaatgacggtgtatggatgaagaaccgtcctcgtttcaacgaaaaaaaggatgcaatggcaatttatgaagtgcatcccggctcctggatgaagcatccaagcactgaggataacagagaaggctttttcaattaccgggaatttggtgagatgctagccaagtacgtaaaagaaatgggatatacccatgtagaactgatggggatcgcagagcacccgtttgacggctcatgggggtatcaggttaccggctattatgcacctacttccagatatggcactccacaggactttaagtatatgatcgattatctgcacagacagaagatcggtgtgatcctggactgggttccggctcatttccccaaggatgcccatggattggccaattttgacggtacagcagtttatgagcatgaagacccaagacagggggagcatccggactggggcactaagatctacaattacggacgtccggaggtaaagaatttcctgattgccaatgcacttttctggatcgaagaatgccatgtggatggcctgcgtgtggatgcagtagcgtccatgctttatctggattatggcaaaagtgacggtcagtgggtagccaataagtacggtggcaatgagaatctggaggctattgaatttttcaagcatttgaatacggttgtccttggaagaaatcatgggacggtgatgatcgccgaagagtctacggcatggcctaaggtaactggcaaagcagaagatggcggtcttggattttccctgaaatggaacatgggatggatgaatgatttcctggaatatatgaagctggatccttatttccgcaaggataatcacaacaagatgacctttgctattacatatgcttacagtgagaaatatgtgctggtgctttctcatgatgaggtggttcatctgaaatgctccatgctcagtaagatgccaggtgaattggaggacaaattcaaaaacctgaaagccggatatacatttatgatggggcatcctggtaagaagctgctgtttatgggacaagatttcgggcagctgcgggagtggagtgaggagcgagagcttgactggtttctgcttcaggaaaaggagcatcgggatctgcagagctttgttaaggatctgctgtatatttacaggaagtatcctgccgttcatgccacagataatgatccacagggatttgaatggattaatgcagacgatgcctacagaagtattttcagctttgtgcgcaagtcgcctaccaagagaaacaatcttctttttatatgtaattttacaccggttgcaagaccggactaccgggttggtgtgccaagacttaagcaatatacacagcttatggacgagaatggaagaaccgggaagaaggtattccgggcagtgaagcaggagtgcgacaacagaccatattcgtttgcatatccgctgcctgcatacgggatcgctattttccagtattaagcggaaagaactttgccatacttatggcaaaacacatcgtgggatattgtctttgaacagtaacgtaaccttattgatctttttttctgtattaagtgaacctgctcttgctttttagaaaaagttagggtataatgagcgcgaaatagatataactgtgaaagtgctgaacagttatattaatcaggaaagcgtagagtttgaaaggagatattagcatgaaagtatccaatattaaagacgttgataaattttttgaagtagttgacagctgtacaggtaaagttgagcttgttacaggcgaaggcgacagactgaatctgaagtctaaattatctcagtatgtatctcttgcaaacatcttctccaatggcgagatcccggagcttgagatcgtagcatatgagaaagaggacatcgagaagctgatgaacttcatgatcaacggctgatttagagcgagccgctgtgaaccgtaaggtagtgttttatttattgcgaagaggacattttcttcgacttagataaaagaatatcaggctgacgtttctaagagatacagatactttttggtgactgtgaggatataaagcagttacgtttacagtattgcgattagggacgtcggccgtcgttttatgcatgaaccagggggcgcaagcgtttcctggtcaagttgcgttcatggatcaaatccagaacagaaaggaaaataaaatggtaaagattgatattgtttcaggatttcttggagctggaaaaacaactcttatcaaaaagctgttgaaggatgcatttcagagagagcaggttgttctgatcgaaaatgaatttggtgagattggtattgatggtggttttttaaaagaagcgggtattcagatccgtgaaatgaattccggatgtatctgctgttctctggtcggtgattttggagcatccttaaaggaagttgtagagaagtatcatccggatcgaatcctgatcgagccatccggcgtaggtaagctgtctgatgtgatcaaggctgtacagggtgtggaaaaagaagttgacataacactgaatagctatacaaccgttgttgacgcaaagaaatgcaaaatgtatatgagaaattttggtgagttcttcaacaaccaggtagagtatgccggggcgatcattatgagccgtacagatattgtggatgaagaaaaagctacaaaggcaatggagcttttaagggagattaataagaatgctgccatcatcaccacacctatcgagaagctggaaggcaagaagctgctggaggttatggagcatcctgtatctttggaagaagagcttttgaaagaggagcatgagcatcatcatgaccatgaccatgatgaagagtgcggctgcggacacgaccatgaacacgagcaccatcatcatgaccatgatgaagagtgtggctgcggacacgaccatgaacacgagcatcatcatcacgatcatgatgaagagtgtggctgcggacacgaccatgaacatgagcatcatcatcatgaccatgatgaagagtgcggttgtggacatgatcaccaccatgaccatcatcaccatcatgcagatgaagtatttacaagctggggccgcgagaccattaagaaatataccagagaagcactggagaaaatgctggaagcactgtccgcatctgaggaatatggtatcatccttcgcgcaaagggaatgctgcctgcagaagatggaacatggatttattttgacatggttccggaagaaacagagatccgtgaaggtgcacctgaatatactggtcgtctctgcgtgatcggatctaagctgaatgaagagaaactggcacagctttttggattgaatgcataaagcggaggatagaccatggatgagatcagggttcccatatatttgatcacaggatttctggaaagcggtaaaaccacttttctcagatttaccctggatcaggactatttccagatcgatggaaaaacacttcttatacttatggaagagggagaagaggaatacgatacaaaagcccttgcgaaaaataatacagtggtagaagtgatcgaaaaagaagaggatctgactacagagcgcttagaggcaatggagatcatccatcagccggacagagtggtcattgaatacaatggcatgtggctggtcagcaggttttatgacatgaagctgccctttggctggggtgtggaacagcagattacctgtgtggacggaagtacgttccaggtatatatggcaaatatgaagtccatttttatggacatggtgaaatatacggacatggtagtatttaaccggtgcaagagagaagatccgctggccaattaccggagaagcattaaggtttccaaccagagtgcagaagtgatctttgaagatgaagaaggggagatcgatgatattttcggggatcagatgccctttgacgtaaatgcttctgtgattgaaattccgcctgaggattacggtatctggtttgtggatgcaatggatcacccggatacttatgttggaaaaactgtccggtttaagggaagggttatgaagccacgcggaatgggcagcaaattctttgttcctggaaggatcgccatgacctgttgcgcagatgatactacattccttggctttgtatgcaaaagtgcatttgcacctaagctgaaagaaaaggaatgggtggaggttactgcaaaagtggcttttgaaagacgaatggaataccagggagatggcgtggttctttatgcagagaatgttacgccatgtgagccactggaagaagaaatggtatattttaattagatagcatgaggacaatatgtatttaatagttggtttgggaaatccaggaagacagtacgaggcaaccaggcataatatggggtttgacaccgttgattgcctgatcgaaaagcataatgtaccgcagggcggcgtaaaatttaatgcaatgtatggaaaagggatcataggcggtgacaaggccattttgatgaaacctctttcctttatgaatcttagcggaggccctgtccgtgatatggtgaattttttcaagatcgatcctgaaaaggaattgatcgtgatcagcgatgatattgatctggagccggggcagctgcgaattcgtaagcagggcagcgcaggcggtcataatggattaaaagacattatccagaagctgggtactcagaatttcgtcaggatcaaaattggcgtaggtgccaagccccaaggctgggatctggcggatcatgtgttgtccagattcccggacagtgaacgtaagctggtggatgaagcgatccgggaggcggcagatgctgttgaaaaaattattgcacagggaccggatgcggccatgaatgaatataatcggaaaaagaaaatatgaaaacatttattcaacctttacacaatcttgcagagtttgaagaaatacagaaatctataaaaaataacaaaggggtgttgctgttgaccggctgcaccctttctcaaaaagcgaatatgattcacggattgtctgacatgttccggcgtcgcctggtgatctgtgaggatgaaaaaagagcaaaggaactatatgaggatacatgtttttatgataaaacagtgctgtattatccggccaaggatctgcttttttttcaggctgacatccacggaaaccttctgatcaggcagagaatgcaggtgatccaggcacttcttgagagggaagaggttacggtttttaccagcattgatggctgcatggattatctgatgcctctggataaaatacagaatcgggtgcttcatttttacaatgacagtgtgatcgatatggagcagctgaaaaaatccctggtagaactgggatatgagcgtgtaggccaggtggagatgccggggcagttttcagtccgtggaggcattgtggatatttattcgctgacagaagaaaatccatggcgtatagagctatggggagatgaagtggattctatccgcagctttgatgcagaaagccagcgttctttggataatctggaagaaatcatgatttatccggcagcagaaaaaacgctggacaaaggtatggtatcttttcttgattacttcccagaggaggaagctttgattttcctggatgagcctaaccggctgacagaaaatggccaggctgtggaagaggaatatcagcagagcctgatgcacagggaggaaaaaggggaacagaagcttccgggacagtggctgtgcaggtttgaggatgttaagaaaaacctgaacaaaagaaactgtatcgccctatgtgctttggaacccaaccgggaagggtggagatttacggataattttgggctgacggtccaatctgtaaattcctataacagcagctttgagctccttgtaaaagacctttttaaatacaaaaagcagggatatcagattgctctattatccggctcacgtaccagggcagaacggctggcaaaggatctgcaggctgaaggcctgaatgctttttatagtcaggattatgaccgggtgatccagccgggagagatcatggtgctgtatggccatgcaagcagaggctttgaatatccgttggtcaaatttgcagtgatgacggagacggacatctttggccaggagcagaaaaaaaagaaaaaacgaaaaaaatataatggcaatcatatccaggatttttccgagctttccattggagattatgtagtccatgaaaagcatggattggggatctaccgtgggattgagaaggtggaagtggataagatcgtcaaggactatataaagattgagtacagagatggaagcaacctgtatattctggctactcagctggatgccctacagaaatacaccggcgcagatgcagacaggaagcctaagctgaataagctgggaacacaggaatggaaccgtaccaaaacaaaggtgcggggagccgtaaagaatattgcaaaagagctggtggagctgtatgcagccaggcaggaaaaagaagggtatgtatgcggcccggatactgtatggcaaagagaatttgaggaaatgtttccctatgaggaaacggacgatcagctgatggccattgaagataccaagaaagatatggaaagcaccaagatcatggatcgccttgtatgtggcgatgtagggtatggaaaaacggagattgccctgcgtgctgcctttaaggctgtacaggaaagccgtcaggtggtgtatctggtgcctactacaatcttggctcagcagcattacaatacttttgtacagaggatgaaagaatttcctgtacgtgtggatctgttgtgccggttccgtacgcctgcccagcagaagaaaacactggatgatctgaaaaagggacaggtggatattgtgataggtacccacagagtcctttctaaggatgtaatatttaaaaaccttggtcttctgatcattgacgaggagcagcgcttcggggttgcacataaagagcggattaagcagatgaagaaggatgtggatgtgctgacacttactgccacacctattccaagaacccttcatatgagcttgatcgggatcagggatatgagtgtgctggaagaaccgcctatggatcgtatgcctatccagacctatgtgatggagtatgatgaagagactgtccgggaagccatcaaaagagaactgcgccgtggcggacaggtttattatgtatataatcgggtgacagatattgatgaagtagcttccaggatcggaaagcttgttccggatgccagggtagattttgcccatggacaaatgagcgagcgggaattggaacgggtgatgtatggttttataagcggtgagatcgatgtactggtttccactacgatcattgaaacagggctggatatttccaatgtgaatactatgatcattcatgactcagataagtatgggctttctcagctttatcagttgcgggggcgtattggccgttccaaccggacagcatatgcatttctgatgtacaggcagaaccgtatgctgaaagaaacagcagaaaaaagactgtctgctatacgggagtttacagacctgggaagcgggttcaagatcgccatgcgggatctggagatccgcggggcaggaaaccttcttggagcgcagcagcatggacatatgaatgcagtaggttatgatctgtactgcaagatgcttagtgaagcagtcaaagaggctaagggcattcagaccatggacgattttgagaccactatagaccttgtaatggatgcatttatcccggacacctatatatccaatgagtttcagaagctggatatttataaacggatcgcagggatagagtctcagcaggattatgatgaaatgctggaagagctgatcgaccgttttggggaaccgccaaaagcagtactaaatcttctggccattgcccgtctgaaggcactggcacaccaggcatatattacggagatcaaacagacatccagggagtgcaggatcactttatatgaaaatgcaaagatcaatccggcagggattccgccgcttatggaaaaatacagacggtccctgcaatttaaaaacgatcagacgcccaaattcctgtttgcgccggtaggacctgtggttcctgcacttacccggtttgcagaggaattgctggaactggtggaataaggggaataaccaagcacagtcggtcccagaccttttacgttactgttcactccgttcacagtaacgtagccaaaattcattccagattgcctgcggcaatggaatttt

SEQ ID NO: 114 - DNA, 27039 bp, Unknown
  gut microbiota DNA sequence
cctgatgaggaaaaacaggatatactataaaaagtgtaacctgtgatacaggtgcgtcagattggaggaagatatgaaggatttattgaaaagaacaaccatcgcagccctggccggagtgctggcagcagggatgtttacaggctgcggtgagaaaaaagtagatggaacaaagacagttgctactgtagatggtacagacgtgccgatgggtgtattaagtctttttgctagagagcagcaggcacagacaattgctatgtatcagcagtttatgggtggcagtgcttccaatatctggagtggtgtggcagatgaggatacaggagagacttatggagagagcgctgtaaagagtgccctgaagcaggtagagattctgtacgtaatgaaagagaaggctgcagattacaatgtggagatcacagaggatgagcagaaggccattgaggacgctgcagcagcttttatgaaggataatgatgaggatacgatcaaggagctttctgttacagaggatcaggtgaagactttgcttgagcttgagacttatcagaagaagatgcaggatcctatcaagaaagaaggcaatattgaggtttctgaggatgatgcacagcagtcagcctttacctatgttaatatttcattgtccggagatgatctgacagatgacgatattgccaagaggaaagagcaggctcaggagatccttgataaggtgaaagaggatcccacagcagatatgaaagagatcgctaagggggtagatgacagctataccgcattaaatggcacatttactaccaaagaatctgatgatgaggatttccagtctactgcatatccggatgaagtgctcactgcacttcgtaccctgaaagagggtgaagtttatgactctcttgtagagacagatacagctgcttatatcctcagactggattctgagaaggatgaggatgctactgcttccaaggttaaatccgtaaccactacaaaagagaataaatattattccgaaacaaccgagaagtggctggatgatgcgaaagtcacagaggatgagaaggttcttaagactcttacattctcagataatcatactttcaccatcaaagctaccacatcagatgcagcaggtgacagcacagaagagacagcagaggaggccgaggtaacacctacagaagaagctgcagaggagactgaggtaacacctacagaagaagccgcagaggagactgaggtaacaccaacagaagaagctgcagacgatacagaagaatgatagacatatcagaccaataaaaatgggtacgtggcacagatcagtgctgcgtacccattttttaatatgagcaatttattttcaaatcagctggaagtgcttcattgcattccagatcccattgtctgtaatatctgtggtgcggtaagtacaaaaaggaaagatctcaggcatggagttgcccatggcaatgctggtgcctgcatatttcaacatagccaggtcattggtgctgtcgccaaaagcaaagctgtcttccagggacatgccaagatgatccagcaggaactggatgccggtagctttcgtatacctggcaagagtaacttcccatacatcatgcccatgatcaaaacagatcatgtcattttcctgggcatatttttcaaagcctgcccggtcagagtctggcccaatggataccagatatttgtcgaaggtataagtggcagctttttctccagtgtattcggctatgttctccgtaggtgccattttccggatcatagggaaaacaggatgatggtgcggctcaccatcatataaaattgcatcacaccgctcaaaatacgtggggatatggaattgacgcagcttttccacaatatccacgcattggtcatgggggatggattgagagaaaagcagctggtcattcatgtaaatctgagtgccgcagccacatacataaccgtcaaagccaagagtcagcagatctttagggatgatcacacgggtgcggccagtattgataaagcacagatgaccattctttctggcctgggtaatggcctgggcagtgctttcgggaatggtacagggcggtgctgtgacgagagtgccgtcaatatcaaaaaacaggatttttctattcatcgtctacctcattatccggatattctgtgtcttcagaaagattgcccatatgtacgcagatgccattaacttcaatctcaccttccatagggatcaccagacattttcgaccgtcaattactttggtctcgatcaattctgcacgctcaggatcgatctttaccactacatccggtgttttgacttcaaatttacgggggctggcaatattggaggccatcagggaaggctgatctcctgccacaagttcatactgctggtcaaaggtatccagcttttcttctgccacgccacagtcctcaagaagcctcttcacttccggttttgtgagcactaccggttcaggctcatctttctgtgcttcgatcagttcattcagcttctcatggatactgatcactgtattgtagtcacagtcatctccaagggtttcttctacaagcatgttaaaggaatcccgctgtccaccagcagacatgggagctgtacagcccagaacctgatcaataaacaaatcatgaagtgcttctgcatttttggaatagtataaaagtccgtggatgtctgtgctccggtcattaaatacggggaaaagaaaaccggactccggcatttccacgatccagtcgcggatacggtcttcaatcagatttgtctctgcattataacaaagtcctgccttagaaagcttaaccgggcagatgctgcaaagaagatgctcatagatctcgtcagatgcatcaaacatgtcaagaccgtcagaagatttgcctggaatatcatatactgcatggacaaggataatgtaataattctctggataatcgtaattctcaatgatccggtcatagaactgctggatcagttcatcgtcggtgagacggctggccctaagacgcataagaaattcctgggttcctccatcagcttcctgattcgttggaaattccatgttcagcaggttcttgccaagggtaccggacagggttttcttgaaaatctcaaaatatttgaacatttcttcctcggaaagggagagaaaggcttcttttaattctgttttcttattcttgtcaccatccacataacagccgcagatccttgtaatggaacaattggctggtgaaaactgttttttgatctcggaaatttcttttttattcatggttgatcctcctcgtctgctcattatatcgcaaaatcttttgacgggcaagaaaacaaaaaatcatagatttcttttgataaataagaaaaacctaatggataatggtaaaagtgcataaaaatgaacaccaaaaactgttaaaaacaattaaatacgttaagaaatttatagatagacaaaaaaatattatatttatttcctaaacaaggattgctaaaatataaaacatcaagagcggtacgaaccgcaataaaaggaggacgttttcaatgaagagaaaagtacttgccagcttactttgtgtagcaatgggagtaacaatgatcggatcaacagctgtatttgcagaggacgcagctgaggaaactacagatgaggcagcaacagaggaaaatgcagaggctgaggatgctgatgcagaagaagctgcagatgatacagcagaggaagcaagtgattttcttgcaaaaccggatatggaaggcgttgatgttgataacgctaagatcggtatcagtatttaccagttcacagataacttcatgacactgtatcgtacagagttagttcgttacctgaccgaagaccttggattcaatcctgacaatatcgtagtacaggatggtaagaatgaccaggcagagcagaccaaccagatcaacaacttcatcacagatcaggttgacgttatgattctgaaccttgttcagtcttcttccgctcctcaggtaacagatatgtgcaacgaagcaggtatccctgtagtatatatcaaccgtcagccagatgagacagagtctgacagatgggcttctgacggaatcaaagctacatacatcggtgcagatgctagacagtccggtacattccagggcgaagagatccttgagacagagaacaaaggtgatatcaatggcgacggtaaagtttcctatatcatggttcagggtgatccggagaacatcgatgctcagtacagaacagagtactccattaaagctcttacagatgctggcgtagaagttgatgagcttcttcttcagagaggtgactgggatcaggctaaaggacagcagatcgtacaggatgctcttacacagtacggtgatgatgtagaagttgtattctgcaacaacgatgctatggcacttggtgctcttcaggctattcaggcagctggcagaacaattggtgaggatatctaccttgtaggtgttgatgctcttacagatgctgttcagaatatcgttgatggcaacttcacaggtacagtattcaacgattacttcggccaggctcagggtgctgctaaccttgcagttaaattcctcaaaggtgaggaagttgatcctgtaaacatggttgactatgtaaaagttacagctgacaacgcacaggaaattcttgacaaaatcaaataattcagatccgcattgacagttgactgaacatttcgggtgtgtctgaaggacacacccgattttatgaacaggatgtgactattcagtaggtaatatgccccaaagataaagatactgaacagttacaacagggattatgattacaatggctgttcggccaatatccaggaaaggagagagtgggatggcagaatatagattggagatgcgcggtgtaagcaaaagcttcccgggtgtcaaagcgctggacaagataaatcttaaggttcggccgggaaccgtccacgcccttatgggagagaacggcgcaggtaagtctacactgatgaagtgcctgtttggtatctaccatatggatgaaggagaagtttatgtagacggtaagaaggtcgacattaacaatccggatgaagcattacataacggactggcaatggttcatcaggagctgcagcctgttccggagcggacgatcgctgagaatatgtatcttggccgttttccgactaagaaagtgggaccacttcaggtgatcgaccacaaaacaatgaatgaagaggcaaagaaatggcttgataatgttaagatgccttttgacccaaagaaaagacttgggaatttatccatttcacagatgcagtctgttgagattgccaaggcagtttcacaggaagcaaaattgatcattcttgatgagccaacctcatctctgacagataatgaggtagaagctcttttccgtattgtacgtgatttacgtgacagaggcgtgtcctttgtatttatttcccataagatggcagagcttcgtaagatctctgatgacattaccatcatgcgagacggtacttatgttggtacatgggaaatgaaaaacatcagtgatgatgatattgttaaaaacatggtaggccgtgagcttacaaatatttatcctccccttgataacacaccgggagatgtacttcttgaagtggacaattttaccagcattcacagtaattctttcaagaactgttcctttaagctgagaagaggtgagatccttggattcggcggtctggttggagcacagcgtacagagctgatggaggccatctttggtatccgccatactatcagcggcgaagtaaagctgaacggaaagccactgaatatcaagagtccgaaagatgccatccgcaatggtatcggtatgatcacagaggaccgtcgtggaagtggtattcttggatgtctgtctattgcagataatatttcgattgcatcccttgaccattatgtagagggcggcgtgaagctgaacaacggaaagattgaaaagctggttcaggataatattggaaaattaagtatcaaaacaccaagcagcaagacattgatccagtctctgtcaggtggtaatcagcagaaggttattatttccagatggctggcaaataacccggatgtactgattatggatgagcctacccgaggaatcgatgtaggagcaaaatatgagatctatcagattatgatcagtcttgcaaagcagggaaaaggaattattatgatctcctctgagatgcctgagctgatcggtgtatccaaccgtatcatggtaatgtgtaacggtaagattaccggagaggtttccggtgatgaggcaactcaggaaaacatcatgtatttcgcaacacagttctaagcgaaggaggataataaaatggataagacaaaaaagtttgatcttaaaaaagttttgttggataacggtattatcgtacttctgatgctgctggtaatttatgtaagtattacagagcctaacttcagaagcttcagaaacattatgaaccttgctatcaacgcagcacctcgtgttatcattgcacttggagtcagcgcatgtctgatcacgaaaggaacagacctttctgcaggacgtatggttggtctttctgcctgcctttccggtatcatgcttcagaaagcagatgcacctggtaaagtatggcctgatttcccacagctgaatgtatgggtagttcttctgatctgtatggcgctctgtgcagtatttggtctgatcaatggtgttgttatttcttatttaagtgtacctgcattcatcggtactttgggtatgcagatgatcgtttatggtattgcgcaggttgttacaaacaacgtgcccatcggtggataccgtgcagattatacagctgttacacagggaaagatcggcggtgtattcccgcttctgttcctgtacctgatcattgcagcaacaattttctggtttgtttacaattatacacgtcatggtaaatatatgtatgcaatcggtggtaatgaggttgcagctgaggtttccggtgttaatgttaagaagacaaaaattatcatctacgtgacagcagcttgtatgtatgcaatcgcaggattccttcttggtggtaaatccggtggtgcttctactcagatgggtaacggatatgagctggaggctattgcagcttgtactatcggtggtgtctctgtaaacggtggtatcggtaagatctccggagttatcatcggtgttgcagtattcgagcttctgaaatctgctctgcagttcctgggactgaacccgaacctgcagtacattgcacagggtatcgttatcgttgttgcgatcgctctggatatcagaaaatacattgttaaaaaataataagtgtaagagccaaaaaatagttggaagcttacgtttccccactggatacccttgtattcagtggggattttttatacaatagaaagtgttggagatacagcagataaatgattgggaaagtgaatatttacgtaaggtatgctgcatttagataaacgagaaagacggataggatgtggattatggatttatataagattttattggtagatgacgaagtggatgtgcttcgtgccatgaagaaaaagattgactgggaggctatgggattctgtctggcagggactgcggaaaacggccaggaagcgttggaaatggcagagcagctgcatattgatgtagtgatgacagatatcaaaatgccttacatggatggcctgactctttgcaggaaactgaaagagaattatcgtaatatcaaggtggtcatttattcaggatttgatgattttgaatttgccagagaggctgtgcatctggaggcagaggagtatctgctgaaacccatcagtgtaaaggatatggaagaggttctgaccaggattcggcagaaactggatgatgagatcaatgaacatcggaatatgaaccggctatatgaatattatcagaaaagtcttccagctatgcaggaacagctggttatgggtatcctggaaggaaaggtgaccggagagcgggcgcagaatatgctggaaagctatgaaatggatttcagggcaccttattatgtggtatccctgctatatgtagatacaggctccggagagacggcagggcagaaccagcagctgctaagtatttccctgaaggatatgtccagggattatctgaatgagcggatgcatttttacagtatcagttatctggacgaaatcattattatttttatgttgaaagataaaaatgaaatggagaaagcactgtatcatttggatcagatctgtaagatgggggatcgtgtgctgaaagtgccggtaactgcagcagtgggacagatctgcgaccatgtggattatctgaccacttcttatcaggaagccagaagtgctatggaatacaggaccattatgggaggcaaccgggtactgtacattcatgatatagagccaagccccaaggatgcggtatcatttctggaatatgattttcagaatctggtgcgggcagtaaagctgggaaaccgggatgaaacagatggggcgatccggcagtttatggacagcatccgtagtttttccattaccccaaatcaataccagctgatattcatggagctgattacggaacttatgaagatcggaagatcctacaagcttaagacaaggcagattttcggggaaatggatgtaccctggcaggaattatataaacacgtttctatagatgaactggagaactggctgcgggacgtgtgcaccaatctgcggcataccctccgtcatgagaggacagattccaccatgaagctgacggagcaggcaaaggcgtatattaatgagcattacatggagaacgatctgtcagcggataccctgtgccgccatctgaatgtaagtgctgcatatttttctaccattttcaagaaagaagtgggacaaagttttgtggcatacctgacaaaagtaagactggagcatgcagtggaattgcttcgtactacagaggacaaaacatatgtgatcgcagaagaagtaggctacacggaaccaaattacttcagttatgtatttaagaaggaatacgggatttcaccgtcaaaatacagggcaagtctataacaataagtaacaggagagcaggatgaaacagatcaggaaattatggaggaagctgacgaatgctgtaaataaccgggggatgcagtttttgatctctctttcatttacctttgttgctcttgtgggaatggcatttatcggagtgtttctttatcaaagctacggacgggcttccgaagatgtagtgatccaggatacccagcagcttctgggacaggtggaaatgaatttaaatacttacctgcggaatatgatgcgtatttctgatgcgatgtattacaatgtgatcaaaaatgtggattttgcaagggatgacattagtcaggaattaaatcttctgtatgaagtaaataaagacaatctggtgagtatttcctgctttacagaggagggagagctgatcggggcatcgcctgtgggcactatgaaagataacgcagatatccaggatcagacctggtttaccagcgcaaaggacaaaatggagaatctgcatttttccgaattgcacgtacagaatatttttgaaaacagcagcggcaggtattactgggtagtttccttaagccgcggtgtggaattgaccagtgatggtaagctgtccggcggtatcctgcttgttgatatggatttcagtggtatccgccagctttttacaaaggtcaacagccaggaattaagttatgtttatcttgtggatggggatggcaagatcatatatcatccaaggcagaacctgattttttccaatatgctgaaagaaaataaccagcaggcagtcagctatagtgatggccttcacagagagaatttccagggacaggaccggatggtgatggtaaaaaccgtaggttataccggatggaagatcgttagtgttacgcctatgactaatttttatcaaaacttcagtcagaccagaatcatggcggtgatcataatcattatttctatacttgttatgatctttgccaaccagtttgtggcagtacgtgtgtctatgcctttgaagagcctggaggattctctgcgcggcataggtgtggagcaggaacgactggcagaaggagccggggaagggatctacattggcgggccgccggagatccagcatcttggggaaaccatcaaaagtatggtgaagcagcttcgcaagctgacggatgacattgtaaaagagcaggaagagaaaaggaaaagtgagctggatgctttacagtcacagatcaatccccattttctttataatacactggattccattatgtggatgatcgaggcagaacagtatgatgatgcagtatctatggtacaggcactgggacggcttttcaggatcagcctttccaaaggaaaaaacatcattacgttaggggatgaactgcagcacgccagaagctatctggatattcagaaataccgatataagaataaatttgtttcctgctttgagatcgaggaaggaattgaaaagtataagacgatcaagctgatcattcagccattgattgaaaatgcgatttattatggcatggaatatatggatggtgacggagagatcaccattcgtgcctacaccagaagatcagatctgtttatcgaggtggaagataacggccttggtatgccagaggagcaggtggaaaggcttcttacagatgatacccgaatacgaagtaaaggatccggtataggtcttcggaatgtacatcagaggatccagctttatttcggcaaagcatacggactgaagatcatcagcgagccggatcagggaaccatagtaaggatccatctgccaaagacagaagaagtaaaggcgccaggggaggtggaagcatgacgcaaaaaagaaaccatattgccatctgggcagtgatctttgcggcggtggtgcttcttgctgtgtcctattattatggggcaattcgcggcacttcggacagtccgtctgtgtattccgttattttatatcagaatacggacaatgaatggactactcttctggaggggatccgtcaggccgaggaagatttcgggctgaaagtgaattatgtgaatatgagcacaggagatacggcacaggagcaggcagaattgatacgccgggagattgattccggagtttcagggatattatttgcagcggtggacagcaaggctttgggagacgcactgaaagatgataatatccagatacccctggttgcactggaaaccggggtttcaggcataagcagcagtaattatttcagcattaccggggatgattatggtatgggccaggcactggggcaaaggatcctgaaggatatggaagaacagggtggccagcgtgtagtgacagtgatccgtgaatatatggaacgggacagtgtaagccagagatatgaaggtcttgtggatcagctgaaaaaagctgagccgccggtggagatccaggatctttccaggaaggaaggggatttcagcctgcgattgtatattggaaccaatttccagaaatgtggacagtatattgcggctctggataaagtttctacagaagaagctgcagctgcatggcagggagaagcttcttccagggaacaggaaggaaaaactttccgcatttacggaatcgggaatactctgcagacggttacagatctggataatgggctgctgcaggggtttgtataccagaatgagtttaacatggggtatgagggaatacagacattggtggataaagaaaaaaagggttattttacggagcaggtcaatataaagtacaagcttgttacacaggatactttatatgagtcagacaatgaacgtctgcttttcccaagcatctgacggaggcttagatgaagaaaaaaacagaaagaatatacaggaccataggagtctttacaactgctgctattgtgttttccggatgcggaacaggtcagagccggaaggagcaggatgggaaaaatctgaagatcgggatcagtgtgtatgatcaatatgatacgtttgtgtcagagttggtttctaattttcaggactatgcaaagaccagggaaaaagactgggggatttccatcactatggatgtggaaaatgccaataaaagccagatgatccagaatgatcagatggatgattttattaaaaatgggatggacgtggtctgcattaatctggtggaccggacagatgcgtccaccattattgaaaaggctcaggctagtgatgtgccggtgatcttttttaacagggaactggtacaggaagatctggaacggtgggacaagctgtattatgtaggtgcagatgcttttgaatcaggagaactgcagggtgatattctggtagaaaaatgtaaaaaggattttaaccgtattgataagaatggtgacggagtacttcagtatattatgctggaaggagaagccggccataacgattctatggtacgcaccatgtctgttatcaatgagatcactggaagtggttatctggtagagaagctttccgatgagatcgctaactggaacagggatcaggctgcaaataagatgaagcagttcctggagcggttcggaaacaggatcgaggtagtgcttgccaataatgatgatatggcacttggcgcagtggatgcgctggaagctgcaggttatgatccggattcccaggactggcccatggtacttgggatcgacggtacaacagtgggactgaacgcagtcaatgatgggaaaatgctgggaactgtgctaaatgatgcagcgggacaggcagatgggatgctggaattggcaagatctatcacggcagggacaaaacttccggaggagtatgagcttcaggacggaaagtacatccgtatgccttacaggatcgtcacccaggagaacctgggtgagatccagatgcttcttatgaagaaataggatattcttaaacaaacagcaggtcatgatttacggttgtgtagaaaagctgacggcaggcgtcatagtcctgggtctgggccagtgcccacatcagctttgttacagatgcttccagagtcatatcataggattccaggataggaaaacgctctttgatcattttgcctacctgatatacttccaggtcactgccctcgtgtgtgacctgggtagccatacagacgatcttgccggaggatatccatgtttccagtgaggcctggaagctggagtctccatagtccggaagccctcctaccccaaaggattctatgatcagtccgtcataggaatccgccagcatatccaggatacgtccgtcaatgccaggaaccagcttcaataaaaagatctttcggttcatatcatgataaaactgaagaggccgggtggattgatctttatcatcaatatagaagatgatccgttcatcatggatagaagcaatatccggataattaatactggaaaaagcattatagcttttggaaaattctttctttgcccgtgttccggcaatgactttgccgccaaatacaatggacacgccgtgggcacggtcatgggaagcaaaacgcaggctgtccagcaggttggaacgggcatcggtaatagccaggtcgatgggcttttgcgcacctgtgatcactacaggacgccggttgttctggatcaggtaggaaagggcagctgcagtgtaagccatggtatctgtgccatgacagatcacgaatccatcataaaattcatactttttttcaatgagagccgccagctggatccagtgctgggggcttatattggtactgtccagagaaaagggctgcaacgtatcaatggtgcagaaggcggacgctgcagggatataggagagaagttcctctgcagagatctgaggagaaaggccgtccttggtatatttggatgcaatggtgccgcctgtggcgatcagtaagattttcttcatggtacctccgaaaagatcatttttgaaagatcaaaagttttatctgtataaaagctttatctgtatattgttgttttatcacagagcctattttaagatcattttactttgtccggaaatcctttgtcaaggtggggttacctatcggagaaagtctgtaaggctatatgagttacctgtcagagaaagccggaaaagccatataagttcctgtcggcgaaagccataacctgcttattgacaaatacaggggataaaactatcataggaataataataaacgcaggagaagacaggatggaacagacattgcagcagataaagacagacagaacaaagagcagatacctgcgggcctttaaagccgcatttccttacacgattcctgtactcacaggctttgcggcgcttgggatcgcctatgggcttctgatggcatccaacggctatggagtattgtgggcatttcttatgagcgccatcggatttggaggaagtgtacagtacgcaatggtgccgcttctgaccactgtatttgaccccctccaggcgtttttactcagctttatgatcaatgcaagacatctgttttacggattatccatgctgggtaaatataaaggtcttggaaagaaaaggtttttccttatttttgcattgtgcgatgagactttttccgtagtgtccagtgtggagccgccggaagatgtggaaaagggattgttttatttttttatcacttttctgaattacttttactggtcagccgctacagtaacaggggcgctgatcggtggaatgatcacatttgatactacaggtttggactttgtgctgacagcgttatttgtggtgctgttcatggaacagatgaagaaaaaagaaaacagaagctatggtatgatcgggatcgcaggagcagtggtcgcagctatgatctttggatccgaaaacatggtgatcccatccatgatcatcattatggcagtgcttctgtttatggggaaaagtaaaaaaacacagaaggaggatgcgtaaatgtttttaacaccggcacagacgatgatcatgattctggcagtggcgctggggacgatgatcaccagatttactccttttctgttgttccccgattccaaggaaccgccgaagaccgtgctgtatcttggaagggttctgccaccggcaatgatgggacttcttgtggtttattgcctgagaaatgtgtcactgataagatcacctcacgggataccggaactgattgccattgcggtcatcgttgttttgcataaatggaaggaaaatgtgttgttgagcataggaacaggaactgtggtttatatgcttcttgtacagcttgtgttttaacagggaaaaggaggggagtattatgacattaactcagttgcggtatgcaatcacggttgcaaattcttcttctatgaatgaggcggcaagaaagctgtatatttcccagcccagcctgtcttctgccatcaaggagctggaagaagagataggggttgagcttttcagaagaaccaaccggggcatatccgttactccggaaggagaagaatttatgggatacgcaaggcaggtggtagagcagtatgcactgatagagtccaagtacgtatccaaagaaaaagaaagaaaaaaatttagtgtatccatgcagcattatacctttgccgtcagtgcttttgtacagatggtcaagcagtttggtatggatgaatacgaatttgcagttcatgaaaccagaacctatgacgtgatccaggatgtgaagaattttaaaagcgagatcggcattttatatctgaatgatttcaacagaaaagtgcttaccaagctgttccatgagtccaacctggaattccataagatcctggaatgtagtatttacgtgtatatgtggaaaggacatccgctggcagacaaagaagagattaccttggaggaattaagggaatacccctgcctgtcttttgaacagggaggatataattccttttattttgcagaagaggtgctgagcacttatgaatacaaaaggctgatcaaggcagacgaccgagctactcttctgaaccttatggtaggattgaatggctataccctgtgttccggcatcatctgtgaggaattgaatggctctgattactgtgctgtaaaactgaagtccgatgaggtgatgaccatcggatatctggtacgccgtggagtaaccataagtccgttagggcagaagtacctggaggagatttccagatataaggataaggccctgcggtaaagattatttgcgtttgtgcactctgcatttacccataaggagtcagtaaaagctatggggtaaatgccagtgacggacttttgtacgtcccacacggctataggaacaagctataactagcgctaaaaattaagaactaccacttttcatagagaggtggtatagtatcactatcgacgatgaaagaaaaagaaagggtaacaagtgacatgtccgatatcctgattcaaaatgtgtgcaaaactttttccacaaaagagggagaggttcaggcactgaaaaatgtaaacttatcaatcggatccggcgatatcttcggtatcattggaatgtccggcgcagggaaaagcaccctggtacgctgtatgaatttcctggaggtaccaagtgaaggccaggttcttatagatgggaaatctcttggggatttttcagagaaagagcttcggaaggagcgtgaaaaaatcggaatgattttccagcattttaatctgctgatgcagaaaaatgttctggaaaatgtatgctttcccttatacatacagggaaaaaagaaactggaagcaagaaagaaagcattggagcttctggagatcgtaggactggcagataaggcaaatgcttatccggcacagctttcaggaggtcagaagcagagagttgctattgcaagagcactggcatcggatccgcagatccttctctgtgatgaggctacaagtgctctggatccccagaccacatcctctatcctggagcttttaaaggacatcaaccagaaattccagatcactattgttatcatcacacatcagatggctgttgtacgtgagatctgtactcatgtagcgatcatgaaagacggtgaagtgaaggagcagggactggtggctgagatattcaatcatcctaaatcccaggtggcaaaggaactgatcagccgggatacaggcgcagatgtggagcatgtagtcacaaagcctgagatccagagcggcgagaagatccgtattgttttttcagagaattccgctttcgagccggtgatcgccaatcttgtacttatattccatgagccggtaaatatccttaaggctgataccaagaatgtaggtggtgttgccaaaggagaaatgatacttcaattcatgaaagacagcagtaatgttgcagaaatgaaagagtatctgaaagagcatggacttgagataggggaggcggactgatatgtggacaaaagaagtaacagatatgatcatagcaggagttggcgaaaccctgtatatgacactggtatctacccttctgggttatgccttcggactgccccttggtgtgctcttaaaggtatctgacaaagaaggactgaagccaaacaaacttttatataagattctggatgtgatcgccaatattttcagaagtatcccatttctgatccttctgatccttctgattccacttaccagattcctggtagggaaaagctatggtacaacggccaccatcgtgccgctgaccattgcagccattccttttatcggacgaatggtagagtcttctctaaatgaagtggacccgggagtgatcgaggcagcaagatccatgggagcaagcaactggcagatcgtgatcaaggttatgcttgtggaagcacgtacttcactgatctcaggagctaccatagcaacaggtacgatccttggatattccgcaatggccggtacagtaggcggcggcggacttggagacattgccatacgatatggatatcacagatggcaggctgatatcatgatcgttaccgttgttctgctggtgcttctggttcagctgttccagtccattggtatgatgatcgccaacagactggataagagaaaataacataataataaaagaaataacaaaataataagagaattaataaaataattaaagattaacggaggaaaaaatattatgaaaaaattaatcgcagcagctcttacaggagcacttgtacttggtaccgtaggcacaactgtagtatttgcagatgatgatgacaagaccatcacagtggcagcttccgagacacctcattctgagatcctggagcaggcaaagccaatccttgaaaaagaaggctatgatctggaggttactgtatttgatgattatgtacagccaaacgaagttgtagagagcggtgattttgatgcgaactacttccagcacatcccatatcttgacagctttaacgaagagaaaggtacacatctggtaaatgccggcggcatccattacgagccatttggaatttatccgggaacaaaagacagcctggatgatctggaagacggagataccattgcagtaccgaatgacaccacaaatgaagcaagagcactccttcttcttcaggataatggtatcatcactctgaaagacggtgttggattggaagctactgtaaatgatattgaggagaatcctcacaatgttgagatcgttgagctggcagcagagcaggttgcacgtgtggcagatgagacagcatatatcgtattaaatggtaactatgcccttcaggccggatattctgtagcaaaagacgctcttgcatatgaaaaatccgattccgaagcagctaaaacatatgttaacgtaatcgcagtaaaagaaggaaatgagaatagcgacaagatcaaagctctggtagcagctctgaaatccgatgagatcaaagacttcatcaatgagaaatatgatggcgctgtaattcctttcgatgacagcacagaggatgcagcagcagaggatactgcagatgcagctgatacagaggacgcagcagatgctgacacagaagcagcagctgatacagacgcagcagaggatactgcagaataaataagatcctgacatgcaggttgtgacgagacttattcaatgtatgacagcagaaaccggcagtaatatagatcccgcagatcagacaaatgtttggtctgcgggatttcttctttttgacaaaacatggcaaatcctttatcatagaaataagaatgataatgtgaggcaataaaagatatgaaggaaacaccagacaagaagctttccatcatagatgtggcaaagctggcaggagtatctacagctactgtttccagggtactgaatgggaacggaggttattccaagaaaacagaagaaaaggtactgcgaacagttaaagaatgtgggttcacacccaacgggaatgcagtcagcctgcgtaccaaccgcagccattgtatcggagtgatcgtgccggatattaccaatgaattttttgcaaaaattatccatgaactggatatttttttcctggaacatcattattccctgctgatctgcgactccaatgaagattatgaactggaggacatgtatatccacaatctgatccagaagaatgtggatgggatcatatatatttccgggcaggatgagattaagaatatcagcagtgtagagacgatccctattgtttacattgaccgttgtccaaagaatgcaaaggtgctgatccagtcggataatgaagaagggggatatctggccacccgggagctgctggagagaggctgcaggaatattcttctgatgcgggatctgcgttatgcgtctaccattcgacagcgtaaagcaggatatctgcgagcactggaagaggcaggagtgccatataatggtaagctggagatcgggatctttccggattacgaggatgccaggattatgatggagcgggtacttaaggtgatgggctgttattttgacggtatctttgctaccaatgaccggatcgccctggcgtgtatccaggtgctgatgcagcatgggtaccgtgtgccggaagatgtaaaggtagtaggttttgacaatgtttccctcacagaattttgcaatccgtccatcactacgatcacccaggataccagatccattgcccttgcagcaggaaagtcagtactggacctgatcaaccacaaaaagataaaagaaaagatgacagtgattccggtagccctggagcaaaggcgttctaccgaaactgtctgatctgtattacataataagaggggccaccgaaaatacggtggtttttcttatttggggatgagtgcaaaatcgatctcccatcaagacaaaataaacctgtacatttgggaacggtatagtataataaggctgaatcaattattttgggaagtttagccggaaaagcgaaatagtatttcttcccgatgacgaaaggagaaaatatgaaggtaggatttggatgcgaccatgttgccatcgaactgaaaaacattctgaaggagcacttggaggaaaaagggtatgaatgcgtggattacggtgcatacgatccaaatgtaaaggtgaattatccagaacctggtctgaaagtggcagaagcaattatgcgtggagaagtagagaaaggtgtattgatctgtggtacaggtattggtatttccctggctgctaacaaggttcccgggatccgtgcagctgtgtgcagcgaaccatattccgcaaagcttacagtagagcacaataatgccaatattattgctatgggtgcacgtgtagtaggaccggagctggccaaaatgatcgttgatgagttctttggcgccaagtttgaaggaggacgccatgcagtgcgtgtccagatgatctctgatattgaagaaaaatacggagcaaaatggcacgaataattaaggccagacatatatttgactggacagggaaacagaaaatgcgttatacttatagagtaatcaatatacagatgccccagacagggcgtatacgcaaagcataaggaggatattcatgaaaaaagcattaagtattctgttaagtgctgcaacagctgtgacaatgcttaccggttttggtacttccgtttttgcagaggattccagcgctgctctgaagattgccattgtcagctctccatcaggtgtagatgatggatctttcaaccagaacaactacgaaggtattctggactttattgatgcgaacccggattctacggtaacacctgtcaaagaagaaacaggtgatactgcagcagctgtacaggcagtggcagatatcgtagcagattatgatgtgatcgtatgctgcggattccagtttgcaggaatcggcaccatcgcagaagagaatcctgaggtggattttgttcttgttgattcttatcctaccaatgaggatggagaagagactgcttacgacaatgtatatgcaatgcagttcaaagagcaggagagcggtttctgtgcaggtattgcagcagccctggaaacaaagacaggtaaggttgcagttgtaaatggtatcgcttatccttccaacgttaactatcagtacggatttatgtccggtgtgaactatgctgtgaagaattatgatgccaaagctgagatcgttgagcttccttcctacgcaggtacagatgtaacaggcgcaaacgtaggcggtaactatatcggtaccttctctgatgaggcaactggtaaggttgttggaaaagccctgatcgatgagggtgtagatattatgtttgttgcagctggtgcatccggcaacggtgtgttcacagcagcaaaagaggcagagggtgtttttgtgatcggctgtgacgttgaccagtacaatgatggtgtgaacggagattccaatattatgcttacttctgcactgaagatcatggacaagaacgtagagcttcagctgaacaacgtaaaagatggcagcttcaagggtgagaatgcccttcttggcgcagatacagattctacaggatatgtaagcgatccagagagatgccagctttccgaggatacaatttccaagatcgatgaagcttttgcaaaagtaaagagtggagagatcgtaccggcagctaactttaacgagatgactccggacaactttaccggattataagatctaaaggaagacagagagactgcatgccggcctttctgagttttccatgaaataagaggggtgttgtattatacaacgcccctttttcagaaggaggaagaagcatggcagattacattgtggaaatgcggcatattaccaagcgttttccagggatcgttgccaataaggatgtgaccattcagatcaaaaaaggagagatctatgcgatccttggtgagaatggtgcagggaagtctacgttgatgagcatgcttttcggcatgtatgaaccagatgaaggggagatctatatccggggaaagaaagagatcatcagttccccaagatatgctacccagctgaatatcgggatggtgcatcagcatttcaaactggtttccaattatactattgctgagaatattatcatggggattgaaccggtaaaaaaagtactggggatttttccatatgttgacattaaaggggcaaatgagaagattgcccgcctttccagacagtacggacttgaagtagatccaaagaaagtgatctcggatattaatgtgtctgttcagcaaagggtggagatcctgaaaatgctgtaccgtgaagctgaaatcctgattttcgatgagcctaccgcattgcttaccccacaggagattgagtttcttctgaagatcatcaagggtcttcgggatggaggaaagacgatcatcctgatcacacataagctggaggaaattaaaaaagtagctgacagatgtgccattctccgtagaggtgagttgatcgatgttctggatgtgcagtctaccagtacaaaagagatggccagcaaaatggttgggcgcgaggtgtcttttaccctggacaaaactcctgcaaagttccgtgatgttgtccttgatgttaagaatcttacgattacaaatgaggataaattccaggtagtaaagaatgtgtcattctctgttcatggaggggagatctttgccattgcaggggtatccggcaacggacaggttgagatcgcagatgccattgcggggctgatgaaagctaacagcggtcagatcctgctgaatggaaaggatattacagaatattccatcaggaagcgtactcttgaggggattgcctatattccggaagatcggcagacctatggactgattctggattttaccctggaagacaatctggcattgaagaattatttcaaggagcctttttccagaaagggcatcctgaataaaaaagaatttgagacttacggggaaaagctgatacaggaatatgatgtgcgaagcggacaggggaaccgtacacaggtacgttccatgagcggcggtaatcagcagaaagccattattgcccgtgagatccagcaggataccccgcttctgatctttgtgcagcctaccagaggcctggatatcggagcgattgagaatatccacaagcagatcctggcagagcgtgacaagggcaaggctattcttctgatctccctggagctggatgagatcatgaatctggcagataccatcggggttatctacaacggacagatccagaagatcgcagatgccagcaccctgaccaccaaagaggttggacagtttatgatgggtgtaaagaatgagaatgacaaagatggcagggaggtgaaggactgatgcaggaaaagaagaaaaagggaaatctattggtaagatttctgggaaatgaaaaatatcagtttcttacgattccgttatttgccatattgatcagtcttctggtaggggcagtggtactgcttttgcttggcaagaatcctcttgatgcatatgtgaatcttcttcagggctccgggatcctgcctaaggccaaatatgcaggcgggaagagtatgcttacagactttttcagctttatggactgctggactcctatgatctttgcatcattgtctgtggcagttgccttgaagaccgggctttttaatattggtgtatccggacagatgctggcagcaggttttatcacgacgatcacggttggatacagcaccttaagtgcaccgatcgccaagccgctggtgatccttgtggcagctgttgtgggtgcattggtaggaggcctgattggttttctcaaatatagatttaacattaatgaagttgtttcctctattatgctgaattatattattgagtatgtggtaggcttctttattaacacaagatatgtaaatcctatttcccgtcagtcccagaccgtgagcagtgaagccaggcttacgctttctggtacaaagatcggagatctgaaatttgacattccattgggaattattctggcggtgatcgttgttgttattgtaaaatatatttttgacagaacggttcttggttatgaattaaaggcagttggatccaatcagaaggcttccagatatgcaggtattccggttggcaagaatatgatccttgccatgatgatttccggacttctggcaggtcttgcaggagcgtcttattaccttggctattatgcgtccatacagcccaaggtattgtcaagcacaggctttgatgccattgctgtggcgatcctgggacattccaatccagttgggatcctgggttcttccttcctgatcaacattatcagcaaaggaagtacctatatgagttcctctcttggggtagatgcggagatcgcatctgttatcaccgggctgatcctgctttttgcagcttgtgatatgtatatccggtacagagtggataaagccaaagagaaccttgacaagaagaacgaaaggagggaatctcatgaataatgtaattatagatggcctttcttttgcacttcccctttttattatggcgattggcggtatttacagtgagagaagcggtgtgaccaacctggcactggaggggctgcaaggctttggggcttttacaggtgcgctggtggcatatatgctgatgcagtttaccagtgtggattcttccgctgtttattatgtggcgcttctgtttgctatgatcggcggtatgattttttctttgcttcatgccttgctttgtgtacgtttcaaggcgaatcaggtgatcagcggtgttgtgatcaacattctggccatggcacttactgcattccttacaaaggtgattaaccgatctgtatttgggacaccttcggacaaattcgatctgggtgtttctgccagatggacagttccggggctttcaaagattccggttctgggagcggtttttaccaatatttatccctttgaggttgtgatccttgtgcttgcctttgtggcatggtacctgctgtataagacccggtttggcctgcatgtacgtgcctgtggggataaccctcatgctgtggatgcggctggtattgatgtggcaaaagtgcgggtaaaagcagttatgatgtccggggcattgtccgggctggcgggtatttcctttgcttattccatttctgctaaattttcttccagcatttatgtaggatatggatatctggccattgcagggctgatcttcggtaactggaagatccttcccactttgggagcctgccttttgtttggctttgccaagtctgggggatatcagatcgtgcagaacctgggactgcccagcagttattcggatttgatcatgatccttccttatgtagcaaccttgctgctgcttatgctgttttccaagcataatcaggctccgcgggcacttggagagatctacgataaaggcaaacgctaagctttatagataagatttacaggcaaacgctaagttttatagataagatttacaggcagacaataagcttcattactttacaaaacagaatgcctctggtattatgatgccagaggtgtttttttatggaaagaaacaggatcgtaagatattttatctgcatctgcatgatcgtgatcgtattatcatcagggatgtgtattcagaaacgtgagacagattccgcgctttcttatgcgaattttcagatcagacggctgcatgcgaagattcctcgatccatggctggcaatcctccgtccagcacaattgtttctccggtaaagacagcaccagaagagtattatactgaagaaggcgctcctgtacgtttgatgaacatgatgcgtatagggtcagcagtacgtcagggtgtgcgttacagcattcgtctgatagcagcggcgcttctggcagtattaacagccgtgtatattagttattgctccaaagctcgcaggatggaacgcagttactgcacagacaggcgcagcgtgatcattcaatacatacagcatcaggatgggagcaaaggctgattccccgaaaacatgccatcaactggtacatcacctatttcatagtaaaaacggaggaatacgtccatggtagatgtttttgtagggatcatgatcgtagcggcaatcggcgtaggaggctggctggcctggtacgagagccgcagcactaagaaataaatatcccggatttaattatgcataaaaggataaaatcataaaaat

SEQ ID NO: 115 - DNA, 9149 bp, Unknown
  gut microbiota DNA sequence
attcatggaaatatttccatacccaagtaaaataagaaaaagccctcaaatgctcataaaataagcatttgaaggcttccaaacatctgcattgctgcattcaggaaattagtcctggatgtatggcattaatgccaaatgacgtgctctcttaactgctacagtaagagctctctgatgctttgcacagttacctgtaattcttcttggaaggatctttcctctttcagaaacatactttcttaactttgctacatctttgtaatcgatctcgttattctctttaccacagaatacacaaactttttttcttctgcgtccgcctcttctcttcatgggagaatccggtctttcgcctctattgctgtaagccatgattagcttcctcctatcttcttgttatcatccgtttgttcgtctgagaaatacctaattaaaaggcagttcctcgtcaattccatcagggatgttcataaatccgtctgcacttgccgcacttggtgtaggcatagatgatgccgcagcactgttctgaggatgggatgctgcataggaatcgctggaagatttactctctgcaaactcctgctcctcaactacaacctctgttgtataaaccttctggccgtcacggttggtataactgccggtctgaatacggcctgtaaccgcaatcttcagtccctgtctgaaatacttctcagcaaactctgctgtacgtccaaaagatacacagctgataaaatcagcggatgcctcgccatcacggcgaaacctcctgtctactgccaatgtatatctggcaattgccagtgcattctcccctgcggaatatcttacttcagggtctcttgttaagcgtcccattaaaattactttgttcattctatttacctctttcgatgatcggttgaacgggttcttaatggtgctttctgattaattgccaaaagcttatgcgtcttttctgacaactaagtatcttaatacattgtccatgatacgcatatgtctttctacttctgccggacactgagcatctgcttcaaactgaatgaagtagtagaagccttcatgcattttctgaatctcgtaagctaatttcttcttaccccattcttcaacttctgtgattgtgccattgtaacgtgtgatgtagcctttagctttctcaacaactgcatcacgtacttcgtcctcaacttttgcactcacaactaatgctaactcgtacttgttcatgcctgtcttacctccttatggtctattggccctttgcctgtcaaagagcaaggatatgaatatatcacgattgttaattctaacacattttcccggctatgtaaagtcctatttttctttttctaatgatttttattctctttataatttttcttatgctttatgctattttagttttccctgtgtcattgatcttgtgattttttctgcagattcctggtatttttctccaccatcttccgcggcaccatgatctggtgaccgcatcctgtacatttcagcctgaaatccgcccctacacgaaggatctcccagtctttgctgccacagggatgtgtttttttcagcgtgacaatatctcccacttcataaagaagtcccatgactatgctcctttacctgtaattgtgaaaacacctgcccaatcggctcctggatcagaagatctgcataccggtctctcggcgtaggtgacttgttgatcactaccagatgatctccctgaaaataatcgatcagtcctgctgccggatatacagccagggacgtcccaccgataatcagtacctgtgcctgggaaatagccttcactgcctcttcaatagtatgtgtatccagcccttcctcatagaggacaacgtctggcttaataatcccgccacagctgcatctgggcactccttctgaatgtttcatataagaaaaatcataaaacttccggcatttcatgcagtaattcctatatacactgccatgaagttccagaacattccggcttccggccatctggtgaagattatcaatattctgggtgatcacagccttaagcctgccagccctttccagctctgccagcttctggtgagctgcatttggctttgcagtatcacacagcatcttatctctgtaaaacctgaaaaactcttccggctttctcataaaaaaagtatggcttaagatcgtctccggcggataatcataggtctgattatacagcccgtcctggcttctgaaatccgggatcccgctttctgtggaaacacccgctccgccaaagaatacaatattatcatactgatccacaagctcctgcagtttcgctatcccattctccatcactacagcctcctcatactaattatccttttctacatccaaagtatcaactcttttaccctgtaccacatatctggtggattcgttgcctgtacaggtagaaagtgtaacgatcttgtcctgtatggtaagcgtacctggtgtggtctggatctctgaaagagttggcatcttgtccagataatcctgaaattccttaccaggtcctttaaacaatgtatatgtatcactatttaccgctgtaacataagcagaaataatctcataccgataatccttctcaggtgtaaaaatccagaaatatttgcttttcttgtatgtttccgggtctttactgaattttttcagctgtccgaacatagaaccattcttcatattgtgtccgtataccagtgtattacaatcgttaaaatctccggaattctcatagtcaataaaaatcgtgcctgcaaaattgtaattcttctcataggtcatgtgaagataagtactgttatcctttcccttcacaataggataactcacattatccagtgcttccacataaatccatccaatcacatccgtattcacactgcgaagagtatcaaaatcaatcttcataggtgctttcagatcagatttcttttcatcgtctgtctccatgtcgattggatcctcatcaggatcacgctctgtcactgccatctgtgcgatctggttatattcgtcagagccctttttgtactctgtgtaaatgtggtacaaattaaaggctgcataacaaaaaactcccacagccagaagcagtaccagagtaagcaccacatcaccggcggttttcttttttttctttttattatccttcatagcgcgcctcctctataattatagtaatccctcccggaagttgcaagtattatcttgactccaaagcctgctcacaggcctgtaaaagctgctgctgttttcccggcagaagcttgtcactgtacttaaaatagggtgcacagccatgctctgcaataaaggcagacgccagcggattcccggtaagcctggttaccataagcatcatctctgctccatccccaaaggccttttccataaagtcaaaagctcttaaaagggcacgtcctgtctgggtacaaagaacttctgttttctgcttctcttcctgaaagaatatctttattctctcaaattgctcttctcttttggtaatatgaagtttcctcagttccagatcatatctttccatgcatgcaatcgtctgtctctccagcaacgcttcctccatggaaagaagacctgacgtttttcgtacttcaaagcttttcttctgatcctttatatactgtccaaaccagctatctgcttcggactttgcgttcttatctgttatggggttatttttcagtgcatacagtttatcataaagaagagacagccgctttttgcctgtatctgcacacatcagcctttcattcagatcttgcagaaaaagcccggtaacagtaagccgttcttctgccgatccattcccggccatatccagcttttcttcctccatgtgctttgaaaggcttccgtccagaatctggtggattccataatctgtgccatacttttgataaatctggtaataagaagcgaaatccctgccaatttccttttcctgaatgaactgacagatcagattctcagtcacttggatatccagatcttcgtagcttttcaggatcctggacaaatcctcccatcctcttgctgtaacaaaggctttttccccccggttgctccttatgtagtaaaaactgtccctatggatattaagataagaaagcactgctccatggatcttattttgccaggcatattccatccaagcctccaaatccggctggatctccatcttacggacccggtccaaagttacaatatcaaactcccggacagacttgttatatcctgatggattacctgctgctacgatcagccaccctgccggtaccttatgtcccccaaaggtcttattctgaagaaactgaagcatggctggtgcaagtgtctcagacacacaattgatctcatccagaaacaggattccttccttctttcctgtactttccatcttggcatatacagctgcaatgatctcactcatggtatattccgtaacatccatggaaatgccctcatattccctggaaacgatttttggaagtcctactgcgctctgacgggtatgatgtgtcattgtataagaaacaagacctatattttcttccttcgctacctgctccataatagcggttttaccaatgccaggcgcccctatcaggaataaaggtcgttgatgtaccagcggatatgtataattcccttcttcatcctttttcaaatatgcatgcagtgtattcacaatttcttgttttgcctctttaatattcattatctttgctccctgcagacagctgcttgccgttttcccgattattctctgttaagtccacacctttaatacgtaagcccaggatggaaccattttcaaggaatctgtatccttcaaaaatacaaaggctgtatcatagtccggcctttcttccggatagactccgtccccatctgtaaaatagatcaaagcccccagatccttaagctgaccttccttccgaagctgatccacatagcggaaaaccggacaaaaatctgttcctccacgtccctggatctctattttgtcttccagttttctccagtcctcttctctgcggatcacatctattttttggatacagcagtcacactggatcagatatacctccatctcactaaaaaagttttctttgctgcttaaaatactatatgtttcctccagaaacctttgtacgatagcagctgaacaggagcctgaggtatcaatggcaatcaccagctgggaaagccggctggcttcctgatattccaatggttcgatcagtggaacatccccatagtactccataccatagttataaaatatataatcaaagctttccgtatccagctttacttcttcccgtatatgaaaatatttctgaagaaaatcccggtagtcataatccttcctgcctgcaagccttatttcctcctggcgcatgcctggagacataccagcccacagtttctttttctcttttcctctggacatggacaaaagaatctcttcccatttcttccagattgccttagcacctgtctgcttttctctccataagctgtgatcatctattcttatacttttttccagttttaactgctcttctttcttaaggcagcacaatgtgtcatagatccgataaggagaaagctcctgctcttgatgtcccccagcctcattcccggtaatggatgtgcagatcctttctacgaatatgtcacaggcaagatcccacagattttcctgctccttccctgcccaaaagggatgcatataaatacagtgcaggatcatatgcagataagcctttgcaacagtccctggatcctcctgatatttctgcagaagccatacaggggaaaataatatttttactccatccgtccctatcccggcaattctgtcatctgcttcccactgtaaaataaacagtgcctgttcaaaagagggatacgataaaaacaactgattccgacaatattcaagaatctgtatgccgatctgtgcctggttgctatcataagcacgcttccagggagctgtcttataaatcatattctctgtcttcatatccgtatctgtcatttttctccttcattaaccagaccagggcttgtaatctgccttcttccctggcagtccgtatgaaagtctccagttcctttttgccataccagccctgttcagccagtatttccatctgttcaatctgctgactcctgatcagtgcctccattgccggacggatcctttttttcaggtaaaaagtatattccttctgccgttcatcctctccatcaaaagcaaaaaagccgtccagtgctgcctgcagccggaccggctcttgcctggcacttcggaacctgtggtatgtttcatcttccataaccagcgtcctttcctgtccctttcagagtaccataacctataatgtctgtcatcaatatctataccgtttcctgtatttcaaaagaaaagccacagccatcacagctcccagcccttctgcaactacaactgcgccccagataccattcaatccaaatagcaaaggcatcaggatcaccagaccaccacgtaaaaggaaagatcttgtgaaagaaagcaatgcagaaaccattccattacatagtgcagtaaaaaaagaagaagcataaatattgatcccgcaaaacaggtaacccaatgcaaaaatacgaaagcctccaaccgtcatgtcaagcagctgctgattatatcctacaaaagcaacagacagcggatgactgacgccttctgaaacagccaccattgccacagaagtaatgccgatcacagtcaggcttttcctgaaaatattgtgaagttcctgatgatttcctgccccatactgatagctgacaatcggtgcactgccagccgaaaaacccagaaatgctgctacaaatacaaaatccacgtacatcataaccgaataagcagccacaccactctcgccgatgatccgcatcagctggatattatataaaataccgatcacagatgctgaaatattacttaaaagctcagaagaaccattggaacaggccagaagcagctgtcttggatagaaacgagtcttcgtaaggtgaagggcacgttcccttttcttaaggaaaaagaaaagaggcaaaataccgcctaccacatagcccatcactgtggcaaggcctgcaccagtgatccccaggcccaaaactgcaataaatacataatccagaaccatattggtgatcccggacagtatggaaagcaccagtcctagcattggccgttcgctgaccacaaaaaaattctggaaactggtctgaagcataaagggaacacttcctgcaagtagaactgctccatagctgatacagtcatcaatcagaagctcactggcaccggcagcccacataataggctcaacaagcaacactgtgataacggaaagcagacctcccacaatcatgatcgtataaatgatcatggaaaaatacctgtctgccagttctttattgccttcccctaatgtcctggctaccaaagcgctgccaccggtacccagcataaagcctatggctcctatgatcatagcaatgggaaaagcgatatttactgcagaaagtgccatatctccaacaagattagacacaaacagtccgtctaccacgctatataacgatgctattaccattgtcactatagaaggaagtgtaaatcttaacagtcttccataactaaaatgatcggataatctgatcttcataaacaaaaacctttcttattttctatatgcgaaaagaggaaggccattatcatccaaaggaagggaaaccactccctgaatcaaaggcattgcatactgtataaaatcgtctgtcatatcattgccagattccgagatccatgaagcaggaaccggcttttctttattgcagatctcatttacatcttccaaaccataatttagtacatattcatcctttttgctgtctcgtataaaagacaccatctttcctgtttcaccctgtacagcaacctttacgccaaatactccggcctccatagcctctttctggtctgctgcagagagcatagctgcagagcatctctgactgacattcagttctacagaccttacctttacctgaagacggctgcgtaccagattttccagatactttccgcatccagtcaacattttatgtccaaaattatcagtgcatacatcattctcatattcgcagataaaggttcctttttcgtccctgatcccttccgatacacataccaccacattacagttcttatcaaaagcatgctccacatccatcaggaatttttctgtgtcaaaagctttttccggcaaatatactagaagcggattatctcctgaatatttcctggcaagcacggaagcagcagtcagccagcctgcatgacggcccatgatttcaacaattgtaacagattttttctcataaacattagcatcaataacaatctcccgcactgtggatgccacgtatctggcagcacttccatatcctggtgtatggtctgtcttcaccaggtcattatcaatggtctttggaatccccaggatccgcacatcactgccgatcctttctccataccgtgacagcttacttactgtatccatggaatcattcccgcctatatatacaaagtagccaatattcatatcatgaaagctggcaaagatctgcttatatgccagatcatccagattttcaggaagcttatgtctgcaggagccaagatatgcccctggtgtatatttcagtgtttccagagcttctcccggaagcgccacatcaaaatccattacctgccccttcagaaatccctcaattccatttaccattccataaatacggtcaacttcagcctgatctcttccccctttaacaatgccataaagactgctgttgattacagctgtcggtcctcctgactgtcctacgatcagattttttctgtccatatcatagccctccttcttatgatctgtaaatcagtcttctcattatatatgaaaatctctaaaaagtaaatgtgatatatgtgacttgaaaaagtaaat

SEQ ID NO: 116 - DNA, 1852 bp, Unknown
  gut microbiota DNA sequence
agtacatccatatcaaacggttttgcaataaaatcgtctgcgccacgactcatcgccataaccatattcatgttatctgccgccgaagaaataaagataaccggaacctgagaaattctgcgtatttcttcacaccagtgaaagccattatagaaaggcaactttagatccagcaggacgagctggggatctctgcgtacaaattcctgtataatatcggaaaaattctccgcacaggatacatcatatccccaggacgaaagattctttttcagtacttctgagatgatctcatcatcctctacgataaaaatacgatacatagttatcccttccctctgttccacccactgcttatagtaaccacctattttataatactgcctctgcacaactttgtatacagcggtctatacttaatctgataagtttttccgccagggacaggccgcattgtcacaatactaatcattttttcatcaaatcgactccctttttttctttgaaatgaaatatatacctaagcctatgaacatcaatgccaatagttaaaaatacaatactatatttctatcttttactttattcataagctccctcctccttttgtttgattgtattatacagttgatatgccatttgagcaagcaatacaactttacattttcgcaattaagtattgctttttgtttttttatttatataatccatctttcagcgaaaggcaccaatgcgtcatgaaacagttacactggctttcgctctctatgttaatttccttctgatactatttttataagactgacacactacagaacacgtggaggtgagtggcggggctgtatagcggcgacctcgtatttatatatgttgtcgatcatccgttaaggcatcaatgagtggctcattacagcagcccgtaaacttatctcttccgaagtcgactcgatctcgccggatgaccagtcactgtcagttgaaattctataatatcaggagcttcttgtataattcaaatataaggaattccgagaaagaatgttgagaaaaaaatacctcagagtaaaataagattactgactttgcacggttagtaaaaaatcttattgaacagagaggtatttgaaatgaattgtaccattttcccctgatagtagttgtaaaaacttcatatttttcatattttagggatactttgtgctgtacacagtgcgccccaccccacctcataattcggatattgttcatactctggcaaaggtctggcgccgcggcgcaggtatgctttcactttttccccatacagatatggatcattgccttttatgattccccattccatcagaagcgcagctgatccggaaacaaagggaacagcaaaggaagttcctgtatagcttccatagtctccgccagtcctgggggcggttatacccacaccaggtgctgtcagatccggttttccatatggaagttcactgcttccccttccggaaaaggcggcatatgacaaaagcctggaatcatatgcacccacgctgatcaggcgcctggcagtagctggtatggtaagcgttccctgtactcttggcagatagaagccagttcccggattcagggttttcccacctggaagccatagaaaataatcaccattctttacatttattccttgtaaaacaagcttccacacaccactgtccacataaagagcatcaggcagaaattcaaaataaatttcctgagtcacatgatatggagccggttttccataatatatcagcaaatttgtatttcctacccgccatctttgtgctcccatccgttcttccaacggccctatgcggattcc

SEQ ID NO: 117 - DNA, 1519 bp, Unknown
  gut microbiota DNA sequence
tatatggcgagatagctcagttggctagagcacacggttcatacccgtggtgtcgagggttcaaatccccctctcgctactatacgagaactgcagatcatgtgtatctgcagtttttttgctttataggataccagtgttccaaggttctttcatccacttatgagcaagctcatgtggatgaaagaccttttgaccctggtatcatccttacatttcatatgggaagttttttacaaactggtcaatataataaatggctgcgcctacagctgatgcttctgtacgataatggcaggcatggataaagcttccatcattttcaaaaggattcagctttatggcttttttgcggaacagatccaggtaatcagccatataagcacctacattaccaccaaggataatattacagtcaaagcacattctaagattatttacggcaatagccagatagtccaggtagctgtcgaaaacatttctgattccctgattattacctgttttcaggatatcaaaaaattcttttaaattcccatctgtaaaatctgtaagggcgtttgctgtacaataagcgtcaagacagccataactgccacagtaacatttcttaccatgagggataagggccatgtgaccaaattcacatccccggttgtgatcccctgtgtataaagtccgtccatttatataagcaccgcctacgctgctggaaagggaaagatagatcagggaactggtataatgcccacgccagctttctgcaagccctgcagaattggagtcattgaaaaaaagaaaaggctcatggatatagctggataaaatactgtaaatattaaatggaagagggattacggtagcgtaattgatagttttgtggtcatcccctaacagcactggtacagagatcccggtgccaaggagacaggaacggtcaggaagattctgggagatcatatcttcgtattccctgacaagagttgaaaaatactggtcgcttgcttcaaagggaatacgcagacgtctggtatccagaatgttcaggccaagatctaccagaacaatggaaagatggttcctagtgatgtcaattccggctgcatatcttgcttgaggaacgtattcataaagggttgcctttcttccacctgtagactgggattctcctgcactttttacaagccctgcattgcacaggctgttcagacagcgggtagtggtgggaagactgatatctagagtctgggaaatctcctgcctggaacaggatgctccataatataataatcggtaaatatccccggaggtttttgattttgccaggtattcgtccattgttttactccttttttaacaacagatcctgtgtccatagttatgcggccataggcaaatcagatcttttgtattttcatcattataccatttataatatttaaaatccagaacttaaataaaaacttttattaaaataattataaaagaatacgaaaatacttagatattaagatagaat

SEQ ID NO: 118 - DNA, 3063 bp, Unknown
  gut microbiota DNA sequence
agaagaattttatttacagactttttctcatagtctccaatagcaatggcagagaataagaacaattaagcacccggggaaggaaaaactcacccgggtgctttttcagaatctattatggtttaatcctctggttcaatcaggccataagtgttgcctttacgcttgtagactacatttacctgatcggtctctgcattacagaatacaaagaaattatgtcccagaagctccatctgcacacatgcatcctcaggatacataggcttgatatcaaacttcttggtacgaatgatcttaacttcctcatcctcttcatactctttatcaaggtatgctttctggaagctgtctgctgcctgtttcttgtctgctattttattcttgtatttccgaagctgacgctcgatcacttcttccacaaggtcaatggatacatacatatcattgctgacctgctcggaacgaatgatgcttccctttacaggaatcgtgacttcgatcttctgtctttctttttcaacacttaaagttacgacaacttcggtgtcaggagtgaaatacctttccagttttccaagcttatcctcaactgcagtcctaagcccttctgtgattgtgatatttttaccgctgatgatgaatttcatacttccatcccctttgctgtttgatgggtatattatagcacattgttttcatttttaacatctttttcttaaaatttcagaattttttacaagttttacgttacttgtccattccgttcacagtaatctctcaaaaggaatgcttcctccaaaaagatccaatgcactgccaatggtaaaatccagatttcctttcccggccttatccagtaaatccagatcctgcagggaaccgatccctcctgcataagtaaccggtctcatgtgaaattctcccaaaagagcagccagttctgtttcgatcccacttgccttgccttccacatccactgcatgtacaagaaattcgtcacaataagatccaagccgctccatcagttccaaagtcacaggaacctgggtaaacttctgccagcggtctgtcaccacataatatgcatctgcctttttccggcagctaagatcaatgaccaaatgctccctgcctgcagctttttcaattttttccagattttcccaggaaatctttccatccttaaaaacatacgaagttacgatcacatggctggctccggcctgcaggtattcctgggcattatcagggttcacgccgccaccgatctgcagtcctcccggatatgccttaagtgcaagcagtgcctgctcctttgtagctggaaaatacggagaatccccactattcagaagtatcacatggcctcccttcagtcctttttctttgtacaattctgcataaaaagcagcatcctgtccagaaacaaagttctcttccgcctgatcctgcacatcccgaaggcttccccctacgatctgcttaactttcccattatgtatatcaatacaaggtctgaatctcatatattcctcctgaatctcatgtatttcccataacccttatctgtttctcctgaatctcatatatttcccataacccttatctgtttctcctgaatccatcactttcccattatacacaactccctgcccatccacaagccgccagccgtagagaaaaatatccgcaggttacctattatttcttgacaatccattttccactcctattagatccctgtctttcgactagtccttcctctctcaaatcctttataatcttctgaatctgctttctcgataaatcaaactcttccatgagtttaacctgagttatctctggattttcttccaacttctgcaatatatccagctttctttcggctccttttttcggctcctttttttggctccttttcggctccttttcggctcccttctgattacactctgattctttctctttcaaaaatgctgattttatagggcattccaccgcatctatttcatcaaacgttactcttttcatattgttttcaaaaactttagtagcaaattagttgcaataatttcctattgcttctatataggcacgcctcttactatcaattgtgaaaaatgcaattcagctgtcttacttgatacacccgatgatattgtgtatctgtaccggttggcacaggagaatcctctgctgtatgctgaattggcttgtaagctcaatgaattacaggattatgttgacactataaatgaatttaattaatgtatttaaatacctatattaagttcattaatgcttgcacttgttcgtaagcatccctcttaatcatttctatactctcttcatcctctaagtccataaaatccgccacatcttttggaccagcatgattttcagatgcaaatttgcttgctagcttatctttcgcttctattacaatatttttatcctttacaggttcaaattcttttgccagttctcttaccccaccaatataatgtttgataataaagtaaatatcataagcatcctttgcttttcctcttcccattgctgctgttttcattattatataaggaactactgctacaacaccgacattcgcaacatctattgccccatccggtcgttctgcttccacactaatcctctgtgcaggaaattcaaatgcaaaattaccgcctgtggcttttaatgccttaatcccctgcacatgctgacttcttctcttcagttgtgtaccaccatacattcctgccaaaatatctacatccacatcataggacatttcgtccaccatcactgtctttacaaaggaaaaatatttttccggatgctccctgtatccatttttctgaagtatcctcgacatgttctgatagccttcatcctgcaaagtcagatgattaatcataatatctacgtccacacttcccacatgaccttcttggggaaacatcaaatctggaacccaacctcctaccacacggatttcatcttcatattcctcaaaaatattaaccaactctactaaaactctatgtgcagcccgct

SEQ ID NO: 119 - DNA, 780 bp, Unknown
  gut microbiota DNA sequence
tacttttgtttctaatggttttagtgtgagctgttcgttttgatttccggggaaaatatcaaaagcaagcgggatgccatcagcatccataaaaagtcccatagtaacgattggattcggtctatgttctttattcttgccatattttttgtcaccactttcttcttcgatttcgaagtaataattggtgcaatcgtaatacaagatttttgaattgcgatgatgcacaaaatttgaatttcgataaagttcttcttggatgtaatccgattcctctgccataacagaaagagcacgataaacattctgcaaagaatattttggcggttccaaaagagaatgacaaaaagagtagctgctcatcttactggaaggtgataggattcttgcataaatcaaatctgtgagaatggcatgaaaatcgtaagtgaatttatgacggttacgaatgttcctgcaaatgttatccagtcttaattcggaacatagttgctgcaaaaaaagatatcctatgttaaataaacgttcttcttccaatggaatgcgcgctgtttgagaaaaactgacagaaatctgttctctttgctgattataaagggcagtttctttagctgcctctgctttagcccaagccatcattttttctttgtcgcctgaaaactgctctaaaaggtcattgtatttccctagctttttgtaaatgcgagaagatgattttccattctcttttctgtaagattgataaatatacacgtccttgttgtttggactaccagtaat

SEQ ID NO: 120 - DNA, 2757 bp, Unknown
  gut microbiota DNA sequence
gacagtatgtggaatcttggttctcaaacactggataaagcagtaaccgtaaaactgacccgaacccttgccatcattcctatcactttggtacttgcctttattcgtgccagaagcagtaaatccaccggtaacagttccaatggtttcagcctgaagaagtcttttccaatgttcatattatggttcatccttgcctcagtgatcactaccatagctcttcgcttaggtgctcctgcatccttttttgcgccattaaaggaacttagcaaattctttatcatcatggcaatggccgccataggtcttggaagcaacattgtaaaactgatcaaaaagggaggcaagccaattttcctgggtgcatgctgctggtgcggcattacactggtcagtctccttatgcagcatgttatgaatctgtggtaatttcaaatcgagcaggatttaagaatcctagggcgattcttaacttaatatgagcaaaaatgcctcaaagcatctattgacgctttggggcatttttcatcagctctcattacttaggaacatcttgcaaaagcaaaaattccaggcaatgataataaattctcttataggtttttgttgtataatgaagtccgtcatccacgctgttatctgcaccgcttccactggcatttgtgccatagccattctttaacagccaggaataggtatcaataaatgtataatccgacgccagctggctgcggatcgtgctgttaaactggcgtaccgctgcctcacttcttaccacatgtccagtattctccatcatcttactgttgcctggattaacagacatatagaaaagcttgcagttcttctttttcaaggtagaggccagactcttcatgtaagtcacataagaaggcagattagacagatcattcactcccagattaaagatcactgctgtaggattctgggtgccgttattcttatttacaatattcatgatctggttatagccgtcacctttcagccagtcaagtcccattccggattgtgctacaaactcagaattccatactaccgtactgcttgcaccaaactctctattcagagttgcctgcatacggactgtcctggaatcacctacaaagatcacctgcttatatttacgtttccataaatctacctgtgccatgtctgcagctgtaagattaggctctgtacttctgttaaagaccactgcatataaagtcacatctccatttacacggatacgccctgcagcctcaaattccggatctgtactctttccctgcgtccttgaccatccaaggaatgtgtaaccagagccatttgccactgccggaagagtaagataattgccctttccaacagaaaccttacggtaaactgatccatcattcttgcacagagtcactgtcactccggcttcctgaacagcatacagcttaacatctttcgtcactttgtatttgctgccagttttcagtacagaggtgctgctgttctttaccgtagaccagcccaaacctacatatccggttcttgaaggaactgccggaagtgtaatataagatccgctctcagcctccacctggagttccctgtaatctgcattgcttctgccattgtacatgtaaaaagaaactgtataagtatctactttctctctcactgcatagaatttagtattggcggtaatggttactgtatcacccactttgtataaaggagtagctgccccccgggtcgtcgtccatccaactccctgatagccggtcactttcggaacctgcggcagggtaaatgtactgcctttagccacacgcttgttcagcttcttataagctgcatttgtcttgccattactgttataaaacagaactgcggaggtagcgatccttttacggactgcatagaatttaaggttcctctttacagtgatcacctgtccaccctgaaattttgcagtatctgcattcttcttcacagaccatccaagattattatagccatacgctcccggcacctggggaagcttgatcttcctgccagctaccacgatcttcttcaaagccttcatctttctggtgcttgtcccattggtattataaaactgcacataatagaacttatctgcccgaagagtcagcacaccatctttgatataacggctccacgctgcatcagcagaaagagtaagcttggaggcaccattaaaccgaaatttcccggacagcttccaccgataaccctttcttgccggaagtgtaaccgtctcgcctatgctggtatcaatttgaagatcctcataatatttcctgcctgtaggatccttaaaccgaatcgtaacagcatctccgtcctgcaaagtatctgcctttacttctgctgctccaagggtgcctgcactcccgataaatggtatatcagcaaataccatcaaaagagcaagcaacagacacaggaaacggcctttgcttttttgcttattattcttcatatactctcctctgttcataaaccctcatgtcgcctgtcggcaacatcacaattccttgcttctgtatcagtataactgaaacatttttaactttcaaccacaggccagaaaaaagtttaacaaattttacatttgtattacataagtatttccatcaaatcttacagtgtatgaacaaaacgcatgaatgcatccctgccctttggagtacatttgtaaacaccggcatcctccagaacatgtacaaatacctgtcc

SEQ ID NO: 121 - DNA, 65127 bp, Unknown
  gut microbiota DNA sequence
cgaagggaagcagaagctgtctgtttgtccttgtcaacatcaacatccaggatcttataatcaaaattctgaaaaaagagagggaatacatcttttatttcatttgattgcttctggtcatcttttatatccgggaacagttccttataggaaaaatacttactggcagtatcagaatccagattttttagaagatccagatcatttttgatagcctttttcactgctcgtttttcgctgtgaaaacatccgaatgccataatggcaaggatgataaccagcaatggaatcagccgctttgctgttttcataaaccctagttcctttccgaaataatataggtctattttaccagatttatttaaaaaagtcaaaaaagcttaaaatctatacgatttttataaaaaaagaatgaaaaatttgtgaaatttgtattagtaccctgatttactttatttttgtaaatgaatctgctatgatagaaaagataaaagatggggcagcccggcggggatgccattatgtccagagaatggacaaggaggtcattatgaagaaacgcggtattgtcattggggggattattgtcattgccggtgcagttggtgcaggaggctggtattattataagaataacagcactacagcatctgcagatggcgatgtggtatatgttacaaagatcagtgacctgaatgtagataattcaggcacacagaaccgttttgcaggagtagtggaagcccaggaaacagtgaaagtcaacattgaaagcggacgaaaggttaaggaagtccaggtcaagactggtgacgaagttaagaaaggccagctgctgtttgagtatgacctgagcagtatccaggacagcctgaagcaggcacagctggatctggaccgtctgaaaaatgaagccattagcctggatcagcagatcgctaccctggaaaaagaaaaaaagaaagcatccaaggatcagcagctttcctataccattgagattgagacaaataagatgaaccttaagaaaaatgagtatagtcaggaaagcaagcaggcggagattgacaagcttcagagtgcgactaccaatacagaggtacgcagtgagatcgatggagtgatccagaagattgataccaccaagcttagttcagatgacggagatacattggacgatgattctgcaggtatggattatagctctgatagcagtgacaacagcgcatttatcactattctcagtacaggagcctatcgtatcaaaggtaaagtcaatgagatgaatcgctattctattgttcagggagagcctgtgatcgttcgctcccgtgtagatgacctgcagatctggcatgggactatgggggctattgatgagcagagcagcaattcttcttcaaacaatggcaattatggtatggtagattcaagcggtgattcagataccacttccagtacctaccccttttatgtggatttggagacatctgacggactgatgcttggtcagcatgtttacatagagaaggatgagggtcaggaagataaaaaagaaggcgtatggctcagtgatttttatattgtggatgcagattcccaggatccatatgtatgggctgccgatgaagatgggaagctaaagaagcgcaaagttgttcttggccagtatgatgaagggctgatggagtatgagattgcagatggccttactgaggacgacagcattgcatttcctacagaggctctgacagagggattgaatacagcagatgcagcatcgatgcctgcaggtgcaagcatgtattatggtgaggacagcacggatagttcagatggaaccgacaatgtggaaggaaccgatgatgcggatgattcccagagttatgacggtgaagatgatgcagatccaattatggacgaaagctccggtgatggatatatggatgatgattcagatgaagatatgcagccggatgaagagctgggcgatggggatgtgatcggcggagccgatagtatggatgaggattttaatgcctatacccaggattatacggatgatatgaatagtgatgtacagtatggggctgatgatacggaggcagcaggatgatccttgaattaaagaacatatacaaagaatatatacagggaaagatgagtgtgccggttctgaagaatgtggatttttccatggaggaaggtgaatacgttgctattatgggaccttccggttccggaaaaactacactgatgaatattatcggatgcttggatcagcctactcagggacagtttttcctggatggggaggatgtaagtaaatgcaccgagaatcagatgtctgatatccggctgcgtaagatcggatttgtatttcagagcttccatctgcttcccagacagtcagcacttaccaatgtagaacttccgctgaattatgcaaaggttcctaagaaagaacgccgtgagagggcttttcaggctctggagcgtgtggggcttgcagacagggtggattttctgccaaatcagctttccggcgggcagatgcagagagttgcaattgcaagagctattgtgaataatcctaagctccttctggcagatgagcctacaggagcccttgacagtaagtctggagctcaggtcatggagctgttccagaagctgaatgatgaaggggtatctgtgcttatgattacccatgatgcagagattgctgcccatgccaagcgaatggttatgatccgggacggcgaagtgtgggaaaagaggtgatagcatgagcaggataaagaaagtgatcatagttctggtgatcgttgctttggttgttacaggagcagccaagggtctgacctatatgcggaagaacaacgagacagtggtacaggtggcatctgtaggtgatctggccagtgattattattctccgaccaccaatctggaagccaatgtgaccagcagtgtatctcagaatattacagtagataaagatatgatcattcaacaggtttatgttaataaaggagattctgtaagcaaaggagataagctggtctcttttgacatgacccttgtggagatggaacttaatattgccagactgaaaaaagaaaaacaggaacaggatctggcaaaatcagaacgcagattgaaagccctgaaaaatggtggagctcttacagaagaagatgcaggcggttccgcagataagatagacgattccacagatgacagcggtgattctgatatggatagcctgtctggggatgatatggctatggcaggacaggacaacagccttacagatgtgggcggtaattatcttgcgctggctatcaaccctattttactggaggcttttacagatgcagttggaagcggggatgattctgaagaaagcgatgtacaggaggatggctcttcagttgcagcagatgatgtatatgatgcaaatgactccggccagttcagtgatcaggcaggacaggactcttcggataatcagttcacttcaggagaggataatatttatcctatcacaccggaacctacacctacccctgtcttagatgaagaagttgattttgtggatggcactaccaatccggaagaaccagatcttacagatggggatgagaagttttatcagactctggactatgatacagaaccatttgtgggcagcggtactaaggatgatccatatgtttttctttgcagtaatgccaaaggaaaggtagagctgaccggcggtttcctgaaccgtatggcaggatataatgaagaaggaacagaagtgcttcataagaaaggatattggtatttgttggagttccatcagaatgataccattgcagattatacagacagaacccagtcctgtattggatattatctggtgaatggacataaactgaagaaaacagtggatccttccgtgtctctggagctgacagtagaggaggccagccagtatgagccggaagaaccagaagaaccggatattccaggtgatgggggaaactcttctgtgaatatttccagaagtgatgccatcaagttatataagaaccggattgcaactctgaagctggatatccaggaaagtgagattaagatctcacagctggagaaaaaggtgaaccgtcagatcatttacagtaaactggacggtacagttaccactgtaggagatcctgtaacaggcactcctgaagatgacagcagtgtatttatgagtgtaaagaataaagacggatattatgttgttggcaaggttggtgagcttcttctggactctgtaaaagagggaaccattcttcagtgcaccaattacacttactatgatgatggagaagaaagcaccagccagtttgaagcagaagttatggatgtgtctgagtatcctgtttcttctgacagcagctattattatggtgacggcaatccgaatgtatctgaatatcagttcacagctgtgatcccggataaatctgtaaaagtgcgggatggagattatctgaacattcagctgaccgaagaaaccaaagccaaagggatcgtactctccaaagcttttgttcggtctgataatggtaattcttatgtatataaggacgataagggtgtgttgaagaaacaatatctgtctatcggaggtaatgttgataatgggtacagtgttctgatcacaggcgggatcaccagggatgacaagatcgcatttccatatggcaaggatgtgattgaaggagcaaaaaccaagacaatttctgcatccacgatgtatggtgaagacgattacagtgacaacggaggtgattttgaatgatagaaaatatcaggctggcctttcaggggatatggtctcataagatgcgttctttccttactatgctgggtattattattggtattgcgtctattattgcaattgtttctaccatcaagggtaccagtgaacagatcaaagaagatctgatcggatccgggaataacacagtttctgtgaatctgtattatggagacagtacatacagtgctgaatacggggacagcaatgcaacgcctccccttctttccgagaatcagaaagaagaagtcagaaaagtaaatcatgttgagaatgcaactttcttttataacagatcctacagcagcaatgtatattaccaaaatacaagcttccagggagggcagatatacggtattgatgtgaattatctggatacctgtggctatgctttgcgttccggaagagcttttgtacagtcggattatgacaattaccggaaagtggcactggtggattccaatgctgccgagaatatctttccgggagaagatcctgtggggaagatcattgaaataggagaagagccatatacggtagtcggagttgtgaatcaggatgaagattctatgccaaacatcgagaatatcaatcagttttacgagtattttcagagtgttatgggcacagttatgatccccagcaagtgctggccaatttcttttcagtttgatgaaccggagaatattgtgatccgggccgacagtacagacaacatgagtgaggcaggcaatggagttgccaaggctttgaataatgagattaaggctgcagacagttcgaccaagtttgagtatagagccaaggatgtaatgcagaaggttaagaatcttcagaaacttagtgaaagcaccaatcagcagctgatctggatcgcaagcatttctttgctggtaggcggtattggagttatgaatatcatgcttgtctcagttacagagagaactaaagagattggtcttaagaaggctatcggggcaagaaagaagaccattctgaaccagttccttacagaagcagctgtacttacaagtataggtggtattatcggtgtagttctgggcattgccctgtcgaaggtagtatccaaggtggccggttcacctacagccatcagcgttcctgccattgtaggatctgtggtattttctatgctgatcggaattatttttggccttcttccttctgtaaaggcagcaaatctgaatcctattgatgcactaagaagtgaataagagtagttcatgcgagtagaatatcagtgatacaaaagagatagattcattgtactaaatggatttgtctcttttttgtgtgtaatttttgaaaaccgtggtatactaacggaaacaacagccttactttacggaggaaaaagcattgaaaatattggaaggaaaatctgtatttccaggcattgccattggcaagattcaggtatggatggaagaatgggatcaagtgaagcgtgtccatgtcccggatcgaaatcaggagttgcgtcgtttggatgaggctaaagagaaagccattgcagcattaaaggaattgcatcagaaagcagaaatagaggcaggcagctctgaggcggagatttttgaagtacaccagatgatgctggacgaaggagaatatatagaagcgataaggaacaggatccgtacagagagtgtgaatgcagaatatgctgccactgctgcaggtgaatattttgcagatatgttccgcaagatggataatgaatacatgaaagaacgtgaggctgatattctggatattaccaaacggttggtacgagttctgtcaggtgagaaacagaatagaaatattatacaggagcctgtgatacttgcagcacagaacctgtctccaagtgataccattttgctagacaaaagcatgatcttggcatttgtgctaaagaaagggtcggtcaattctcatactgctattcttgcaagagcaatgaatattcctgcattgatccaggtgcctttctcagatgatatggaaggcagcatggccattgtagatggagataagggaaaactgttcctggatcctgatcaggattttcttgaggaatatacaaaagaacagaatgcagagcaggaaaaacagaagattttgaaccagcttaagggaaaagaaaccgttacaaaaggcggcagaaggattgaattgtttgccaatataggtagtggtgaggatgtagatgcagttctggagaatgacggagagggaataggtcttttcagaagtgaatttctgtatcttggaaaagaacagcttccgtcagaagaagaacagtttcagatatacaagaatgttgccaagcggatgggtgacaaaaaggtaattatacgtacattggatcttggagcagacaagcaggcaccctgctttccgatggaaaaggaagagaatccggctatgggctgcagaggaatccggctgtgtctggaacatcccaaggctttcaaatctcagttgaaggcaattttacgtgcaggaatgtacggcaatctgtctatcatgtatcccatgatcacttctataggagaacttgggaagattggggagatcctgcagatagcgaagcaggaacttcaggaagagggaaagcagtacaaagatctggagcaggggattatggtggaaacacctgccgcagctatgatcagtgatctgcttgcaaagaaagtggattttttcagtatcggaacaaatgacctgacacaatatacgctggcaatggacaggcagaatgaaaagctggaaagcttttatgaaccagggcatgaagcggttctgcgattgatccgtatggtaatagagaatgctcataaagctggtatctgggtcggtatctgcggcgaacttggggcagacacaagattcactgaagaatttgtgaaaatggggatagatgaactttctgtatccccagccaggatcctgccccttcgtcgtctgatccgtagtatagatgaaatctgacagaattaaaagcccaggtcctctccacagagaactacagaaatacgtcctggcttcctggaaaaacgagtaaccaggatctggcagcagatgcaatctgggcttacacagtctgcacacatgccggttttggcacagggagtagacgcatgtacacgtaatgcattgggcggagctgccaaagtacgcactctgcgaatggcatcctctacgttatcacatagcttattcatgctggctaagacgatcacatgctccggaccatgggcgatacatgctacacggttgcttgcaccatcaatattaacaagttctccggctttggtgaatgcattggtacttgtgaggaaataatctgcacatacgatctttccgtacagtgcacgagcttcctcaggagtagcggcgtttttcctgtcgataaattcataatttccatcttcaacagcctgacagacgccagcttcattcatggattcagtgccgccccaggtaacagatgcaccttcagggatcatggacaggatctgcgcctttgcttcttcggcagtttcgcagtaatatgcatccattccacgtctggaaaaatttttctttagtgtttctgccacaagttggtggtgttcgcttacataagacattgtcagccctcctgattgttagatttgtcctgaaaaaatgaacagaagtaactattcagcagaaagtatcctgccaggtgtttttgtggtgctgaacagttacaaacagattataacatgaaccggttttaagtaaaatacatgacaataaaacagtccaaataaaaaattaaataaatactaaaataaaaatccaaacaaaaactcaaaacaatagaacaatagaaaaataatacaagtgaaaataaaacaattgccacaggcaggaatgcagggtataataaaaagtaaaatgtaattcaaggtatttttcaataccgattatgaattgaaacaataagatttattttagtaaggagaggaatgtacaatgagaaaatggaagatggcacttgccggtgtattaagtctgtttatggttgaggctccagcagtttgcagtatgcctgtttattctgttgcagcggaagagaccacagtacaggatactgatgttttaaaaggtcttgtgaaagagaacggcaaatattactattatgtagatggaaagatgcagaagggctggcagagtgttaccaccactaagagtaatggtcaatctgtaacatatcgatattatttcggagccaacggagctgcttatgctgcaactcctaagcagaaaacactggttaagaagattcgtggaaaatactatggatttaacagccttggaagggcaagaaccaatactttctgtaatgtaaagctgaaaaaaggcaaaaagacttttacataccgttattatttcggagcgaatggtgcggcttatgcaggcaagaagtcttatggcactgctgaaatcgcagttaagaagatcaaaggcaaatactatggatttaatttaaatggcaatatggtaaaaggtacatgggtaaaaggcggcaaattctatgtctttggtaaaaatggcgtttataatgcaagtctttccaaaaagcttcgggcagcggccggatatgaaaaggaagcatccacattgctttcgctgatcggcaatccgaagaaggtccaggtactggaaaatacctgttatggagatggtacagagatgtattattattatgataattattttgcagatatttttaaatttagcggcacaggaaaaaccattgtacttggtgtgtctgcaaagtaattttgttgatgaacgatagaggagtaagatgagcatgaagaaaaagaattttgcaaaaggcctgattctggcattctgtctgtttttcggcattatgcttgcaggtacccagactgcacagccggttaaagctgctgtaaagaaaactactacagttaccaaagcaaagaagccggtaaatggctggtatacatttccaagtggcagaaaaagatactataaaaatgggaaataccttaccggattgaaaaaggttcgtaacaaaacctatctttttagtaaacggggagttatgctgacaggtactcagaagatcaagaataaggtgtattatctgaatgacaaaggggttctgcaggttaagaaactgggaaacaggtatttttatgccaatggaaagaagatgtcagatgtagatgcacaggattttgccactcttcagactgcgaaggagatcgtcgcacagataacgaattcatctatgacgtctgcacagaagctgaaggtgtgctttgactgggtgatcaagaagccatactggacctggcgtacattcagcaatttcagtggatggccggcagtttatgctatggatcatttccagagaggccgtggcaattgtatgtcagatgcagcagcttttgcatatctggcaaaagccgttggatataagcaggtttacgtatgcgtagacagtacaggaagaaacggaagcggacatgcatggacagagatcggaggtcttgcatatgatcctttgttcgctgaagcaaaaagttacagtgctaattatggtgtgccttatggcgtatacaagctttcaccgattcttcatatagcgttataaggagttagaaaatgaaaaaaattatggaattaatggcggaagagctttccgcagcatttgaaaaagcaggctatgatccggcatatggaagggtaacagtatccagtcgtccggatctgtgcgaatatcagtgtaacggtgcaatggctggcgcgaaggcatacaaaaaagcaccatttatcattgctgaccaggtagctgaccagttgaaagacagcaggatcttttccatggtggaagtagtaaagccgggatttattaacctgaagcttgatgaaagttatttagcttcctggctgaatgaaatggctacccatgaaaagctttctgtaaatactgctgagcagccaaagaccatcattattgattatggcggaccaaatgtggcaaagcctcttcatgtaggtcatcttcgctctgctattatcggcgagagtattaagaggatcggccgttttgttgggcataagatgatcggagatgtgcatctgggagactggggacttcagatgggattgatcatcactgaattgaagcacagacagccggagcttgtttattttgatgagacttatacaggagaatatccatctgaggcaccatttaccataggcgaactggaggagatctatccttgcgccagtgccaaatcaaaagaagatgaagagtatcgcaaggaggctctggaagctacccatcttcttcagcagggcaatccggggtatactgcattatggaatcatatcctgaacgtttctgtaacagacctgaagagaaattacgcaaatctggatgtttcttttgacctgtggaaaaaagaatcagatgcacagccttacattcctgagatggttcagcacatgaaggatgaaggatatgcttatgaggatcagggtgctcttgttgtggatgtaaaagaagaatccgatactaaagagattccgccatgtattcttttgaagtcagacggcgcttccctttatacaactacagatctggcaacgattgtagagcgtatgaagctgtttaacccggatgagatcctttatgtagttgacaaacgtcaggagcttcattttatacaggtattccggtgtgccagaaagactgggctggtaaaggaagatacaaagctttccttccttggatttggtactatgaacggcaaagatggcaagcctttcaagacaagagaaggcggggttatgcgactggagaatctgatctctgagattgatgaagagatgttccacaagatcgtagagaatcgcagtgtaaaggataaggatgctcaggaaactgccaagattgttggactttctgctatcaaatatggagatttgtccaaccaggctaccaaagattatatttttgatattgaccggtttacttcttttgagggaaatacaggcccatatattttgtatacgattgtacgtatcaaatccattctcagccgttttaaagaaaacggaggagatcttgaggcaggtacattgcttccagcagtgggaatcagtgagaagaatttgatgcttcagcttgctggatttggggttactattgaaaatgcttttgaagagaaggcacctcataagatctgtgcttatatttatgaggtatccaatgcatttaacagcttttaccatgagacaaagatcttaagcgaagaagatccgatgcggaagcagtcatatatccgtttaatcacactggccaaaagagttctggagactagcattgaccttcttggatttacagcaccggataagatgtaaaatcgtatggtcttatgtctggaatctggagctttaaaactccgtaaagacatctaaagtacagtaaagacatctgaaatacagtaaaaatatcttgcatggtaattttattcctgcatgcgaaggatatttttactgtatttttttctatttttattaggatttttatacttctgtatttttcttaaatatctgtaaagctgctttttcgggaagcagatttatgctatatttatctcaggcgagaaaacttccacttctatatattatatcagctgggagtcaatcccccagctgatatagcctccggcaggattgcagaggtgcgcaggagaagtatgtcatgcaattgcatgacgcgcacctcgcagcaagaatgccgaggcattcttgaactgacaagctagtacagtgaaaattaaggcaagtcaatatggcggttacttaatattcactgtgctagtaatcatcgtatacggtatttcaccgtaatttccttatgggatgctacatgctgaatagtttctatttatcattgtgaaggaagtgactgacataagacttacaggacttattttgaagggaagatattgtattcttgagcagatacatgccggaggggaaggaactctctatctggcacgggatctggaacttggctgcttgtgggcagttaaggaaatacctgtttcacataagaaagaagcaaagcttttgcgactgttggagcatccatatatgccaaggatgatcgattatattgaaaaagaagactattgctatcttgtgatggaatttatacagggaaaatcgttggaagaatggataaaagaaggacgtcgtttttcagaggaagagcttttgtcttttggcataatgatcgcacaggtgttgggatatctgcatagtcggaagccacctgtatattacggggatctgaagcctgggaacctgatgctaacagagaacgggaagctgtatctggtggattttggaagtgctgtccagagttattgcaggcagcaaaaagagtgctggggaaccatgggttatgcttcgccagagcagatgaagggacagatctgtgaaaaaagcgatatttttaccatggggaaaacattacaggcattgcttactgcgaatctggcgaaatatatcatgtatgatccgttgtttctatggttcctttttcgctgttgcagaaaaaaagaaatctacagatataaaaatatgcaggaagtggaaaaagtattgaagagaatccaaaagaaaaaaggaaaaggcagatatgccatggcagtagccggtattacagtccttggacttgttgcttttggaattttgctgactggggaatcgaaaattccagagttcagggagcgattaacacaggtaacagatgtatattatcagatggaatttcaaaatgaaaccaggaacaaaaggacagaagcagtgaagaaagtcagagatcagctgcaggaaatgcttacattatatacaaaaaaagacgagcaggagcatgtgttgcaaatgctccgggcaaatgaggaattgttggaacttttggaatcagaaaagggacaggaaggtggaggtaaatgaaaagctacaggatatggttaagcatagctgcaatattgtttataggaaaaatgtttggtacagtctggacacaggcagaagatttgggaggctttgatgtaagtgtttcagaaggggaaaactggtcgttaccggacaattggcaggaaaatacttctggatgggaagaagaggcagataccaaaagcactgcagaatcggaaaacgaatcatttgcccagggcaataagatagaaaattctgttgtagaaagtgaggatatattttcatctacagtagaaagtatacagcaaaataatcagcagcaaaacaatctgcagaatagtaacgatcaggacattaacgatcggggcaataacaatcaggacattaatgatcggggcaataataatcaggaaagtaactatcaggaaagtaatgatcaggaaagtaactatcagaatagtaacaatcaggaaaataacaatcgaagcagtaacaatcagaataataagatgaataataataatcagaataataaccagaacagtactaagcagagaagcaatcgtcaggagaatgatggacaggacagtgtgcagccagctcacaagcagcaatcactgctacaaagactatcagaagaaaaatcaggagaacccaaaataccagaatcaaaagaaactggaaaaatcgttgaaggggaattagaaccaaaagtttatgtcagtcaagaagaaagacaaaaagcaaaagagcaggatcgggctgtgaatttccgaagaacaaaagatatgacattttttcataagaaacaggcaggcaaaaaggacattctatatctcactgtaaccaggctgaacatccatcagatcctgtctgtacggctaaacggaaaggagtgcagatggaacagggaagggagccgtatagtgctggaagacagaccggaacaggggaaaaacaaagtagaagtgcgattctttctggaagatggacaggtcagaggcatggagccctggatttttacatgtgactagagaagtcaagcggatattcgcaatccgcttcgctacttgctcataaccgaataactgctccgcagtttatcagaaggagcttgcactcctcctgatacaagcaagtccccacccactgcttattgcttttcgcaattgaagcaggggacttacttgattcggtaaaataatcattaaccaatttatttttatgttgaaaccactgaaaaagagtgataccctaatgattaacgcaagaataaccttatttggcgattttagcaggaggaacaaaaatggagaaccataccagagaacagcttcttaaattattagagaataacagccggctgaccaatgcagaactggcaatcatgcttgacgtcacagaggagcagatccatgatgagatcgcatcccttgaaaaaaagcatattatctgtggttatcatacactgatcaactgggataaagtaaatgacaacgatgttacagctcttgtagagcttcatgtcaccccgcagggaggcaatggctatcagcagctggcagaccggatcaaacagtatccgcaggtactttctctttatctgatgtccggagcctacgatttccttgttatgataaaaggaaaaaccctgaaggagatttccctgtttgtttccggtaagcttgcctctattgatgaggtacaaagcacagccacccatttcgcccttaccaaatataaagaactgggcgttgactttaacagtaaaaaatctgatgaaagaatgataatgacaccatgaatgaatttctatctgaaaaggtaaaggctttaaagccatctggaatacgtaaattttttgatatagtaaaggagatccctggagccatctcccttggtgttggagaaccggattttgaaactccatatcacatccgtgaagccgggatccaggcattgcaggccggcaagaccttctatacttctaacagcggcctgatggagcttcgtaaagcagtttctgactttaccaaacgacgtacaggacttacctatgatcctgcatctgagatcatgcttactgtaggcggcagcgaagctatcgacgtagctctccgtaccattattaatccaggggatgaagtgatttatattcagcccagctacgtttcttatctgccctgtatccttctggcggatggtgttccggttccaattgaattaaaagccgaaaatcgtttccgccttacccgtgaggaactggaggcagccatcactcccaagaccaaggcattgatcctttctttccccaataaccctacaggagccattatggaaaaagaggatctggaggctattgtggatgtgatcaaagagcatcacattctggtgatctcagacgagatctacagcgaacttacctatggaaaggagcatgtatccattgcatcccttcccggcatgaaggagtattccattgtgatcaatggtttttccaaaggctttgccatgaccggctggcgtctgggctatgctctgggcaataaggagatcctgaagcaaatgatcaagatccatcagtatgccatcatgtgtgctcctaccgtaagccagtatgctgcaattgaagccatgtacaacggcgatcaggatgttatttacatgcgggaatcctacaaccagagacgtcgtttcctctatcatgagctgcagcgtcttggactcccctgtttccttccggagggagctttctatatgttcccggatatccgtgaatttggcatgaccagtgaggattttgcccttgaccttctgaaggaagaaaaggtagccgttgttccaggcagcgctttcggcgattgcggtgaaggctttatccgtatttcctatgcttattccattgaggagctgaaagaagctcttctccgcattgaacgatatctgaatcgaaaacgcagccagaagacagaatccccaaagcaagtatagccctggggcagatctgacggggaggtaaatatatgttccgtttatggggaaaaatttggaaagacaaccatatgcttaaagacgaagtggtatgtgatgaccgtgaagacacccgcacacacaaggttttccactgtcttgagcaactttgctatgatatggatcttggcaatcccatctggctggatactacagtccgccatttccagaagcatgacaaagcacgtttttaccaggataattttatagaacagattgattttgactacctggagatccaggtgattgaagaagattaaatgaatggaactcatgatacaagccgcatataacatcatcttgttttactgaatccagaaaaaacggagaagcccccacattcccgggaacttctccgttttgtcattatcttgccatctttgcgttgtaagctttatttatagcacgcttctgttacttcacacgtacctttttcggtgaggaatacgctccgtataccttaccgctctttgtactgatatatgcacgtactttcacgtaataggttttctttctggtaagccgcttagcagttgcttttgtagctgtacctttctttacagtagcagccagcttatagccgcttccctttctttttgaaacataaacctcatatccattgactctggaaattctgccatatttcacagtcagagatcgtttgccgcctgttactctggagatggctgccttcttcggtgccagtgtactttcgatcactgctgccgggcctttggcacttaagctgccctggataaagaatggaatcaccttgtatctgtacttggtgccatacttcaatttcttgtctttatccgtataccgtgtgttggtaccaccgtttaaggttgcacgcagcacatatttctttttcgctttttcatagcgatatacatagtatccggttgcaccaggctgcggattccagccaatggtcagtttcttctgggtagcactaaccgttttgcctccggttactttcttaaggttaggcttcacaatgtagaattccactgttgcggatcctgcaaagcttcccagaccgctgatcactgcagttgcctttccaacattgatattgctggaataggatactgtataatccacacctgcagtaagtgtacgtcccatataagtaatattaagagcaggtgttacagcacttcctgtgtaatactgattgggcactgccgcgatctgtgcatagccaatggatgtggttcctgatgcccttaccacccggaagccatattttgcataactgctgtcagaggtaagccttaccttaatggtgctgccggaaaccgtaactgttcggtttctaagctctgtacctgtataagtaccaaccttctttcctgtgccatccataatgtaaatgtaatcgaaatcatcctctgtctcggtatccgaactgaaggtaatggacacggaaccggcaccatctacatgatagctccaggttctgtcttcattgtttgcatatggatgatctgactggaactggctaagatctgttacattcaccatgttatcttccggagctacaacggttacctggcaagaagccaaaagaccgctttctgtagctacagtgatcactgcagttcctggatctcgtccatagacctcaccatcaccatatacgtcagccacatcataattgctggatgtgaaagtaacacggtccgttgcatctgacggataaatatcataactcagataatagctttgtccatctcttatggtaatattctgagtattcagggtaatcctttcagcaggtacatagaccgttacattacaatatgcatggaaggtatctcctatacttgcctcgatcagtgttgttcctgaagatattgctttaacagaagcaacgctgttgttttctcctgatgtaaccagctctgccacatctgtatcataaatggtccagtcaactccctgcttttctgttgtatcaaagggcaggaaattcacacttaaaacagctgaatcatttttcttaagtcttaatgcgctttcactgatctggataccggtaagcggattcgtcactcttaccttgcaggttcctttcacatcactctttgtgcggactgtgatctctgcatctcccactgcattagcagttacctttccattttcatctacagatacgatctccggatgatcagaagtataagtaagggcttctgttgcattggaaggagtaagcagtacttctaccgtgtcctgtgctcccacaccatccagttccagtgttggatagatcatgcggatatctgttacaggaacatcctttacagttacactgcaggtatcagaataagctccgcaggtcactttgatctgtgctgttcctgccttcagggcctctacttcgccttttttacttacactgatgatatctgtctgctctgttgtatatgtacatttgtcacttgcatctgatggagtaactgctgcatttaactgctccacatttccaacagaaaattccagtgtttccggtaaggatacaccagtcgcctttttctctttcttaaagagtgcagtaacctccacatccttctcaggcatgataaaggtagtgcttgggctgtcttcgtcttcaaaaattccagcatttgcagtccagtggtcaaacacataaccattctttgcaactgcgatcacatctatttctgtgtctgaatcatagttcttctcattttcgcttacaatggttccgccttcaccagctgtgatcttaaaggagcttgttgtaagcaagcgcacattttctgatgaattactgagaagagaatatgcatcctcttcattacgtcttggagaatctgtagccagatacaggtatgctgccttggaaccatccattgtggttcttgggaaataaacagtccgtacttctcccggctccagggttcccatattttccgtgtaaagcacagcaccgtccttagcatctgccaggatacggaagcctacgtttttagtttccagaccgctgtcgtttacaatctgcaggacgatacattcctgattgtccatcatcacatcatccagctgctctacataaagcacacgatagccaagttcaaactctgctgcatcctggcgtaccccactgccagccgcagacacttctatcctgtaagtttccggctcatcatccacattcagttccggaacaggataatcgatctggatctgtttttcttcaccaggctggatcactacgtctttatgaccctgaccaacttcataatctttctctgcacaaatgtaggaaagatcaattccctctgctgccagatttccattgttctttacagtgaccgtcatcggcagagcctgggcagaagcaacatcgctgtcctcaaaatctactgactggatcttcagatccacagtttcttctactgtcttttcttccagatcagaatatttggtagtgccattttcgtcatattctgctctgttgtaggaaagaaccagctggccgtcctcattaaagattcctgaaagaccggaaataattcctgctccaaggtttccaagacaatgtacctttccaaaagcaccattctcccagatgcatccataagcagccttctgatcctgatcagatgaagcagtggcagtccacaggatataggtttttgcctgggaactgatcacctggaaatcctttgtaagattttccggaagctgtgccgggtcaaacacataagaagctttgtcatttacatttgctttataagcaatattcccatcctgataccagaacatatactctgttccatcaaggcttccggtaatgatgccggaggctgcacttccttcctctgtaccaagatttcctgtttcacctgtattgatctgaatatagccgctctgtcttgtttcatctacatctgcaagggcctgtacgccttcaccagaggtaaaggtataggtaacaaccgggccagagcctgatgcagctacagagatctgggaaatataacggtttgatccaatatctacagactgtacgcttcctttattaccatttgcattgatagaagtatagtatacataacctggcagtgtagtctcaagcgccttgttttcagtatgataccatgccacatatgcaacaccgtctttcactgcgattccaggaatggtatctgtcacattattatctgtaagagtatatgtacggatcatatcagtaccgctgccatagtggatcacagctacacagatctcagatgcgtttgccatctgatctaccgtagcggaagaatcgtcaaaggccttctttgtatcctgccatgccacatagatcactttatttgcttcgtctactgcaactgcaggtgcaaagtcagaagttccgtcattgtcaataatagtatatcctgtttctcctgctttctgatataccagctggctgctgttacagatctgctttgagggatcctcatggatccagaatttataattggttccgcctgcatttacaaaaatgggattggaatccgagcctgcagtaattccgttgtctgtctccacaccttcctctgacgccagaaggaaaggctgtgcattcagttcatcgtaaatattctgatcctggcaatatacagaacgatccttccgattgctgtcatatacagtaaccgtagcctctgccagcttcaagctcttctcaaacttccacactgcagctttcaggctggcagacgctgtcagctcacaaagctgggtagactttacaaagtccgctgtatacttaacggttcctcttccctctgcgccaaaattggcaatccccttggaacctacgccgccttcaattgctacagagatcgaaggtgcaatggttccgctggtccatttcggcaaaagtccgttcaggttcaatccgttctggtttataatacttcctctgatctctgcttcgatctttccttctccgcttactgagatgtatgtaggaacgatccagaagaaattggtggtatggcttcctgaaacagaaccgcatgccctgacgactatattgaccattacctttccgttatccagatatccttctccatatccggcaacattaaatgtagtcttaaagcttcctatattaagctttggctgcttctttccaagcttaaagtcctttgccttagattccagaagttctttgttcagcttttccctttccttctgggtgctaggcataaacttcagattcagaccaacgcttacctttccattgtcatcggttttcacttccagatccagcagatcattcataccgaatttcagggcatttcccatgaacaaggctgcaagggaagattttcccacatccccctctcccatggtcatgaatttcatcttggtaataccctttgccgaaactactggtttggaaaccttcagtccaaactggatctctttggaagatttaccatccttggaaacgcattttacgtatctttttgactgggaagtaagcttctcgatcacagtgccgcttttcttttccagtgttttgaattcaaatacaccggttttattcttggctaccacagactcgtcctgcatcaggaaatagacacagtcatccatgtcggactcaacattgatcttaacggtctttgtcttcttggcttttgcgatctcagcgcttgaatcctccagaaatgaaaccgtatcgatcagaaggttcttgtctcccattgtaacggactcaatctccggggtggtgtcattcagatttttcagggtaaagaccattgattctccgcccttaagtttcttgcggatccccttggtgcgatactggtctttggaaatgagaatatccacatctccggcaatgctttttatgtcatcaaaaagaatcttgccgttttcatctgtttttccctgaagtgtctgcccattctgtcctgtaagagtaacatccacatcttccagatattcttctgtaccggtatcctttaccttgatcaggaactggtttttccctactgattcattacctgagcctgctgtaatggaattacctacactgattccataataggttgaaacttccatggatttgccggcagccagtgtggttggatcaaagcggatcgctactgcactgtctcccagactgcttccctcatatggatcataatcccagtattctccacggatggatgaccagttggtaaaatataccacatcaggtctgcgctcatttcctctgtaaagatatcctgtagccagtgtggtgggatcatccagacggtcatatacctgataggactgagggattgctgcccctgtaaaagtacggatcgtggtctggtttcctactcctgggatcctgaaaggtgcatcgtcattgttagcaagcatggtatccagcataatacggatacctacatctactgcacttccggatacattgatggcctggtaagaaatccttactgtatctgcatagctggcatttccgctttttaccagttccagggtctgtatgatctgtacaccgttgtaggtcatgctggcaattactttattgcccacactgtttactgtatctgcctcaaaaaagcgttcctgatctcctactttgatcagggtttctgatgtatttggattgggatgtccatacagaagctttctgttattgtcagaatcgtagtttggatttccttcacaggttcccatggtaaacttgccttcgctgtttactactgcttccagataattatttctcagccagccttcagttcctgaagaataaaccgccgcagtctccgaatccactcccaggtactgtcttacataggccttatagacctcatacagatggatgttctcttcttttgaaaggctgtccacatccacaccctgactttccagatattctctgaaagacagaagcgcttccggttcttctgatccttcctcaccggaatcagagaactcttctgcctctgtactgccatccccaaacagggagtctgtctgtgctgtatcagatgcatctgaaaaagcactgtctgtatcatcagacatctgtggcgggatctcctgtgcatctagcacctgttcctcgtccacatcctctacggcttcctgtgcatctgaaaatccttcagctcccacctctgtcacagcttcttctgctgccagcagtgaaagcggctgccctgcaaccatggatacagtcaataatgcacataaaaactgtttcaacctctttctcttcatcttctttccctcgtttctgtacattttttatttctgtacattctttcacgaaaaattatatcatgcagtataaatacaaacaacacattttcctgtttttcataagctttttcaagctttgatatgcttttgatatgcttttaatcagcttttcattagcttttcaaattatgaaaatgctgttcattctcccgaattcatgttatactttaccataaacataagaggtgacagataatgaacatagcattaattgatgacatgccccaggtacttacccataccaggaagctgatccagcaatttgctgattccagcaatatagatttttccatcacctgctactccagcagtgaggaactgcttgcagaatttaccccacataaatattccatactttttatggatatctatatggacggactgccaggcattgaagctgcccagcagatccgcagacaggatgaaagctgcctgatcgtttttctgacaagcagtagtgaccatctgcctcaagccttccgctgtcatgcttttgactatctccaaaagcctgtcacgcagacggatatttcccgtgtccttcaggatgccctgcgtctgatgcagacagatatccagtatctggagttcacttataaccgccagacggttcggattccccatagtgagatcatcagcatcctttctgatgaccaccgtaccgttgttacagacaataaaggcggccgttatgatccgctgatcagcttttcaaagctgactgctgatcttgagaatgaaagccgtttcaggcagattaaccggggaatccttgtgaatatggactacatttccggttttgacagcaatctgtgtatcctttccaacggccagaagcttcctgtatctacacgcagactttccaggatccgtcagcaatgggaggattatacgtttgcctccatccgtcacaagatggcagaaaggagacttcattcatgactttacagtattttttctctgacgtttgcacctaccttgccattatccctgcggctattttttgctttctccccgccaagcaatatatgaaatggtcatcccgatctgtaatccttgcattttcacttcttttcatcctgatggtgcctgctggagtctgtttgggatttttctttcatttggatgacaatatcacagtggggattatgatcatcatatttttcatcggttacaaccgccttcttactacccgtttcagccagaacctgaatatgttctgcctgtgcatagcactgatggcattttgcagcaattttgccagaggctttgacgccctgctccatcctgatgcacctgcaggcagtttcagtctggaagcctgtctttttcaattcggatgcagtattcttctggttctgcttcttgggtggccggttgcccattttggaagcaggctgatccattctctgaaggcagatgctccctggtacgccatgtcccttgtttcctgtacattttttattctgaatattttcattatcccccataactaccaggtactttattcgtatcgtgtatttactgtattctggcagatactggtttgtatgatctttatgctttgtttcatttattttgttttctattttgtagcgcagacaattctgacaaatgcagagaattcccggaagctgcggcttatgagcatgcaggaatccctgtatcagagacagcagcgatacatagagcagacagctgtgctgcgccataatttccgtcagactgtagtcactctccagggtcttttaaatgaacaggattacgcttctcttagttcttatctggatgaatatatgaaaaccctgcctgtaaaggaaaccagtgatttctgccagaattatgccttaaactccctgctgaattattatcagcaggcagcacagaatcagcagatcaagacacactggaaaatccagcttccttacaaaatccctgtgggggatgtggatctttgcactttagtgggaaatcttctggaaaatgtgatcaaaggatgtaatactgtgacagacagtcctaaataccatgatctgtccgtatctgtagaaaaggaaaagaatctctatattgtttccaccaacaactttgacggaaaaataaacaaaagaaacgggcagtatctgcccgtgtataaacaaggaggaagcgggatcggtctgtcttccatcgagactatcgctgaaaaataccatggcttcgcccggttctcccatattggtactgaattttatattgatgtgatgatcccgctatggcaggatctgccgccacttcaataaacccggtttacagtatctcccctttggaaacggcgtatattttggactacctcctctactacccggaaacgtgtttcttttgcagcccaggcaatatgaggtgtgatcagaagcctggtgctgtcctgtatcttcagtagcggattctccggatccataggctccctgcaaagtacatccagtgcagcacctgcgatctcatctgtggtcaatgctgtgtacagatcctgctcatttaccagggctcctcttgccacattaataaagatggctgtattcttcatctttttaaaagcatccagtgtaaacagattttcagtatatgcatttaatggtgcatggacagaaataaagtccgactttgccagcagagtatcaaaatctgtctgctcatatctgctgtcatacttatgtcctgatgctgaatagcacagcaccttgcagccaaaggcttctgccagctgtgccactctttggccaatagcgcctagtccaatgatcccccaggttttatcctgcagttcacagaagctttttccgaaatgggaaaaacagcttcctcttgcatattctccagatttaacatactgatcataataggacagcttttccaaaatatagaaaagcagtgcaaaggtatgctgtgccactccgttggtagaatacccagccacattgtaggcagcgatcccttttgctttaagataatccccatccaggttattgatccctgtagcagtaaggcataccagcttcagattctttgcctgtccaatggttgcttcacagataggtactttattggcgatcactacatctgcatcctgcacacgctcaggcgcctgttcactggtgcaagaaggatagatcaccacttccccaaactcttcaaaaggagtaaataccatatcttctcccagactgtctgcttccaatattacgatcttcatgttgtatctcctctcttcactgagactcatttgttacccgctgcttataaaggcggacgtaagtacacatccaatgtaacgattcagtccataaattcccgtatgatctcacgcatgatctcttcctcctccggagtaagcatcttgctgaaatgactgccggatgcagcagtctggcggatgctggctgtgatcttgtccactacctgctccttcaggataggatctgctttctcctttgttgggatctcctccacccaagtacgcatctgctcaatatagtcggataatgtgcccatgaccaggctttccttgtaggaaaagtccagtccccaccttaaaagcatcagcaccacaggtactgcagctccgatatacaaatagatcaatggcatgcctttttccaggtcatacgcagttgtcagataaaaagccagtcccaggaccgctgttgataacagggaacaataccatacaaaccgattcatccgatgtagcagcctgtctcttgttttccataaattaagccacttctctttaagatttgataagcggcctgtttttctgattattcttctgtaagaaagatttgtggcaagcatacctgcagcgcccaggactccaagtccagccatacaataaagcagcaggtacagatccatgattttttttaccataagctcctccttatatcttcttgctaaagaagattataccccgaaacaggagcctgcggtacataaatcgttcgtcaaattctatacctgcctgacaaatttcgcacctgcagcttgccggaggctatatcagctgggggattgactcccagctgatatactgccagctgcttgtcggcagtatcactaagtctcagactttctgcagtttatttaccaattcttcaaaatgcataaaatgagaagcctttacaaggatggtgtctccttcttttacatagcttccaatcttactgagcaaagcctcccgatccggctcatagatcacatccatagaaggattgtcctgctttgccttctgtgccatatatccggaaaggctgccgcaacagatcagaaggtcgatcccacactttgccgcatggcttcccacaccttcatgaagggcgatctcatcctcgcccagttcacccatatctccaaggattgccaccttcctgccatcggcatcctttaatacatccagtgatgctttcatagacataggattggcattataacagtcgtctacgatcagatatttctctgtgtcgatcatatggaatctgccgctgatcgattcatagctttcaatgccctgacagatctgagggatggtcagtccataaatcctgcctacagcagctgctgccagtgcattatagatcatgtgctgtccaggcatagggatctttaccggaaagctttcttctcccatatggatcctgcaggacatccctttcagtcccaggcttttcacttcatctgcataaacaggcagtccctgatccatgccgaaaaataccggttttataccatgatattccttcactgtacacagcttgtcatcgtccccgttcagcacaatatgcccatccgggttcacatactggaaaatctctgtttttgcctttaatactccgtcccggtctcccagaaactccagatgacaggtaccaatattggtgatcacgcaggtatccggtctggcgatctttgcaagacgggtcatttccccaaaatcgctgatccccatttcaagaactgcgatctgatcgtcttcacgcagccggaatacagtaaggggaagtcccagttcattattaaagttcccctgggttttcagggttttatatttttccttcagaacagaagcgatcatttccttggtacttgtcttgcctacactgccggtgattcccactaccggtatccccagctgcttaagataaaattctgcaatatccttcactgcctgaagagaagactgcacctggatgtaaggatactgcgctccttccagtggtctttctgataatgtggcaagggcacccttttccataacctgtgggataaacgtatgtccatccacccgctcacctgctatgggtacaaacagaccttccggctgtatctgcctgctgtctgtggtaatagaggaaacctgtatgtcttttttattttcaggcccatggtaaacacctccacaggcctttgcaatatttgttaatgtaagattcttcataaactttacctgtatttcttcatggagcaacggatcagttcctcacaaagctgtggataatccatgcccagaaccttggcttcctgagggatcaggctggtaggcgtcatccccggaagtgtatttgcctccagacagtacatatccccgttttccttcataagaaaatccagtctgctgtaagcttccagcttcaaagcctttgccgcctttacagccagatcctgcatcttgtctgttaactcctgcgaaatatgtgccggacaggtttctacggtagatcctgcctgatatttattcttgtaatcataaaagccctggatcggtgcgatctcaataattggatacgcctttccgtctactacggatacagaaaactcccgcccctttatgtactcctctacaactgcttcgtttccgtaaatacttacttctttcaaagcttcttcatactctttctggtcatttacaatgtaaacacctacactggaaccaccgcagctggtcttaacaaccacaggaaactccagtccaagaactgacagatctgtatcaaagccattttctcctgtcagggtagcccccttaggagttggcacatgatttgccaggaaaaattcctttgtcatacatttgtccatggcaatggcgctgctcagataaccggtacctgtatatttgatccccatcagatcaaaagcagcctgtactttaccatcttccccgttagccccgtgaagtcccagaaatgcaatatcagctgcttgacacaattccagtacatttggtccgaagaaactgcgtctttcggctttcatggtttcaatctgaggattaaagttcttcatatattctacagcctggtcaacatcgtattcctcagggaaaggatctgcccagtccacattctctgtaccacaaaaaatatccaccagaactgcctggtgtcctttctgtctcagtgctttgcagatgcctgtacctgacataatggaaatatcccgttctgtactggttccgcctgccaaaacaacgatcttcataataagattcatctccttatattcattttcttctattgatataccactaccggcatgccgatctccacattgctgtaaagagctgctgcctggtcataaggtaaatttacacatccatgagacccttccagctgataaagattaccgccgaactcagttctccatacagcatcgtggatccctacatttccagagaaaggcatccagtaagtgacctctgctgcataatcctctcctgtcagcacagaaggagattttttgtttgccagtgcaaagcatccggtaggtgtagcacagccatctatatttggatttcctgttactacaggagtatctatgatcggtttcccgtctttataaaatacaagtctttgattcgtcaggtcgatctccacataggtgtagccgatatcattggtagcacggctccatccggagtaagcataaaccggctgccgcacctgggtttccccgctttccactgctgcgatcaatgccttagtctccgcctgctggtcaatggcccatccataatctccgccttctattgtaatttccctgttatcatatgtgaggaaagtacgtgtctttccaaatgtatcatatttgtatcctaacgcatccacatattttgctaccagtgcttcgtcaagatacacatctccgttctgatctatattaaaccaatcggcaatcacacttctgtctactgtttctgtcctgtctgcaaaatcataggtaatgatcacatctgacagttgattcatctgctcacaattacggatcagctgctcatctgtgctatatactgccggcttcagataacaggcttcatcctccaggtttacctgatgctgtcctgttaccattgcattggcgatcacctgctttaccttcaaaggatccagggcattccctgccacctcagtcacgatctcaaacttctctcctgtatccctgatctgggcatccacaggccggaccactttatccggatccatgcacttcagactgtctatagcctttgtcatcttctcttcgtcataggaaatgtcttcagctacatcatacacctgatcctgtccaaaagccaggaaccatttataacggttctgatctttgatcagcttctgtacacttccggaagactgataggaaagtcccacatcctctgcagtgatcccttcctgtccattattcttcgtaccgattgccagtgcatatgcatgcactctttctccaagaaggctctctgcctccccagctgtcatataagaacaattaaatccatttactgtagatccaggcagaaaatggctgctgaaataatgtactccataagcatatgctcctgcagtgcacaggatgagaatcacgatcaacgccatcactatcttctttcctgttcccattttcctgttttcatctgccataaactgcctccgatccagtcacaggggtctgtggctttacaggcccgctgttcttacattgctaatagtttttccacacttgcaatttttacacataaaacaaatacctgtgctgcttttcccagatcttccagtgtagggaaggacggtgcaatacggatattggaatctttcggatcctttccatatggataggtcgcgccagctccggtaagcacaacgcctgcttcttttgcttttgccacgattgcctttgcacagccatccattgaatcaaaggaaataaagtaaccgccgtgggggctggtccactggccaatgccaagacctcccagttctttttccagagtatccagcaccaattcaaacttaggacgaagcagtgctgcatgctttctcatatgagcatgaagtccgtccagatccttgaagaattttacatgacgcagctggttcagcttgtcatgaccaatggtctgtatctgcatataggtgcggaaatcatccaggttagccttagaagctgctactgctgcaatacctgatccagggaagcttaccttggatgtggatgtaaacttgtataccagatccggattgcctgcttttgcacattcagccaggatctctaccaggaaatcctgattgtcatcatacagatggtggatgctgtatgcattatcccagtaaatacggaaatccggtgctgccggtttcagcctggcgaaacgctcaactgtctcctttgaataggtatatccctgtgggttagagtatttaggtacacaccagatacctttaatcgatgcatccttgcttaccagctcctctaccatatccatatccggtccctgtggtgtcataggaacattgatcatctggattccgaaaaactctgtgatcttgaaatgacggtcatatccgggaacaggacagaggaattttacttcatccagcttacaccatggtgtattccccataacaccgtgtgtcatagaacgtgcaatactgtcaaacataacattcaggcttgagttaccgtagataatgatgtgatccggatccacctcagacatttctccaagaagtcttttggcttccggaataccgtcgatcaccccgtagttcctgcagtcaacccctgtctcgcatttcaggtcatcaccgctgccaagaacatccatcatttccatagaaagatcaagctgtgcagcacttggctttcctctggacatatcaagggcaagtccctgtgcctttacctctgcaaactgagcgtccagctcttttttcagtgcctgcagttcttccttgttcatttcggtatatttcttcataatttcctcctcttgcctgtatttcaagggattttaccactccctgtatatctgttacattttagtatgctaaattattggttgtcaagccttttccccatacaatatttatatggggtatgcacttttttcgtatattccaaccataaggatcacctgtatccctctttttgccttgcacaaccttcccttttccactatactgtccttataaggcacacctgccatcaaaggaaattcaaaaagaacgaggttttatttcatgtggattgcagataactggaaagaatatcaggtaatagacacttcccgtggggaaaagctggaaaaatggggggactaccttctgatccgtccggatcctcaggtgatctgggacaccccacgcacagacaaaggctggaaaaggcctaatgcacactatcacagaagctccagaggcggtggagaatgggaattttttgatctgccgcagcaatgggacattcattataaggagctgaccttccatctgaagccattcagcttcaagcacaccggtcttttcccggaacaggctgccaactgggactggtttggggacaagatccgtaatgcaggtcgtcccatcaaggtgctgaatcttttcgcctacacaggaggtgctacccttgcagcagctgctgcaggagctagtgtgacccacgtagacgcatccaagggtatggttacctgggccaaagaaaatgctgtggcctcaggtcttggagacgcccccatccgctggcttgtagatgactgtgtaaagtttgtagagcgtgagatccgaaggggcaatcattacgatgccattatcatggatcctccctcttacggccgtggtcccaaaggagaagtatggaagatcgaggaagcgatccatcccctgatcaagctgtgtgcttcccttctttctgatcagccccttttcttccttgttaattcctacactaccgggctggcaccggctgtacttacttatatgctgtctacagagcttggcaggttcaatggccatgtagattcccaggagatcggacttcctgtcagaaataacggtctgatccttccctgcggagcatccggacggtgggaggcagattcccattaataacatctaataacatctgtaacaaggagagagtgttatggaacaattgaatatcaagcatgaatgtaagcgctatggctgtgctgtacttgcagctactgtttttgccattaatatcaaaacctttgtaagagcaggtggtctttatccgggaggcgtcagcggtcttacccttttgatccagaacatttttgcccagtttttagggcttcagattccttacactgtgatcaatatcctgctgaacagcattcctgtttacgtaggcttccgctttatcggcaagaagttcaccatcagctcctgttgtgtgatccttctttccagtgtgcttacagacctgatccctgcacagcctatcacctatgattctctgctgatcagcattttcggaggactgatcaacggcttttccatcagcctttgtctgatcggcaataccagcagcggcggcaccgatttctttgccatttatttttccgaaaaaagcggcaaagatatctggaattatgttttctgtgccaatgcctgcatccttgtggccgcaggtatcctgtttggctgggaccgtgcactgtactccattattttccagttcacctccacccagactatacagatgcttcatcagcgttacaagaagcatacgctattcatcgttaccagacatcctgatctggtttaccacgagatttcccagctgacccaccattctgccacccgttttgaggggaatggctgctataccggtgaggggaccagcctgctctattccgtagtatccagagatgaggcaaagcttcttgtgaaaaaggtacacgaaacagatccttctgcctttgtaaatctgatcaagacagactatatcaacggacgtttttaccataagacagattattgagaaaagcaggacttctcctgcttttccatgcattaaagaggatgattatgatgaatgatgtatcaagacctgtacaggcacagcgattttggaaatggttcctgatctgcctgtctgttttctttcttggctttacaggcactgcctccgcacaggcagcttcctatgtaaaggcttccaaaacccaggtaaaaaccacctcctccaccagaagaggctgggtaaagcttggcaagcattattatttctacaatacgaagggacggctgatgtatggccgtatcaagtacaagggcaattactattacagctataccaacggacgccgtgcttccggctggctcaaaaaaggcggccggcgatattactgttctcccagtacagggatcatgttccgcaaccgctgggctaccagcaaaggcaagcgttactgttttgacaaaaatggggttgccattgcaaagaaatggcttacttccaaaggcagacgctattacttcctagcagactccaccatggcaaagggctggcagaaaataggcaatttctattactattttgataaagcctctggcgttatggccaggaatcaatggattgatgatgcttatgtgaacaacatcggtcaaaggattgctaccagggagccgcagccggccaagaccttaagttcctcccattatacctacacaagcagcaccctgaagatcgatcttcgcaaaaaatccatgcatggggtttcttactgggctgccaaaatacatatttccagtccttcccagctgcgttctgcattatcctatggtacttacggaggcacacgccagaccacatccagtgctgtatcgtctaacggcgggatcattggtgtgaacggcagtgctttcagctaccagacagggaagccttccccactgggcatgtgcatcaaaaacggtaagatctacggagattacatgaccagttacagtgtgatggcagtaaaaaaagacggaaccatttatacccctgcccagggactgatgggaaaagacctgctggcagatggggtaaaggatacctacaactttggccctgtgctgatcaaagatggcaaagtacagccagcctggtccgaaacagccaaatattatccaagaactgccattgggatgatctctccttgtaactacgtgcttcttgttacaaataccggttcctatacagggctgaatcactgggatatggttaatatctttctgtcttatggctgtacctatgcctacaatctggacggaggcggctcagccactttgtattacaatggaaatgttatgaacagcctgatcagcgattaccagcgtccctgtgctgatttcctttactttacaaaatagaatcccacgatatgcgaataacgggaaggcttgtagaagtgcaaagcacggaacaatccgtgtaatcatgatgaaaattctgttatcaaaaaacggtgcatctgtcagatcctttcaaggatcaatgacagtgcaccgcttttattttatgtttctatcagcttgctactgcaaaaaaatcattctgccgcttttgctttcttttcttccagagtctttgcccacatctggtctgctctttctttccagcatgctgcatactgatcacacttaccacacagatgatctgctgtctccggagactgcaggtctgtggacttggctcctgtctcttttacaagacggcgaaggatctgcggattctcaagcatcggacatggtctgagcatattttcattaaatggctgattgtcatgataagcctggaagatcgggctcttcagtgcatccagcagggatgtatctttgatgttgcagtttgaataatgaataaatacacatggttccacatcgccatttgcattaatatgcagatactgtcttcctcctgcaatacatccacctacatactctgcatcattctggaaatccagtgtgaagatagactttgtacctctgaattcacggatgctgtgatacattttctcacgctgatccggtgtaagaagcagctccggtgaagcatcgtttcctaccggcatataatggaagaaccatgcaaacaaagcaccgcaatcgatcagatgatcaaaatattcttcactgcttacactgtctacgtttgctcctgtataacaggtggatacaccaaagggaagatgtctttctttcaaaagcttcattgcatgcataaccttctgatagataccctctccacgacgcccatcattggcttcctcagagccttccaggctgaatgcaggaacaaagttctttactctcaggatctcatcacagaattcctcgtcaaataatgtaccattggagaaagaaaggaactcacaatccggatgcatttcacagatcttgatcagatctttcttacgcacggtaggctcaccgcctgtataaatgtacatataagtaccaagctctttaccctgtcttacaatagaatcaatagtctcaaggctcagattcagtttatgtccatactcagctgcccagcatccggtacagtgcagattgcaggcactggtaggatccagaaggatcgcccaggggacattacagttattctctgctgccacctcatcctgtcttgcacttcctttcaggctggcattgatgataaagttctgaaagaatacttttcttacctcaggatcaagatcataaatacgcatgatcagctgataccagttgctgtctttatctttaattgcattacggatggcatttctctgtcctacataccagtcatccggtgagtacttatcaaccagagccatcagctttggaatattggtttcaggatctttctccagatagcttaagccctgctttactgcggcgctaatagccgcctgttttaccttgtctgtaatcttcataatttcctccttatagatacatctttctatattgtataaattattttactgatcatacctgtcccatttgccttcgatcactttcacagtgtatatggctacacccaggtttaatgcaccttccaacaggaagctgattcctgtaaggatcatggtcatcttcgcccctccgtaaggatcgatcagcaggatcatcccgaaaatcccaaccagtatagctgccagcaggatcctccaccagagacttaacccaaagcgtctggcatcaatggacatctgtatccgtaccagggcatccataagcaccataagcccaagcactgcaaaaatcagatgcataatgctttcacgccttaccaggatcacgatccccactgctgccatcagtatgccaaatgcaaaatcaaactgaaatgccagacagtaaaaatcttttgaaaaatagccgatcatcttgatgatcccatcagcaataaacaaaaggcctatgatggtacagaaaataaccgcagaacatcctggtttgcacacaagaaacaatcccatggcacagaagatcagggaaattgctatgtaaccatttctggctatcttcagcattttcagagaatccatttcctgctcctcctttcttatatggtgataacaccgtcaggcgatatcatcctttcattagatttagtatacctcaaaaaaaagaagatcaaaacagacaaaaaacggattatgtctaaaaataaacataatccgctctagttgttatacgatttaacaaatgataccgggctgttaaaagtcctgggctataatatagaaagtgatgacatttaccacattccatgttcttttaaaatagcattcaatcttcgtgcatactcaaccaggtcatatttcatcccctgatccatccagtccagaagcatccctacgatcacacatttttcgtaatgtatgagaagcttcttgtctttttctgggatctgtgcaagatcactgtccttccctgcatactgggtaataatgtactctgccagctcacgaaggtgttttgcaatgacttccttatctgctgaccgatagatatgaaggattgcttttttgttctctcccagacgttcagccagaagcacaagcccttccataaagcttccgatctccatctggctgctcatcactctatctgcttcacgcttcagtgcgaagtacatcacatccggaatatcccgaaaatggtagtaaaacgtatttctgttgactccacagcgttctacaatatcttttactgtaattttcgccagcggcttctcgttaagcagctccagaagtgtctgaatgataatctcttttgtaaaacccgccattattctttcctgcctgttccaaacttgtatgcttctgcagttccactactttgtctttttgtattgacttattatgccataaatcgccagcaaaagcaacctttgcgctgtggagagaatgagaatacttacatctgtaaaaatcccgtatcgttacagattatttcaatttaacagttgttgctgcccatttgctataaatctttgccccatttgctgtattaaaggtcctcacacgaatataaatagtttttcccttgcccagattcttctgagtataggatgttgctttctttccaagtaccttcacagttttataggaacctttcttggatgttttcagctggatctcatatccaacagcaccctttactttcttccaggtcagttttacagttccttttttcggagatgaagccttaagtgcagcctttccaggtgcggtattcgtcttcaggatttctgttttgccttctgttttcttgttctttgtaagagacacgatccggaactgatatgtagttccgctctggagtgcctgacctttcagtttcttaaatacataactgttcttgtttgcagcaacatcagcaacctttgtccagcctttgctctttccaccttttacataaatgcgatagcctttcttcgcagccggatccttctgccatgtgatcttgatctgtgtttcagatgtttttactgcttttaccggtgcttccggagccttggtaggttctacagtaacctccggagcctgagtaggtgccggtgttgctgttggtgctactggtgccggtgttgctgttggctctgccggtgccggtgttgctgttggctctaccggttttgctttgatggtaagctggaaggttccctctaccttgccatcattaacagcaggatctccgtccttatttgctgcggttaccgttacagttccggccttttttgctgtcaggattccattctcatcaataccagccagttccgcattatctacagaccatgtaatctggctgtccctgatgccctccggctgaacctgtgctgtgaatgttacctcatcaccttcaaccacttccgttttctctccggaaacagttacttttgaagcatagggcacaatggtgatctgtttggaagcagttacatcagcatcactgtcactccatttctcatctgtagatgttgcagttactttcactgtgcctgcagcctttggtgtaagtgtaccatcactggtcaggtctgcatattctgtactgtcaatgctccagacaacaccctgctctgctgctgcaggtaatacagacgcttccagtttaacacttccacggcattcctccggtacactgtccaggctgatcccgtttgctttctggatcttgctcatagtagaaagaaatgcactagttcccatctttgttaatgccagattaccatagaaccaggcttcttccagagaattgtcatttgcgtccccaacactgtcgccccagaaagcatactgtcctacttctgtaaggctggatggaaagcgaacctttttcagatgctgggcattctgaaatgcaccatggaatatttttgttacgccatccggtacaacataggtttcagcgtcccttcctgccggatatgcatacaaagtagtacctgctttatcataaagtacgccatctatatccttgaagctggtgcttttctcatccacaagaatatccatcaggctggtacagccattaaagatacgtgtatgggcaacccctgccggattagtaccaaatgtttttacacttgccggaatttccaccatctccagactggaacatccatcaaacatatagtttggcagctggataagtgtttccggaagcttaatgctggccatccctgaacatccttcaaaagcagtgtgcccatatcctcttgtctggaatgttgtaactttggtagcggaaatatctatactggtaatttctgtctttttacagaaaatcccatttttaatctgggatacagaagccgttacatcacctttcgtcactgctcctggaacaaccacatcatacgcatcagcaccactgagatcgatcatgcccagagttgcacttgagccacttatcacaaaattatatacgatcccattatcatccgtataattattctctccgtccagctgtacaggatctgcatcgtctgcttttacagctgccggtgctgccatcataacagctgctgccatagcggataaaaacaattttgcatgtttcttcatgtttttcatactacttggttcctttctctttttctgcgcttccacgcagttcttgttctatttaccacacaggccctgatccagaatataagataaagcccgccggctagtgcgatcccggaaacaaccttcagttctccaggcagcctctgaccactgcttgcactagccacatttgcctgtttggcagctccgctgttactgcttcccaggcttgtttttgtttctgatttttccggcgtttgtccctctgtactttcctttttgcttttctcttttttcagttttttcttctttgtatcactcttcccttctttttgatctggcttcttcctgtcagatcccacagctccgcgcttttcctgtgggttttctgatgatccggaagaagttttattcatttttttcagtactccatctccttcttccacgctgtccttgttatttcggatgtatgcagtggattgttgtcctcccggccctttcttccctgaggaaccggaaatattgttttccttattcttatccgtgctgccgcttttacggctgtcgggaatactgactgtaagtacattgctgaaattaccggcttcatccttcataatgatatggatttctttttcaccggctgacagctttttcaaagtaataatattggttccggcgatcccttcaattccttttcctgaggtatcgatctggtcacttccacccttttctgttaccttgtaataatatcttcccttttctcctgatttgaagatcacagaggcttttttctgggaaatacggcttgcagaaaccggcttcagcaccggagctgttgtatctttgatataaagcttcacaaaataatctgttcttgtctgatcctctgctgttacagcgatccggacggatgcctcaaaaacctgtttttcaaaataaaccctgcacacaggatggctgcctgtatgatctacctctatggattcatcttcttttgatactgtggatttcttaacaccgcccactgcataaacctttaccgttgcctttgggtcggaaacctgcggccacaggttcaggtaacttctctctccctcatatacagcctggtagttaatggtttcagatgaaaatgcaggagtgagtttcaatattccttttccatacttgtcagagctgcttacatacagctgtttcaatgcagaatctgagcttcggctgctttcaagcgtgatctcaaaccgggtagtttcctctgatgcaacaaaatccagtgtttttgtgtaatatccatccaaagacaccgtaactgtataatggtttcccggaaacagtgtacagcttccgttctcctgaggaaccgtccttcctgtatcatcctggaccactacctgtgcctgtgccggtgttaccacaaaggacaccgtcaaaagcttatattcctgaagttccagatggacaggtgtttccattttatttccatagctgtctacagccagaatataaatgtcttttgcactgcctccggtcacatccagttcaaaggaattttccccctgcagaagttctgtacctggcacagacagatcaaataccggtgcatctgcccccttgtccacagccgccaggtaataatatccggtttcattagatttaaaagaaacctgtgcatggtcctggtcgatccgcactgccctggtatcggaaagaaccggcggatatgtatctgtgcgccgcagcgctacatgatactctttcaccgttactccgtccccggctgttaccttcaatgtaacctgtgccacagctgcctggtcatcaaagtaaactgcaaaccgggtcgcacccaaagttcctgctgtattttcaaaacgcatgatccttcgggttccttcgccggcttctgctgtaacctttccaaagcttcctgccggtgaagcgaaaatattcagaaatttctttccccctgtatatacatcggaagtataatccgtaatatcctttgagaaagccggcgttaccgggatctgacttgctgtaacattcactgcattattatcgctgacgatcagcgatgccaggtctgcattgcttccaagtcccaaaagtttaaaacggtaggttcgtttctgctgaccatactcaacaactacctgtatctctccctcgccctgttcattcaggggcactgtggtaatgcctgtatatggctgcccgtttacagtagcagtcctgccacttggtatagtcagctttacaaaagccgcctttgtgccatttggcatggtcagtgtataggagcctgtggaagaagaaaaatcatcgtcccattttacttttccctcctgacaggtgatatccacatcatccagataagcactgttagaggaaattgccatcagatatccggagtcgttcttataatacaaagtaccgtcgctgtcagcacagatagtactgatacagtactgctgctgttttttgtccggaatgtacaggtcctcggcttttccttctgtctgtcccggctcgtcagagataaagctgattccgcccgggtatacattataggtaaagtaaacgtacacccttccatccggtttgccgtctccgttataatcctcgttttcataggcagtggaaagggttgcccctgcctggggatatccccggataggcacggaatatgcacggtacaacccgtttgcatcctcagtaagtacatcaaaatgatggcctgcatcctcctggaactgtccgccggttccgcatacaccaatgtagatacgaccattatggaccaccggtgacgcagttgccattcctcccagggaaatagccacaagctggccaaaagttccatccgcatgcatctgcaccctgtaaaggatgccgccttttgttgcaaaataaatgtatccgttgtcgtacacaatggaagtacggatatccccatccagtccggaaatcatatcaatctggattccggtttttgctgatacggaatacaggatcgatgaggctgtataactgccctcccgtgaaccgtcatctgatccgaaaaccagatatttttctgttgcataggagccggcccagtaaaatccgcccatatgggagaatttccaggcacatttcttgatctctgtcggattgtccggatcctcgtctgtaacagaaaggcagaaatatgtaccctccttgctttctgaattccaggttcctgtataaatatacccgtttttataggtaataggagaaagcgtctgtcctcccagcacctcactgatccatacggatttcagggtcgtggcatctactgcctggatctgcccgtttcctacctgtgcaaagatcattccttccgcataggtcaggggatttaaggcaaaaacaagacttcccttcaactggtcacttacagccaggatcttgcctgtttccttatcaaccttataaatatatttacctgatcctgtatacagctgtcccccgaggatcagtgggggagtacaggattcgctccagctgctgctgatctgaagtgcccacttttcgctggtttccttagggttatttggtgtacttacgctggtaacaccgttattttcttcattgttgcggtaattccaccactcattgtctgtcagttcctcatgcttggtatctgcccgttccagacggaccttcagacttccaccaggttgtgcagtaaaggttcctgactcagttttaaacccgtaacagctgaccgtataggaatattccgtatctcctttcaggcctgcaaacatattgggttgattctctgagggcatcaccctttttcccaaaggatcatatacacagactaatgcatcctccgggtctgtctggaaagtcatatccgaaacagcagatctttttatggtgatggaataatttccctctgtggtatacgttttcccggccagagccccttccacataagtttcttcctttgcaagcctgacagggatcactgtaaccggatcggtgatgggaatttcaagctcttcgccgctttcccatggctgtccattgataaacaggctgtacccttcctcctgtttgatggttgccttcacataaacctgttttacctgatcggttatagaggctgtataatcaaaaacattactgaaaaatcttttctcgttaaaaattgattctccgtctgacgagtccgaacaggtcagatcattcaacgccagggtgcgagtgacaaggatcttgtaaacctcctgttcttcgccgtttcctacagtgactgtacagattcctcttctggcgccatattcacctgatttgaagaaatctccggtaaatccattacgataatccagattttctttcgacagcagcattttccggctcagtggatttccatttacatctgtggcactcattacagcttccgaaccagcaggtgcaaaagcagaaaggcttgcagacagaaagaacgagtaattggaactgtactgattgctgtattcagcaacataggtaatacctcccagttcctgatccagctcttcatggcgtaccagtgttttttccattccaccggaaccactgtgctgccttgtgttcagagtcatttcctccagataatggcccttggctttctgtgtaaattcaatattaatatgaccgttttcctctgttgccgtaaattggccttttacccgctggtatccatctgcataggctacataggaataactgttgttttcaagaagtcctgtaaaaataaggggatcttctttattagaggtgatcttggccccatattgatcatgcatctccacaaaaaaagtatctccagccccttggctctctgtagaaaaagtcatgttcagagatttttgcacaggatgtatatgcaaggtgtaaaccgtatcttctacaccttcgtaggaaagacggatttccacatcctcttccccgccttttaatacacaggcatattcttcgtcagtaggcgtttctgttccatttatcgtaacccggtatttttcccgtacatctgcatattggtaataacaggtctcaggaaacagggataaggtctgtcctgtggtatctcccggaagatacagatcatattctttctggaaatccgggtctttatctgcaaacaactcttcccgttcatggttgtaaagcacatattccgttccctgataggctgctttcagatatcccagagaaagaatacgttttacatgtaccaggtaatcttttgtgccgctttttgaatggatctgcatggtattttcacccggtccataatccacaatataatccattgcctgataattgccatactttgcataggcattcagatttacgctttccctttccccattgtgatttacataagtagaaagtacaggttctgaataactggacacgccaagaccgtaaattccttttgtaaaatccggtaaatacagagtatactcatggatctccggtgaaaaatccggtacagtcttgtagatcacatcaccttctgacatggtagtcctggaagcaaagcttaactgctccagccagtcatcactatcctttgtcgcatcctcagaatctgcatctttccctgaatccgtggcactgttatttttgtctgtttcctgactctgatcttcctgaccccctgttgccccctcctggctgttatctccttccgacggcgttgtcgttggttctggcggcactgctgttggttctgacggcgctatcgtggggtctgacggtgccattgtgggttctgacggcgctatcgtcggttctgacggcgctattgtggggtctgacggcgctattgtggggtctgacggcgctgctgttggttctggcggcgctgctgttggttctggcggcgctgctgttggttctgacggcgctgctgtgggttcaaacagtgcttctcctgttttttcctcagtctgtactgccgatgcccctgcagtctctgcctggactgcttctttggttatctgtggctcttttatctcttctgctaataccggaacactgctaaacagcagtatcacggacagataaacggccagcaatttctctttcattctaccaatccccccatgtctcgcctccgagcattgcttcaccaatgtctgctccataatataaagtgaaacgtacccgtatttcatccccatctgcggggaaataggtattcattcctgaactcagatacgtaccgtttacagaaaacatccatccggctcctccggtaagcgtaccatctcccagccagtcaggggagcaggtttccggatccggaatgtcatttacatcctccagatgctgcagaatctctgccggaatctgatatcccaaagtgattcccggacgatccacggatttaaggtaaaacccagcatccatagatcctgtataatggtactggaaccctgaagaataaagcacacggttcagtacataaggcagggtttcttcttcataaaacggaacctctgccggcccgatcaggtatcccagtcccatagtggaagcttccaggctgaaggtgatggttcctgcaggctgctcttcttcctcatctcctgtgatttccttatatacagtcacactcaccgtatcctgattgccatatctgtcctgtgccgtaatactgatcgtattcacatcatcaagatatgctttgtatttgatcaccccattatccgttgaaatactggtaagatgctgtccattgcaaagcacagtcagctgggatggagtcagcgccctttccttatagtcctctgcataaacagaaaataccctagattccctgtggatcacttctccatcctgcaggtcagaactgatagaaggccgcagatcctccacctctggagttggcgtaggcgtattctgtggaacctcagcctcttcctgattataatcatcatctccggcttctgcgtgatcttcctctatcacctgggtgtcatcaaagatttttgtaactggcttttcttctccatttttatcgtcctctgaagcggaaggcttctccccatttccatgctcgctggtctgtgtacccggatcttccggctgttcctgtgaatttccctcatttagattctccggtacaggcttctccggtacaggctcttcctgtggttcctgtatttcctctttttgctcttcctttggagcctgggaaggcgtaggagtgggatcctcctgcatcagcacttctgtttccggctgttcttctattgtatcctcatcgctgctgaccacaggagtataatacccttcacctctgtagagaacctgggatctttcctgatttacacctgtaacaggattctccgggatttgtttttgctgtgatcctatttttgctgcaaatccggcagtaagcaggatcagacacaaaatcagccctagcactgccgctgcttttcttctttgatcatgcttcatctgtgccgcctcccttcataaagattttcagcaaagcctttcaatatagcgcatcatgaaacggtcaaaccatctgttttttttcagtttttcttctttcagctttttcatataatcctgtacggaagccttttcctgccaggtgatctcatgtttgctaaacgctgccttttctcccactgtgacagctgtatcataaagttttaccagttcccctgaaaattctttttccagataacttcgtatatctttctttttgctgccataaagctgggactggccataaagtaaaagtgacattgcatatttcatcatataaagcactgctttacggttatcttcctgattgcatcctttctttctcctgcagcatgcccacgctcttcgcagtgccacaacgatcataaagagaattaatatgatgtcaaaaaccagaagaaggatcaggatcaggcgcacaagatcaaacatggttttccggagaagttccggaagtgatgtttcttcttcatgagtatttgtctcctgtggttctgccgcctgctgtgcacttcttgtgcctgcctgcaggcctttggtaagatccggctgcttcatgcgtttcagataatccggtgatacctctatggggacccatccaatgccatccacataaatctccggccatgcatgtccgttggatgctggaatgtccaaagtctttgccggttccttaccggaaagatcatcttcagtaattacatagccttctgtatatctggccggtatcccatagtaacgaaacatcagtgctgccactgtagcaaagtgtacatcatagccggttctggattctgttaagaaatagtttagaaagcttctgccctccggcatttttttgcatgctttatcatatatgaaattattctgcaaacactccctgatctttgtgatggcagaatagtaatctatatgcccctttgtctgatccccggcctctcccagttccctggaaagcagttctgtctggctttttgtcaggcctgtataatgctcatatacaaaagcattgtaatagctttctgcctgctcatattctgtatttttcttatcctgagtacttaaaaatgtttctgcggcaagctcagggaaataactggtaagaccggtatttacatggtattcgtaagaccggcttccgtacaggcggaaggaacgaagtgtttcgtctgaattttcccagacagaggcatcactccaggaacctgcttttacttcatatggtgtataaatatactcactatctgcattctcattagtaatcttcatcacctgatcctggtctggaatacttttatcctctaccaggctccgagccagatccagctgagcattgccgtacaatccagcctgatgcagccagtaaaacaggccattgttattataataatcctctgttttcaggtgcttccacttgctgccatcaaagctgcttcccacaaatccccgcagatagcaggattccagctggtctgcagtaaccgtcagtgctgtatcctcagtggcagaccagctgcctgcctgatccactcttccctttggaagagaattgatcttttttttctcataacggatatggttcagaagattacttccattgtcctgaagcgcctttgaaatacctgtaacagtccgggatccggaagggaataccgtagaagcaagcaatactcctgccagcataaataccgaaagataaagatacagctccggcacaagcctggacgtatgatttttcacagccttttttcctgtgccgtatacagaaagggccagcgcacctgtaacccccagccctgtaagcagcggccctgcataaacctttacatttcctgcctgtccggcagtcagaaaagcaggcagtgccaccacaattgccagccagaaccatctgcttcttatgatccagaaaaaaatcattccaacagcaaatgccagtacaaagcaggatgcctccatatcccttcccacagttgtctcacggatcaggacaaactttggcagtacgataccgatactttctcccacagtctgaaccagtgtattataaaggaccgtcagcccattaaccaaaggcgtaactcctgccagaactgctgccagaattaccccagcaaagagaaaggtaccctgaagtgcccattttttcagggaaagaagctgcagaatcagaatagcaatccctgtccccatccaataaaaaacagccggacagcctgtatcaacccactgctctaaagtaagtaggatacccgctgccaaaaaccaggctgctgttccttctgttaaaaaggcactgatattctttttatggtctgtttttttatcaacagaaaaaaacatatgctctccttatctatcaggcctgactgttgtcttccccattaagtatggttacttccgctgactcctgcagcagcacaacttcttttgctgcctcttttgcagttacataaatataatggccagcctgccattcctcacagttttcaagaaatcttctaaggcctgaaacaccgttttcctgtcttcctgcacgcaccaccagcactgctgcctgccagaagctttccatgtcctgtatgttttcctgaaatacccgattcagggcaaaatcataaaatccaagctgacaggtaattccctgcctgagtaatgcatctgttacagacaatgccaccgatgcctgacgatccagatattcaggatctggaaaagaaccttcatatccggtttccagaaataccagcacagaacgtgttaccggataccctggctcccgtaccaccagatcattcaatcttgcacttaacttccagtggatctgtttcatactgtctcctgcctcatattcccttacctggaaagtttctcctgcatcctcgcctccatgctcctgggaataccggaagctttccatattataactttcggaatgtgtgatctcttcccttgcatcatagatttccggcaatataacggttgctccatacattgacacaggaatcttacgtctgaatattctcaatgaatccatgcattccaaagtctgtgcctgaacagtacattctccactgtatactgtttcaaaagaaaactggatttcttctgtcttttttccggcaattccgaaaaggatcttttcttttcccttttcccctgtaagccggtttgcccagtacagatcacagccaacacaaaaaagcggcagtatggaatgattctctatacagatctttccgctgatcctagctttcttttctccgttttccggaagctgtatgtatccggcaagattccgcccagccagcactgtataaattgccaggcaaagcagcaaaaaaagcactgctgccaatacacagaacattccataggagccggtataaagaagcacaaggatcccaaccgcaagcagaatgcctgcggatattctgttacgcttcatttattccaccctgggtgcttctatatttttcaggatctgagtaagcacccccacagcagtcaggtcgctgatccttgctttcggactgagcacgatcctgtgtgcacacacatctgtccagacttcctgtatatcctctggaatcacataatccctgccggataagtatgctcttgcttttgacatcctgctaagagcaagggcgcctcttgggctgacacccagcacgatcccctgattttttcttgtctggtctgttaatacggaaatatattccaggataggatccgaaatatatacattatccgtctcctgctgcatttccaggattttatcagtatccagaattttacgcacactatccagaggattggttttctgcctgtcacgaagcagttctacctggcttttcacatccggataccccatactgagccttaccataaaacggtcaagctgagattccggaagcatctgcgtgcctgcagttcccagcggattctgggttgcgatcaccacaaagggtttaggcacttcataggtcacgccatccactgtcacattgccttcttccataacctccaacaatgcagactgtgtcttactggaagtacggtttatctcatctgccagaagcatattgcacatcactgcaccgggatgatactggaactgtccgttttccttattatacatggtaaatccggtaacatctgatgggactacatccggcgtaaactggattcttctgaattccagtcccaggatcttgcttaagcccaacgctgtggttgtttttcccacccctggcacatcctccagaagaatgtggcctctggccagaaatgccataaggattttatctgtaacttccttttttccgataataacactggcaagttctttttgtacttgttccattatttctgccataactttccctttctttaacttcctgcaatcaagtcgagcagctgcgagacttggcgcgtgattctggtcagcgtaagctgacatattctttacagaatcactgcgcatcctcgcggagcgtttatctcagtcggagattggactcccactgagacgaacttgctgttactcaccacctgaaagatgtgggagtcttctcgactgagataaaaaaagcgtaataccctgtgtggtattacgcctgattatcaaaacctgctttttggactgcctaatacactacgcaagaaatatccctgtaagtctgtcttccaggcagcctacaagaataacaatttccttccccattatcaatacgtgcactatataactggcagcatctttgagcagtatctctgacttaaaaacagattccaaaatttttgtatcttacagcaacctgttttcacacagaagcacgactgttcaggactctcacctgatcttctcttagctgtcttccaaacaatcccgttgtagaagacaggactcaaagccggtcattgttctatattcgttttgtaaggaattgtaacatatttttatattaaatgcaacacatggcatgatgttggaggcaaaagcctatggcatgatgttggaggcaaaagcccaaagctatgatagctacggattgtttcgcacaacgccctcccccaatcctaccctatattcgcatatcatggtctttttccaaggatcactgcacttaccggctccacagtaactacgtctttgcagaatgccttgccgcagatccggccatcttttacaaggatctcccagtcaccttccggaaggggtctctcaatcaccttgtcagatgcgttatacgcaatgtacagctgtgtccaggcagaggcgtttcccggatcctgattgtccacagtaaatcctactgcctgtgactgtgcccacagatcccggatccttccaaaagcctgtgctgtcttgtcacacaatccgggcatctgtttgcgaagccggatcagtccctgataaaaacttaccagttcttcattttcataagccctctgccagtccagacggttcagttctatgggcagattaaagctgttctcctccccgtccttggtccttgcaaattcctccccggataacaggaacagattaccctgacaggtcatataaacagctgctgccagtttattcactctgagaagtttctctctggaagcacctttcattgttgccagaagcttatcccacaaagtaagattgtcatgtgcagaaatatagcttatgatctgtgcaggtgatttgatctgactgcctggaatgcaccaggcctttacgctgtcaaggatcttctcctctaatccgccctttccgtttacaaagccaggcacttttgtctcaaacacatgacccttgatggcatctctggtatcgtcgcaaaacatacccacattttcatccagaaggccaatattagactttaatgcctggatactgctgccttccatagcagttttgtctgctgcccatggctcaccgtaaaccagtttttccccttttccgtaacgtacatccaattcctttcggatcctgttcataaggtctgtgtccagaagccccatcaggtcaaaccgaaagccgtcaatatgatattcttctgcccagtaaagcacggactgaaggatataatccccacacattggccgctcacttgctatatcattgccacaggcagagccattggagatctctccattttcaaaagaacggtaataataccagggaactgctttattcagatttgtatccagagaatacatatggttatacaccacatccatgatcacacgaaaaccatttttgtgcaaagcctgtatcatctctttaaattcacggatacgcacttccccatggcagggatctgtagagtaagaaccttccggaacattataattcaccggatcgtacccccagttaaagccatgatcatccttctcatccacagagccataatcatataccggcatcagctgcacataagttacacccagctgcttcatataatccattcctgtgggatggatcccgtcattatttaaagtggtatgttcttttgtaaatgctgtatatttcccacggtctttttcagggaatccaccagatctgtcccaggaaaactcctttacatggatctcataaataatattttcctctgcttttgcaggagccttatcttccttccagccttttgggtctgtgctttccagcaataccgccatactccttttgccgttcacaccgcaggctctggcataaggatctccaagacatacctgttctccatccatagaaagcctgaaatcataatatactccgttcagattctcttctgtctcccatctccaggttcctttttcgcccttttccattggaaaagatccatatgcttctcctgattctccgtctttgtacaggtaaagacatacttcctctgccaaaggactccacagcacaaaagaagttttcccctctgtgcaggtacatcccagatcctgtcctgtatatgtatagttagccttgaaatcttctgtattatagatccttttccattcgctgatacttctcataaatacttcttccttcccgccaaaattcaagaatgccttcatagttttcatattatatccaactctgtccctcattgcaaccaaaatcagtgtttgccatgccactgataatatgctaccctgatacaaatgcaataaactgtttaaatttcataaattcttaagactttcctttcgcctatcttaaaaaggaattgttacgatctgaccattggaggtaaaagaaattggctaatatattagtatgtgatgatgacaaagacattgtagaagcgatccacatttatctgcagcaggaaggccaccaggtgctaaaagcctatgacggagttcaggctatgcaggttctccgcacccaggcggtagaccttttgatcattgatgtgatgatgcccaggctggacgggatccgtgccacactaaagatccgggaagaaaatccccttcccattattatcctgtctgccaaatccgaagatgcagataagattctggggctaaatgtgggggcagatgattatgtaacaaagccctttaatccactggagctggtggcacgggtccgctcccagctgcgccggtatatgaagcttggctctgtttcccaggaaaaaagcggccatatctacgagaccggcggcctgatggtagatgatgaccgtaaagaagttacagtggacggagaaccggtacggcttacccctattgaatacaacatcctgctgttattgatcaagcaccagggacgggtatattccattaaccagatttacgaaaatatatggaacgaacaggccatagcagctgataataccgtagctgtacacatccgccatatccgtgagaaaatagagatcaatccaaaagagccccgttatctgaaggttgtatgggggcttggctacaaagtagaaaaaatctgatactttttctgaaaggagttcttatgaatcacaaattttacagaagccgtcccatgaaaggtctggtctggatcctgacctgtggtttcctgtgtgtatcccttgtatgcggactctttctttcttacatgctaagcaaagaccagtcccctatacagatggctgatacctatccaaagtccagcatgtttgcagacgatcttaataccgctgctggaaagatcgccgctgcttactcaaatacttcccgtttttcttctgttacagatgattcctgcatgatcgacctggatgaagttttaaatgaccagcctctttccggcaaaaacacttccggccttgcctattccttctctgatctgaagaaatgggtcagtgatagctggtcttatgattctgatccgggccacacaattgtgatctgtgaaaaagaagacggcacaaaagaatatttccctttctctgattttcaggatcagataaaaaacggcactcttaacttccggtataaccagcagtttcttcatgatgatgtgtggacagagaaagaagcatatgacatgatcatgagtgaactggagtacgattatttagaaaaagaggtttctgtcaatgcccttaccggaatttatggcagcgataaaaccacattgaaatatgtaagtgtttccagctgtacgcaaacccctttggtggaggacttttctccggcaggaggcgccagtatcctggatatcctgaatcatgatccaagctggaatgaccgtgttctggatgcactgaatgctctggaaaaaacattatctttagtatccgcctatatggacagccagaatgtgcttcaggaatatggagctgattccaaccttacctggcttttagcagacaatgataataaaaaggctttttccaatcaggatgtctcctactccttggccgcatctctcctgtcaaagatgaaacagacaccggtatatattcttaccggctctgaccgctcctttgaaactgcaggaactgccatcagtaatacaggccatggcatcctgtctgcctctgcctggcagaagaatatagaaagttaccttaatctttcagattatacctttgcaatggcaatggatacagactatcctgcagcagatattttttctgcccatgcggatacttatcagatctgccagaaatgggcacggcctgccctggccggttttgctgccggtttgatccttacactgattggttccctgtggctttgcttcaatgcaggcagaacttcaaaagacggtaatatccaccttacatttattgacagatggttcactgagatttacggggtggtgcttttcctaatctggttcttgccctttgtttatgtaataaactgtagcaccttggttacgctttatgaaaatgcacaaaacggaagaaaagcacatgcttttgtacttatatcccttttgttatatacctttgtcctgatgctttcctttgtccttggcatgatccgcaggatccgtaccaaaaccttctggaaaaacagtctgacctgcaggattttctctctgatccggctgttcttccataaattaaaagatttttttgccctgtattttaccaacactgcccttaaaataaccctgaccctggggctggctgttttcctgtttttccagtttattttttccatacttgctgtaaataccccacagattttcctgcttctcctgtttgttatggatgctgccgcactggtatgggtgctcaaaaaagcagacggccaggatcagatcacccttgggcttaaaaagatcacagaaggcgacctgcagtataaaatacccacagaccgtctgaaaggcaatcagaaacggacagcagaatatatcaacaatattggcagcgggctggatgctgccgttgataaaagccttcgggatgaacggctgaaaacagagctgatcaccaatgtttcccatgacatcaaaacgccccttacttccattatcaattacatttccctgctgaaaaaggagaattttacagatccaaagatctgtggctatctggatatccttgatgaaaaggcccaccgtctgaaaacactgacagaagatgtggtggaagcctccaagatcagtaccggaaatatttccctgaatattcagcctttgaattttacagaacttgtccagcaggtgtgcggagaatttcaggaacagttccaacgcagacagctgaccattgttacccttttctctgccaaacaacccaccatcctggcagacggtcagaaaatgtggcgtgtgctttccaatctttttacaaatatctataagtatgcaatggaaggcacccgagtatatatttccctggaaaatcaagggacagaggttgtttttactgccaagaatatttcagcacaggctcttaacttctcagctgaccagcttacagaacgctttatacgcggggatctttccagaagcacagaaggcagcggtcttggcctttccattgccaaaactctgacggagctgcaaaaaggcagcttccgcctgtatcttgacggagatctttttaaagtagtgatcaccttccctgtggaaacgaaatcacctgaggaagataaataaacaagcaaaagaaaaaaccagatgtagatccttattcagggtcttcacctggttttttcttttatctccactttccgtcagcagcaagaagagcacctacgatcaccgcttcatccatcagtctgcaaggttggatcacataagttcccttatttgccacaaatgcatattcctctgtaaacctgcggatccgtgaaaacagaacctctcccattttagccacacctccgccaatcaggatcttctggattcctccaagagccaggacattggccaatccgatagaaaagctggaagcgatccgatccagttcttccatacagaaagcatcttccgcctttaccccatctccaagatcctgacaggtgatccgctctccttttttgcacaaggaagagccttctggtacatagccaggctgattcagacgggtctcaatacttctgccggaacagatcagctccagacgggtcattgcccctggtgtactgctctgccagtccgggatcaggctgtttcccagatagcctgccccaaaaccgatcccatcataatttttcccgtcaatgtaaaggccgccgccgatgccagttccgatgttggtataaaacatggattttgaaccgatcccggcaccgcaataaagctctgcaatcccaccggctacggtatcattcacgatcactgccggaagatgaaattcttcttcaaaccactttttcagctgaaaatccttccatcccggaacctgaagtgaacaaagcacacgaccggttgaggactccagcggtccgccaaatccaacgccgatcctggacacatccggatactcgtcaagcagctccctgatattttcggacagccagtcaagaatgtcctctgcgcctcttttatacttaagctttacattcctgctgacaataatatttccgttcccgtagccaaccccgatctgctgcttggtaccgccgatttctacgccaatatacttattcatgccactgggctccatatttcttttcaatatctgagatcatctgcacacgcattggatgacggcattaatacttttttgcatttatgttattttacactggcaaaataagccagagctccaccgatcacaccactggtctgggtatgttcagggaaaacaaactgaatatcctctgccggataaggatgtctgcagcgtattctgatctgctcaagaagcctttccatagggaagtccttcatgatcatcacaccgcctgccattaatacatagtccggatccagaatcgtgatctctgtactgataggataagacaaaatatctatatattcctggatcaccggatcatctccgtgttttgtgaaaatatcatcgatcactgtatccgggaaatattccgcccttatttcctgcagatgcttgcctgaacaatgaagttcactacattctttgccgccgcatccacactgtccatgggcacctctaagtggaatatgaccaagctctcctgcaaacccatgctttccgcaatgaagactgccatttatatacacggcatttccaaagccagtgccaagatacataccaagaatggttttgtcacgatcaggatcaatatcaaaattcttgatatcattcatcaggagatagttcacatccctgtctacaaacaccggcatctgaagggcatctcttaaaagatgtcccagatccatgttctcaagacctttcaggtttggagaagaatagataaaactcttatccttgcttactgctgacggaactccgatagtgatagccaactcttctttattcagctgatatgtatccatatatctgagtatctcattttttagattttcaactgcattatcggataccagagaaccactggatttcttttcaaaatgttccagatttccattgtgatccacaactccgaaccgcaggttggttcctccgatgtcaattccgattacttttttcatagatttctcctgtcctcaggcattcacttcctgattgaagtctgcgatcatcttatcccaggctgtttccagattggaatccagtccaaacaatcctgtagaacctacaacgaacacttctgttccagcttccgtcagctgcttgaaggtcctcttattgcaggatccgtctacctcgatcagataattatatccattttcttccttcaactgtttcagttcccggatcttgtctaacatttccgggatgaatggctgtccggaaaacccaggatcaacgctcattactgtgatcttgtccagcttgtggatgtagtgcttaatataagataccggtgttgcaggattcagtacaacgccaaccttgcatccattatcatgaatcttgttgatgatacgaaatgcttcggaattgatagtctcagcatgagggcagataaagcctgcacctgcttttgccaaaggttcaataaaattatccggtgtagttaccatcagatgacaatccagcggaatgtcacagatgggatggatcgcttttacaaaatccggggacagagtaatatttttaacaaaatgtccatccatgatatctacatgataaaagtctgcacgtttattcagaatctggatctgctctttgatattaagaagatccatacacattaatgaaggattaaacattggtttcatttcttttctctccttaagccaaaaactgtaactttatttgaatttgtaacatgatccgggtgtgaaaacacctgaatccagattatttcttacttactacgaaatgatcgattgcaacagaaataatgatcagagcacccattacaactcccgggatcttacctttatcacccataaagcttgttccactgatgatggaagcttgcctacgaaaagtttttctaaaatagataactcgttaattacacttaattcctggtaaataatactgatgcagccttcatagaaatcttagtaaagtctccatattaccatttttctctgttattataaagtgaacgtgctcctttcctgtatattttttcataatttggaacatattttgaatatttttgcacatatttgttaggtaaaggattacacaaatgatggacagcttcttttcattcatagtaataaccaccttatttttcgttgcgtaaacctttacgtagcttatggtgtaatcataatacccgtgttatgatttgtcaatataccttttatcatttcgtcagtttcgcttatttgaagcattatttttatgcacatttcacaacacgcaaacagagctgcttcctcagccctggaaacagccctgcttatatttgagaaagatttatttacggataaccttaatatcctttgtgatctttgcagcctttaagtactttttgtatgctttgtattttgcttttggaacgtagatctttgctcccttcttcaccttacagaaggcatttacctcaatcttcttcactgctttggatctgatggtgatcttcttcaggtttctgcagccctcaaaagcctgtcgtccaatctttgtgatcttcgctcctattgttacctgagtaagcttcgtattatttctgaatgcttttgcattgatagacgtaacctgatatgtatagctgccaagctttacatatgcaggaatggtgatctttttctctgttttctttacaggacgcattaccgttacagtctttttggaagctgtggatgctgtcaccttgtagatcagccctttcaccttatgctggcttcccttcttaggaagagcaggcgcagctgtaggtgttggtgtgtgtgtatttcccggtgttacactttgctccggtgccttggtaggcgttggtgctgtactaggcgttggtgcttctgatggtaacggtgctgtgctaggcgtcggcgcttctgatggcaatggtgctgtacttggctctggctcagtaccaccagaccatttggcatacagatctgtgatataatcagaccgggtggtccagaacggaatcttccagtcagcatgtccggtcgtatcataagtccggtcatcctggaagccgtagaacttctggttaaaattctcatccaggtaccagccctcaaactgataccctgctctcaccggtgtaaaattcacatccgtatacttataaggccaggttgagtctttatcccgatccacttcgctgatccaggtatccaatccgttcactgtgccgccgttcccatggaatacagcggtatagcccttattaaagctgaaccagaaatctctgttttgccctgttccaccagcatatccgaaatatcccggccagtattcatgaataaaatatctctggccattctctatgccctttgtaaaatcatttccaaacagagaggaacgtccgtcagaagttcccatgcttgtacaatgaaagccttcctttacaggcccccagatttttacagaatatggctccagagtggcaactgtataagtagacggatttgttttgccctgcagacttccaccatccagatcataagtaagatcacactccggctcataaatccttacaatcatgcccttggctctaagattataagttcgtatacaattcccctcgccatcaaattcattcagtgcctccatattgttacaggctggcccttctccgttggcagctacccgaaggatttttcctgtattattcacaaacccggaaatcacctctacatactctccctgtcggttgtaaatcttagttgtgacaaattccagccctttcagtgcttcaatcaattgcgcatttacaatccctgctttatatccatcgcttggatgctctgtaacaaaatgattggtaaacggccctgtagccacactttccttgg

SEQ ID NO: 122 - DNA, 5692 bp, Unknown
  gut microbiota DNA sequence
ctgactgtagacagaccaagggaagcaaaggggaataagacctattatcttttaaagcgaagcgaagggatccttacgatcatagagtgtggatttcttacaaatccggaggaggccacacttcttgtacaggaagaatatcaggaaaagctggcagaagctattgctgacgggatcatccggtacctggaagagaaccctgccgggggtgtacaaactgaacaaaataagatataatatgagccgtaaatggacgaaagaatggagtaaaatatgctgggaattatatatcttgttttatgtatattgataggaaaagagatcacatctgtgctgctgtcagatggcaaagcagatggcacagggtttaacaggatctggatcacagcacctgcttcctttgggattggcacactgttccttacctgggctgtttacattatttcctggtttgcaagtgtgaaaggcgggatggagcatcctctttttctgggaaatcttgtggtgatggcagctgcactgctttttcttgtgtggctgtatgccgtaaggttccgcagccatcagtctttatgggcattaaagaaagagacagctgacagccaacgtctgatcagagaggctgtctttttcgggatctgctttttgttcctcacctggatcatgttttataccttccatttgagtggagggtatctgtattccggatatacagtttatggggattatgcaccccatacggctatgatgcgttccttttcactggagaataattttcctacccagtatcctcactttggaggagcagacgtaaaataccattttatgtttcagtttttgtcaggaaatctggaatatcttggtcttcctatagatattgcatacaatagcgtcagtattctttcccttcttggcttttttatgattctttacagccttgcatttcggatcacagggattatgggagcagggatattgtcagtagtgtttatgatattccggagtggaactgcattttttgtatttgcatgggaacatatccaggcaggagatctatgggagatttttaaagcaaatacctcttttattggttataccactaatgagaactggggattatggaattttaacgtatatctgaatcagagacatttaggttttggcttgcttctggtggctttggctttgtgggtatttctggattggctggaggcaggggcagatcatcaggagaaaggctggaaatggctgaaatgcaggtttacgaccagggaagcatggcttcccaaagatccggagcgggcacttttaatgggccttgtgcttgggctggcttctttctggaatggggcagcagtgatcggcggtttgctgatattgtgtggctttgccctgttttctgacggaaagcttgattatgcattaactgcaggagtgacggttctttttacaatgatccagtcaaagatttttgtaaccggatctgtggtttcgccatccttctattttggatttctggcagatgataaaaccctgtggggaagcctggtatatctgtttaagatcacaggccctgtatttctgggagttattttgctgctggtgtttatgaaaagaaggcagagggcagcagcagtggcttttctcatgccggttttgtttacttttaccatatcacttactccggacattaacgtaaaccataagtatgtgatgatcgcgtatgcatttatgactattttctggggatgggttgtatgcggcctttggaaaaagaaaattccggggaaaatatgtgccattcttttgacagtcagtcttactcttactgggatttacgattttgtggtgatcctgaaggataatgattccatgcaccgggtatctgtgaatatgaacagcacactgacaaaatggctaagtgagaatttgacagatcaggatctgatccttacaccagagtatagtatgaatgaggtgactatgtccggtgtgatgatgtatctgggatggccttattatgcctggtcagcaggatatgataccaattacagggcagcgcaggctgtgcagatctatactgctcaggatcaggagattttagagaaaaccgtggccgaagagaagattacatatatcttgtatgaagaagagatggaatttgagcagcaggcatgtagggaagatcttattgaaatgacgtatcctctggtttatacttcagatgacggacggatcaggatctatcagacaacagaggaatataaagaaaaaggggcagtatgatggaagcagaaatcacaaatgcaacaaaaaaaggaaaaacagtgggaaagaaaagaatcttgcagcttctgctggcaattgccctgatcggaggctccgcatatcttttgaaaggggatgtgtggacgttctggacctggtggcttcttgccggtgtgctgggactttgtgccatgccattgacagggaggctttttcagggatttgcggataaaggctggattttttccaaagcccttgcaattgcggttaccggattttttacctggtttctggtgtctattaagcttgcagcatttaccacacttacctgtgtggcagtagtattgatttttgttgtgtgctgtatcctgcttttcctgcatcagaacagacaggggatctggtgtatgccggaaggccatggagatctgatcttttgggaagaagtgatcttttttgccgcatttcttatgtggacttattttgcagggtttcatccacaggcatatggaacagaaaagtttatggattatggcttcatggaagctatgatgcgaagcactacgctgccggctaccgatctgtggtattcccaggggaagatcaattattattatggcggccagtattttgcagtctttcttacaaagctgtctgttaccaaggtggcaaagacctataacctgatgcgtacttttgtagcagcttttgcatttgcaatgcctttttcgctggtttatcagatggtaagagaccggatgtacggacagcttacagggaagaaaaagtgtgtgcctgggcttgcaggattaacagcagggatttccctgtctttggcaggaaatgggcattatattgtttatcaatgggttcttccatggattcagaagctgcggggcgtggaaagcgattccagctactggttcccggatgctacccgctacatcggatataatccttacagggaagaggatcggacaatccatgagttcccaagctattcctttgtacttggggatcttcatgcccatgtggtaaatatcctgtttgtacttttgctgatcggtatcctgtatgcatggatgaagaaaatgaaagcccaaaggctggatcaggtggatcttcgtacatttgctttctggaaaagagaaatgttatccccctatctgctgcttgccggcttgcttcttggaatgtatcagtggacgaatttctgggattttgttatttattttgttgttactggcggtgtaatgttgtttggaaatattgtacggctgggaggcaggatccgtaagatccttgctgttaccattgtacaggcttttgagcttttggcagtttcctatctggtgatccttccctttaccattcagtttgacagtatggtggatggtgtgggaatagccaaataccacagctatttttatcagctccttgttttgtgggggattcctgtattgcttgttcttgtatttgtggtttcacttttaaaggaaaaactgaagcaggtggagcataaaagcttgtatagtctgatggctgccacagatgtaccggatctgtttgccctgatcaccggattatgtgccattggattgatcctgatcccggaactggtatatgtaagggatatttatgaaaacggcaatgcaagagccaataccatgtttaagcttacttatcaggcgtatatcctgtttgccctgactatgggatacgggatctaccgattgcttatagttaccaggaacaagctatccaaagtactggcaggcattgtgctgttcttccttgtgtggacctttggatatctggggaacagtgtaaaggcctggtttggggatgtgtggaaggtcagcgattaccaggggctggatgccaccacattcttggaacagcaggtccctgaggatgcagctgccatccggtggcttagggcaaatattacaggttcgccggttgtgctggaagcaccaggagacagctacaccaagtatgaacgtgtgtctgcagctacaggacttcccacggtgatcggctggagagttcatgagtggctgtggagaagcaatgtagcggatgtggattttaaagcagaggatgtaaggcgtatctatacgtccacagacgaagaccaggttaagcgtcttttgaccaattatgatgtttcctatattttcattggttccacggaacgggaaaagtatggtgacagtttaaatgaagctttgcttcaaagtcttggaactgtggttttccaggatgagatctatgacacatatatcattaaggtggatggggttaattaaaaagaaagtgagataaagaaggctgagaatatatgagagcagaagtagtagcaatgacaggggagtgcttgaaccatgaagctttgaaaagagcaggagagatcctgaaaaacggcggattggtggcatttcctacagaaacagtttacgggcttggaggagatgcattgaatccccaggcttccaaaaaaatctatgcagcaaaggggcgtccttcggacaatccactgatcgttcatattgcagatatggacagcctataccggatcgtaaagacagtaccggaaaaggccaggatattggctgggaaatactggccaggacctttaactatgatttttcagaaatctgatattgtaccaatggagactacaggaggactggatagtgttgctgtgcgttttccaagcgacccgatagcggcggcattgatccgggctgccggtgggtatgtggctgcaccaagtgccaatacatcaggaagaccaagtccgactactgcacagcatgtggaagaggatctgggagatgccattgatatgatcattgatggcggggctgtagggatcggtcttgagtcaacgattgtggattttacagaagagatccctgtggtactgcgcccgggatatatttccctggaaatgcttcaggacacgctgggggatgtacggatggatcaggggctgatccggtcagacagttcagtgcgcccgaaagcacctggaatgaagtaccgccactacgcgccaaaagcggatctggcagtagtagaaggacaggctgagaaagtggtagccaggatcaacgaaatgacagaagcagatcttgcaaatggaaaaagggtgggaatcattgctgcacaggaatcctgttccttgtatccaaagggaacggtaaagtgcattggtagccgtgaaaaagaagaaaccattgctcataatctttatgagatcctcagggagtttgaccagtgccaggtagatcagatctactcagaagcattttacaccccccagatggggcaggctatcatgaaccggcttttaaaggcggcaggccataaagtaataagcgtatagatatataaaaatagcatacagctatataaa

SEQ ID NO: 123 - DNA, 11770 bp, Unknown
  gut microbiota DNA sequence
atacaggagggttttacatgggaaacaaaaatatgaaaaaagaagattatctttcttgggatgaatattttatgggagtggccatactgtcaggcatgcgttccaaggatcccaactcccaggtaggatcatgtatcgtcagcgaggataataagatcctttccatgggatataatggattcccaaagggctgctcagatgatgaatttccctgggccagggaaggagtgcccttaaataccaaatacttgtatgtgacccacagcgagttaaatgcaatcctgaattaccgtgggggaagcctggagggagccaaattatacgtttctcttttcccatgcaatgaatgtgcgaaagctattatccaggcaggcatcaaaactgtagtctatgacagtgacaaatatgcagatactccggcggtgatcgcatccaaacggatgatggatgcagctggtgtgcgttattatcagtacagccgcacaggcaggaagattgagctggatgtgtaaggacgcctttggcagattggaaatgatacagtgtgcgactataaaggctactgtttttacaatacaataggatagataatatgactccctttggggacagcaggcattacaactgtgatcctgccgttctgaaagggagttttttatgtgatacaaaattactttgtaatgttctgttacataaaaacactccattttgttcttaagggaaaagttatataaatcgtagaaaattgatattgtatcctccagaatataaaaagtaaactataaagtaggaaattatgtaataagataactttaggttctttcacagttacagggcaaaatgcattaggtaataggacattgttcagtagtggttctattacataaaaaaagcattggcttaaaagttttatatatcttttgaaggaggagaaacggtatatgaaaaagaaaacagtacatcgattggcggcatttatgacggcatgtttcctggcagcaggagatctgggaaactctggctatgtaatggtgtcaggggaagcagtggcatcagaaacagtcagtctgcaggaagagcaggcagaaggtcaggcggaatcgacacccgtagcaggatcagctggaacagaagaaatatctagtacagaaattccacagataacaccggcacagggaaacgctgccgagaatgcaccggcagctccaaccggacaggaggaaaaacaggagcagccagctagtcaggagcagccagctagtcaagagcaggtagcaggtcaggagcagtcggcagaaacagaaaacaaaacagacatccaggctgaaaacagaacagagcagagcgaaggcctggaacaggaagcagatcaagagtaggcagcagaccagaagcagtcggcagatcagaagcagaataaggatcagaccgctgcttcagatggggcagctcaggagaacgaggagcaggctgccccggaaggccaggatcaggatccatcttctgaaacagcggcttccggtatcaaaaagcagatccaggatcagggctttgcttatgtagaaacacaggaagaccatgtgcaggtttatactgcagcagatggaaacggtgagaaaaaaggagaaatcctgaaaaaggacagtctgcttttaggggagcagtatgtagaaaaccaggatgctcaggactgggtaaaggtatggtttgatacagatacagaagaaggaaaactgtctggatttgtaacagctgaaagcctgaaaaaagatcctgtagaaaatcaggcagctcttcaaaggatacaaaattccgggcagacagtagatgcctggcaggatccggggatgacaaggcctctggcagagattgattatcagccagtggaagctcctgtagaagaactggcagatgagattatagaggacagttctgcagatgaaacacttacagacgaaacacctgtagacgaaactgcaacatctgcagacaaaaaatcagcggagggggaagcagaggaaaccaacagaaaagatatcactttcaggattcactgggatgaaagtgctatgccggaggttggagataggtatagacctgacagggtttctgtatatttgtatcgggaaaatgtgtatcaatcaactgtagcatatatatatataagcgggataatgctgatcaggatcagtgggagaccgtattcaaatctgtaccggtttatgatcctaccggaaatgagtatgaatacaacctgcgatttagtgtatctgattctacagaagtttataaatattctgatataaaacagtcaggagagcagtcagagttgtatgaggcggatgcgattctgcagaaaacggcaactattcatgcggaaatacgatggaatgactacgacgatctcagtgggatacgtcctaccatgttgactgctgacatgatcacgttagtgaatacaaggcgtttaagcatacttacccaaaccttctttgaagaaagcctgggatttcttttttgaattatcaaaatttatgctgtttctttcagcctaaacagatgctgtcctgttttttcagactgtattttattatgtagtttattgattttgtgtgcgatcgcaagaatgacgctttgtgcagtgacgttttcttttccgcggtacatatatcgtctgaattctatatcctgttttacagaagcgaaggacctttctgcctgtatacttcgattcactctaagttgaattccgtatgggctggttatgcgttcaagatcttctgcccttttctgtttcatggtttttgaaacatacagtgttttattacgctgttccattgatgtcttgcaattattgcctttaatgcaatccgctttataaggacagccactgcagtcggaacatttatagaaagtcgtagttcttctatagccggttgccgtttttctcttcttttcatactgggctgtcaacttttgattgttcttgcatatataaaaatcattctccttatgccggaaaattgatatgtcgtgctattgacgaagcaaggcagcagggacgtaagggacttgtactgacgtgtaaggaaaaactcgttccgtattacgcaaaatttggtttttctgatgaaggtgtatcagataaatccacgcacggaaatgtcgtatggcatcagatgcggctggctttttgataggtaacaccaataaagatggttgactttataatatattctttttataattatttcataaaaagggtgcagcgtggcacatagacaggaatgtctgtgtgctttttttactttattcttgggttatggagggaaaatatggcagcttttgagagaatctgttcgggaattccggatatggatcaggcactggataatatccggctgggggataatgtggtctggagagtttcaaatctccaggaattcaggtatttctgcgaaccttatatagagcaggcaatcaaggataatagaagaattgtatattttcgatttgccagtcatgagtcgctggtaaaagaatgtccacaggtagaacgtatagaaattcccttatcacacaggtttgaggattttactgtgaaaatacataaaataattgaaaaagaaggttttgatgtattttatgtatttgactgtctttcagaacttcagacagcctgggcaacagaccttatgatgggaaacttctttcgtgttacgtgtccgttcctttttacactggatacagttgcatttttcccgattatcaggggaaaacattcttttcatgcagtaaagaaaatattaaatactacacagttgcttctggatgtctattctgacaggagaaacacatacgtccgtcctgcaaaagtgtggaacagagattcggaaaccatgtttcgaccacatatttataacagagaaacaggtgaattccgtccgatcctggatggagtacagtccagccgtttttatcaggttcttgacaaatttcagagaacaggtgaagagcagtttacagattcctggaatcggtttttcaacacagcaaaaatgttatatgacaatcatatgaatacagatgatgcctgtaataccatgtgtaatattatgatgaccagagatgaaaagatgcgttttatggtgaaaaagcactttacgccacaggattattttaatgttcgaaatcatatgattggaacaggtatgattggtggaaaagcatgtggaatgctgctttccagagcaattgtccgaaatttggcaccggacattgatgaggtgcttgaacctcatgattccttttttatcggatctgatgtttattatacttacattgtagataatggattctgggatatccgtgttcgtcagagagaggaagaggaatacttttcgctggcagaagaatttgcacagaaactgaaaaatggtgtcttttcggaagaaatgcaaaatcagtttctgcatattctggaatactatggacaggatccttttatagtacgctccagcagtattctcgaagatggtttcggcaatgcatttgcaggaaaatatgagtcagttttctgcgccaacagaggaactctggaagagcgccttctggagtttgaaaacgcaataaggactgtatatgccagttccatgagtctgtcggcactggattacagaaagcggagaggacttgacaaacgggatgaacagatggcacttcttgtacagcgcgtttctggctcttactatggatcttattatatgccatgtgcagcgggagttgggtactcttacagcccttataagtttttagagcagatcgatccaaaagcaggaatgctgaggctggttatgggtcttggaacagcagcagtggatcgcacggagggttcttatccccggcttgtcagtctggatatgccacaggcaacaagctgtacaaccattgcagagaaacatcagttttcgcagcgaaaagtagaagcagtggatacctctagacactgtgtgagacaaatgtatctggatcagatcgaaggattccttccggaataccttgctaatattcttctggatcatgattttgacgcagaaagatcattcagggagaggggaataaacagatccgttcgttttattgcgtgcagtggtatagtaaagaatcagattctgatgaagcagatacaggatattatgcagctgctccagaaagaatatgaatatccggtggatatcgaatttacggtgaacctttcagaaacaggagaatattccataaacctgttgcagtgccggccactgaaggtgtttaaggatatcggaaaagcacagattccggaggatattgcagaagaaaaaataattctggagaatgtgcattcttcgatgggactgtccagaaatgtgaaaatcgatcacattgttctggttgatccgattgcatactataatatgccgtatgtcagaaagccaaacgtggcgaaactgatcggaacaataaactggaaatacaaagaaaaaaataagcatatgcttcttatggttccggggcgtataggtacatcttctccggaacttggtgttccgacaacatttgcagatatcagtgaatttgaagcaatctgtgagatagaagagaaaaaggcgggatataatccggaactttcgtatggaagccatatttttcaggatctggtagaagcagagatattgtacaccgcagtatttgccaatgaaaaaacgttacggtttgcaccggaaaaactggcagaatatcctgatattgtaagcctgtttacggaggatcctgagttgaagcaggttgttcatgtgtatgatatgagcaaagtatcatgcgaactgtgtaatgatctgcagaacgaaagactggtactttatcagcagtaaaataaaaaaggggctgtcaaacgacagtccctagagcctatactaccataaattgaacgagaaatcggaatagaggggagttggctggccgatataatagtagcggtagtcagaacctggtgctttgtaatattttggctttttcgttgtatggtaggtaacatcgattgaaacggcgtttttcagagaagccttttgtccgtttttgatcttcttagtgaacgccttgttgccctttctataagcaatttcaataaaatctattttataatttttagcagcagcaacctttatctgtgtttttccggaacgggaaatcttggcaccatattgccagtaaccgttaatttcagaagcgtaatcttttgagccaactttaaaggatttaaaaactgcagggtgttgtttgaaggttactttacaggacagcttatagcttttcccattttgcttaactacaaagctgaaggtggatttttctccgactttaaccttgtggcctttcatgtgaaatttcgtgcttgtgccaatctggatcgcatttaatccttgacgtttgtaagctgtgtagtatgtgttggatgattttatgttggtaatggtcgctgtagatgaaaggttcttgatgtaaataaaaccgaatacagatgtgtcatcgacacccttaaacggagctgatctctcaaaataaagggtctgggtcttagggcaaacaggtgctttggcagctgcatttgccagtaatggggtggcagcgactaataacaaacatacaagaaagccgcaaagtgtctttttcattttcttcatttcattttcctcctttttgcgtgttaatgatggtgaatcttttttctcctctcttatgggttttaaattgtgtttttattatatcgttcataatcagtatagtcaatagagtataccgattaggtacggtatacgcaaatctaaaaaacgattgcatatcttttttttctgtagtatcatccaattaacaaacagacatatttaaatggaatgcggttcatatccgcagcggcgtccttgccaccgtaaagtcgggtctttttatatgtgtctcatggtgcatttcttatctcaggggcgatatgaaatgcataaccaagaatagcttttaacgctattctttatatttatgccctcttttcagagggtattttttatacgaaggaggaataataacatgaaacacagtcaatcccgttttctggcactgcttcttactgcagctatgacattaagttctcctgctgctgcttttgccagtgctacagacgacacctggttctctgatggacttgagaattttacaagtacaccagatgaaaacgaagaatcggaaactattacttttagtgataaggaaaatacctgctccccgtctgaagaatctgcttctgaagaattccttacagaggatgtttcttcagattttgcagatacatcagatttttttacaaccataactgatacaaacagctctatcggtgaaaagaccgaatatacagatgcctcttacgatacggataatttcactttcagcggtggagccgggcatatcacaatcacctgtccctctatagagatcaaaaatggcattatctatggaaatatccgattttccagcagttcttatacccagctggaatctaatggagtcacctattctccggtttctactgaaaatggatccctgttccagattcctgtagttttaaatgaagatatggaaattgccggaactaccatagcaatgggagcaccacataccatcacttataccattcatatttctcttgatactgccaaattgcaaaaatcttccccagaagatacagccgcaaagtggatcaaagacaactgcgataacatctttgcgggctgttccgatgtctacaaagcagtcatcaccaaagatggcgatacctacaccattccttaccgggcttctgacaataccattattgcatctggcataaaattattaagaccggacaaaagtctgtatcagagtggttggttttttagtacaacggattgtttttccagaccttctaaaacatattccacatccaccacttattctttcagtaatgtccgttttatcagtcagacagacacagaaatgactgcaaccttaaaactctacgatcctgctaccacaacctcggcgatcaagaacaataccgccacggcgctcgcttcttacacctatacctggatcgttcagcctaaaattgagccttattctgtaactctcgaagcaaaggatgtggatggaaatctggtaacggatccagtctacacggtaacagacaactatggtaatgttattacttcatctgatgccgctgtttaccaactgtatgcggaccgtacctataccattactgcttctgctgaaaactatacgactgaagatggctctgagcaggctgtaataaaggattttaccccatcccaggatgattgtataacttttactttaaagaataaatctgttgctctggaagatggtacctacaccatagataccatttctgacagcacaatgttcgctttttataatacaaaaatcatcgtaaaagacaaaaaagcttacctggtagttaccctcaaaggaaccggatttgacagactttacatgggtgactgttcagagtcttctgtaaagccagcagaagaagatacgatttgctatgcccctgaacaatttgatagctctgagcattacactttctggccggttccaattgtttccctgaatgatccactgagtatttccggacattcagcaaaaaaggatacctggtatcatcacacaattactttcaatcagaatactctcaagaaaatcagtgatgataatctggttccttccgaaaaaatggaagctcagaagctgatgcgacagtattatattgacggtaatgtaattgtaaaaaataaagaagtctgccagaagtccaaacaaacttatcaaattccctattatgaggcagatggaagtacccctcttacagaatttacattaaaacgcccggatactgcacgcttcaagagcagttggaaatttgaaacaactgaagctgcaaactgtttcactgataaaacccagcaaggcttttcaacaccttctgtcggtcagaattatactctgaaggagcaaagacccacatctgcagctacaataaatgcgacgctttccttctattccccaacagaaacagatgccgcaattgatgccggaactgctgtggttcttgcatcaacggaagttacttttgttattgcaccaaaagcaactgcatatcagataaagtttcaggctgtaaatagctttacacaagatattcttccagatgctcggattacagtagcggatcagaacggtaatacgttaacccctggcgcaaatggtacttatactttaaatgacgctacttcatacaccgtaacagcatctcagaatggctatgtaggcgccggaggcaaggaagaggcctacctggtttttgtaccttccaaagaggaaactgtttctctccctcttaccagagctgaagacgggagatgtcttatcaaatttgcttacgttgatgaaaacaacaattcactggatttgacaaatgtgtctgtcactgtatatgatgcagacgatcataccaaaacagtagatccagagcctgacggcagttatttaatctggaaagaccgcacttaccactattccatcaatgcctatggatattacaagataacctatcaggaattaactgtatctatggatcagattattactgtttctttaaaagagcgcattaaaacctatacaatgactttaatagcttttggttatgatacaggaaaagatctttcggatgcaacccaaaaagtcattggagaaaagaatgggattaaaacacaaatagacgcaaattcagatgggacctacacacttgactgggaaactatgtatacagtgtatctttcctgtgacaactattccgatcgggaatattctatgggcgcatttacggaaaatgaaaaacagaactttacacttcgactagcccttagccccagtcagaagcatcagctggaaactacgattgcatctgccaatgattttctttcaacaattacagaaagttctgatccgcttgactggccaactggaacaaaagacaaacttcaatctgctatcgcagaagcaaatgcagtcctaaataatgatgcttctgccgattcagattatagtaatacaagaacatctcttgaaaaaacgatacgtgaaataaaaaaatctcaaaatcctgcacaggagactataatcatccgatatcagattgaccgtgatgggccaactttccagaaaactttaaatgtaagtggaaatcaagccttaaaagcagggtatacgaaaggaaaccttgacaactatgcaaaagtaaatgtaacagatgctctggctgctttacatcaggatctttatggcactgaatttgcttccagaccttatgattatctcgatactatgtatggcatggaaggacttatcaccaaggtatttcaaaataccggaagccattatacctaccgtattaatcataaaaatgtagattttatgtatgcgggtactacacttttatcaaataacgatattctttctatttaccccagcgccggcagcacaacatccaaaacagaagaatatctttattttactcagacggcccttaccactgtagtaaatactccgtttacacttacacttatgggcttaaataaggaagcagcaaaaaatgaagaagcctatgcagaagaaggatatactgtaaccttaagaaatgcgcaaaccaatgatacactcactgctacatctgataagaacggtattcttacttttatcccttccgttaccggtatttacaaagtagaagctgtctctaaagatggtataacagcagttgctgctccatacgcagagattaccgtaaatactccagaaccaaccaaaattccggttccaaccgccactccggctccgaccgccactccggttccgaccgccactccggttccaaccgccactccggctccgaccgttactccagttccaacgacagcgccaaaacctgtcagcaaacagattctaatgcttcagttaaaaagccagaaaaattctatggttttgaaatggaacaaaataaaaggggctgacacttataaaatttacggtgcaaaatgtggaaacagctacaaactgttaaaaacggtttcatccaaaaacctcacctggacgaatcgtaaattgaagaaaggaactcactataaatattatattgttgccatttccaatgggcaaaaactggcaacttctccacgtacacatacagtgaccaaaggcagccgttatggctatgcacaaaagatcactgtcaataaaacagcactgaaactccgaactggaaaaacaaaacggattaaagcatctgtaaccaattcaagtacttacgtacagaaacatgttgcaactgttcgttatctctcatcaaacccttctgttgcaacggtttccaaagccggtgtcgtcagggctaaaaagaaaggtaattgtactatttactgctacacatccaatgggctttttaaaaaagtaaagattacagttacaaaataaaataatactttttacagaaaaagcgctgcgttctgtatggttctctccatgcaaacgcagcgtattgttatacattagaaataattgtgacttgaaaaagtaaattccagtgcaaaagtaaattccacagcactttaaattttgttgtttttac

SEQ ID NO: 124 - DNA, 535 bp, Unknown
  gut microbiota DNA sequence
ataccattattgcatctggcataaaattattaagaccggacaaaagtctgtatcagagtggttggtttttcagtacaacggattgtttttccagaccttctaaaacatattccacatccgccacttattctttcagtaatgtccgtttcatcagtcagacagacacagaaatgactgcaaccttaaaactctacgatcctgctaccacaacctcggcgatcaagagcaataccgccacggcgctcgcttcttacacttatacatggattgttcagcctaaaattgagccttattctgtaactctcgaagcaaaggatgcggatggaaatctggtaacggatccagtctatacggtgacagacaactatggtaatgttattacttcatctgatgccgctgtttaccagctgtatgcggatcgtacctataccattactgcttctgctgaagactatacggctgaagatggctctgagcaggccgtaataaaagattatatcccatctcaggatgaaaccaaagcctttactcttac

SEQ ID NO: 125 - DNA, 82297 bp, Unknown
  gut microbiota DNA sequence
catagctctcggtggaagatttgtgatagcgataagagtctttccaaccagttcttccggctcgtaataagcgtgaataccgcttaaaatggttctgtctgtgcctgttccgtcatcaagagtgaactgtaacagtttctttgacttcggtactgcaacacactctttaacctttactgcacggaaatctgacttgctgaatgtatcaaagtctaccatttcctcaaacaaaggctcaatctttaccttagaaaaatcaatcttttcaggctctgctttcacttcttcagtagccttagattttacatcatttttcttatttacatcattcagggtcttcattgttgggaacagcagcacatcacgaatagctgcggaatctgtaaggagcatacacatacggtcaataccgaagccgataccacctgtaggcggcataccgatctccaatgcattcaggaaatcttcgtctgtatgattggcttcctcatcgccctgagcgaacagctcttcctgagcagcaaaacgtgctctctggtcaataggatcattcagctcggagtaggcatttgccatctcccagccattcatgaagaactcaaaacgctctacataatctggattctccggttttttctttgtaagaggagaaatttcaataggatgatccataacaaatgtaggctggaccaaatgctcctcaacatactcttcaaagaacagattcaggatgtcacccttcttatggcgttcctcaaactctacatgatgctctcttgcagcttctcttgcctcttccagtgtatggatctcattaaagtccacaccagaatacttcttaactgcgtctaccatggtgattctctcaaatggcttgcccagatccatctccacaccattgtatacaatggtggtagtacccagaacttcctgtgccacatagcggtacagattctcggtaagatccatcatgccatgataatctgtatatgcctgataaagctccatcagtgtgaactccggattatggcgggtatccagaccctcattacggaatacacggccgatctcataaactctttccagaccgcctacgatcagtctcttcagataaagttccagtgaaatacgaagcttgaaatcctcatccagtgcattaaaatgagtctcaaaaggtcttgcagctgcaccgccggcattagataccaacataggtgtttctacttccataaagccctgtccgtcaagataacggcgaactgcacttaagatccttgaacgcttgataaatgtatcctttacctctgcattcatgatcagatccacatatctctgacgataacgggtatctgtattggtcagtccgtggaatttctccggaagaatctgaaggctcttggaaagcagtgtcacctcggaagcatgaatagaaatctctccggtctttgtgcggaatacctggcctttaataccaataatatcgcctacatccagctttttgaatgctttgtacgcatcttctccgatgctgtctcttgccacataagactggatcatgcccttcagatcctgtacatggcaaaaggatgccttacccattacacgcttggacatcatacgtccggcgatggttacatcttttccttccagttcatcaaactgctccttaatatcctggctgtgatgtgtcacatcatattttacgattttgaaaggatcctttccctctgcctgcagttcggcaagcttctccctacggaccttcagcagctggtttaaatcctgttcctgcttcttctgctctgccactttcgtgcctccctatcttcttaaaaatttctgccgcccatgggccttgcgcctctgaacggcagataaagtgttatacgtttctctgaatctcaagaaccttatatttcatagtacctgagggcatctctacctcaaccacatctcctgtatgcgcaccgatcagtgctttacctactggagactcattggaaatcttgccctgaaggctgttagcctctgtagagccaacgattttcagctcaatgtcttcttcaaattcataatcatgaacctttaccttacagcctacattaatcttgtcaaggtctacctcatcctcaacaacaacctctgcattcttcaggatcttctcgatctcttcgatacgtgcctcaatatctctctgctcatcctttgcagcatcgtactctgcattctcagacaggtcaccctgctctctggcctctttaatcttacccgcaacttcttttctttttactacctttaaatcatgcagctcttcttccagttttttaagtcccgcataagttagtaagttcttcttttcttccatctgccttacttcctttcaatccggataatacgttgttattcttataatctatgccactccggttattacattcattgtctgttcactgtttttctgtatttttcaagataaaaaagggtacaaaaatcccagtgtattcacaatttctgtattataacgaaaaccccactttttgtcaagtgaggctttcccattttttatccttccggaaaaagacgtttgtactgcatgttcacttcctgcagctgaaattcaaaattctgtttgtgctgctgcaccagggtagataaaataatccctgaaaacagacagatgatcgcagacaggatcacaaaacagatcacgatcaggcttgggatcttagtcacaacccccatgcttaaatatttcataaagatagggataaaaaagccggtaccaagaacaaataaaatagctgcaatcagcgaaaagaactgcattggcctgtaatccttatacatacggataatggtacggatcaccttaaatccgtctgtatatgtattcagcttggactcgctgccctcttgccggtcacgataatcaacgatcacattatcaacctgcatattcttgtcaatggcatggatcgtcatctctgtttcgatctcaaaattcttggaaagaactggatatgtcttaacaaactggtagctcattgcccggtagccggtcataatatccttgatcccactgtggaataaccggttaatgcttccacgcacaatgctattgccaaaattatggaatggacgcttgttctcagtaaaatatgtagaagaaagccggtctccaaccaccatatccgttccttcattcagcaccttgtcacacatctctctggcatactctgccggataagtatcatctccatccaccatcagataacactgagcgtcaatatccctgaacatactacggatcacattacccttcccctgctgatgctcataacgcactactgccccagccttacgggctatctcgtctgtaccatctgtagaattgttgtcatatacataaattgtagcttccggaagcgcagccttcatatcctgcacaactttccctacagatttgctttcattatagcagggaatcagaactgctattttatctgccatgaaaaaacctccattgtaaaaattcaagaatgcctcggcattcttgctgcgaggtgcgcgtcatgcaattgcatgacatacttctcctgcgcacctctgcaatcctgccggaggctatatcagctgtgggattgactcccaccactgataccagcttgtttctcgccacctatagaggtgggagtcatctcccagctgatatatctgttgacagtataccataccagagataaatagcaaacaaaaattcatcgccgttcacctcattcactgtaacaaaaaattcccctgtgccaggaattgttatttacttttttctttcttatgttatagttaaagaaaacaaaagaagaggctgatacgtgcaaagcctcttaatttttactatgaaggttccggacaacagccataaataacctatgccgcatgagcgaatgcatggatattggatgggccaggccgtatgattatggaggaaaaacatgaacaaaaagcgtgtaggcgtgatcacattccacgattatgacaattacggggcgattctccaaagttatgcccttcagcggaagcttaaagaaatgggcacttatccagagattattgattaccgctgcgactatattagcaatcctttccgtcttgtaaatcttaagaaaaaaggacttttcaattatatttacggtgccatcggacacatctgctatattccaagacggaggcagtgcaacctgttccggaagcatatgcgctacagccagccggtttccagaggcaatatgggtgctgtggcaggcaaatacgatatttacattgcaggcagtgaccagatctgggactacaagctgaccaatttcgataccacttatttcttggattttgtaaaaaaaggcaagaaaaaatgcagctatgcagccagtatcggtgagcatgagccaccggaacagtaccgtaagaaatacagctccctactgagagattttgatcagattctggtacgtgaggattatggtgctgatattgtggagagcctcactggcagccgtcccggcattacctgtgaccctaccctgcttcttacagcagacgaatggacacctttattaaaagagccccgacgcaaaaacaaatatatcctggtttatcagcttgggatcaacaaagaactggtggactttgtgcgccgcctgaaaaagaaaaccggcctgcgtgtggtttatattccttttcctcttgtaggcctgatgcactgcagctgcaagatcgccattggccctgcccagtggatggggcttttcaaaaacgcagaatatgtagtttctgactctttccacggtgttgtttattccctgctttttaaccgcaactttttcgccatggtcaatggccatcatatgaaccgcagggtacagcagctactgaaaatggttgacctttcccaccgtaccatcgaaaacgtaagtgatgaagagcttacccagcctattgattttacctttgctaacgaagagatcgcccggttccgtgaagaatccctggcgcagcttcgcagcctggtaaaggaacaggaggattgatctgcaaatatgtttaccgaaaatctaaaaaaaagcgattgctgtgggtgtatggcctgtgccaacatttgcggcaaatctgccattacaatgaagcacgataaatgtggtttttattatcccatcgtagatgaaaccaaatgcgtaaattgtggcctttgtcaaaaagtctgtcctatggaagacactttcacaggtgtggatgcctccccggatatttatgcacttcgtaaccgggatccccagattctgaaaggaagttcatctggcggcatgtttacactgctggccaagtgggtcatttcccagaatggagtagtatacggagttgcctttgacaaggattataaggttcttcacatgcgtgcacagtccatggaagaggcatctgctttctgcacttccaaatatgtggaaagtgacctatctgaagtttacgtttccctgtcacaggatctgaaatctggaaaaactgtactgctgaccggcactccctgtcagatcgcaggcgttcagaaattccttcgtaccaggcatatttctacagataacctgtatacctgtgacaatatctgtcacggtgttccaagccggatgctatggaaggattatcttaaaatcctgaaagaaaaatatattgcaaaggatgaccggatcacagggatcaacatgcgcagcaagcgggtttcctggaaaaagcaggtcatggatgtaacccttgaaaagggcaatctggaaagcgttatagaggacttttcctttaatcgtttcttcctcagcctttatggaaaccgcccttcctgcttccattgtcattataccagctataagcggccaggtgactttacccttggagatttctggaatgtggaaaacgcaggcgttacctttgatgtggaaggcggcgtgaatttggtacttgtaaacactcccaaaggccaaaagctgtttgatcagctaaagggagaggcagattaccagtctgtttccaaaaaagccagctggcagcctcatctggaatattctgcgaaaccgcctgcaaagcaggctgcattctggcatgaatataccgaaagcaacgacaaggaaatgataatgcgtaaatatatgcaaggctccttccttacaaaagtgatccgcaaggttactccgtttttacgtaaaaccggtctttacggtttcgctggaaaaatgtataaaacccttcttgtaagaaagaaataagtgagaagtattatgacttacaataatgcaaagaccgagaataatcatgacttgcaaatagaaatatccggaaaggaatgtgacttaccatcgaatacgtgaatcaagaaaaaaatgttaaaaaagcctttttatggaatatgatcggaagtacctgctattcagcatcttcctttctttacctgctgatcgttaccagactatgtggtgtagaacttgccggttttttctcccttagctatgctacagcacagctcctcctccaggtcggccgatatgggatgcgtaccttccaggccactgacctggatcacaaatatcttttctctgaatacaaagtgtcccgtgtattttcctgtgctgccatgatgctttttggtgtcatttacagcgcctacagcttttcaggagaatacattgccatcagcatttttgttatcatgatgaagatgatcgatgcagtagaggatgtatttcacggcaatctgcagcagaactaccatgtagagcttatggggaaaatgctggctgtgcgtaatgtttactccgcagttttctttaccctgttgctttatttcaccaggaatctttatctgacctgcggtgcaacagccattacatccctgatgctgtgtcttctggtaaattcctgggctgtgcggcatatttcctcccggcagccgaaacgaagctttcagttctcccatgtactggaattactgaaaatgtgcaccccgctgtttgcaggtacctttctttccctgctgctttacaatgtacccaagtatgccatgtccaatgtaatgacagatgagtatcagacctattacagcattttatttatgccctcttttgtgatcacgttgatgtgcgaatttgtattcaagcctatgatcaccactattgcaggactatggtgggataatgatctgaagaaatttgttctgtacgtagcccgtatcatcgggatcatcttcctttgctgtggtggtatcgtcattgccgggcatctgcttggaaggactttgctggagctgatctatggagtagatctttctccctataagcttcactttatcgtacttctcataggcggcggtatcggcgctgaggtgtacatgatctacaatatcctgattgccatccgtaaaggaggctgcatccttccggtctatgcactgactgccctgatcaccatcctcccggcaaaggctatggtacagaagctggggatcatgggtgcatcccttaattatctgttgtcctgttctgttttatttattatgttttttgccattttgatctgggtgatcctgaagaaaaagaaagcattatctcactgatctttctttacaaggggctgtcctatacgcaaacagctgcttttttgaataatcactttatatccttatagaattacaggggactgcatctgcagtcccctgtttgtttgcatatcatggacctgcctgcggctttgctgcaggtgtgatccctggccttatgattatttcttttttactgtaacaatacacttggcactgatcttcttgccaacctttacagtgatcacaacttttcccgctttctttgcagtgatctttccagtcttgcttacagttgccacttttttattagaagaactgtaagtcacctttgtcttgcaggtaacaggtgttacaactggtttcagctgataaactttctttttctgcggtttcagcttcagtgtcactttttctggtacaccggtaagtgaccatgcagctacactgcctttctgtacattcacctgaatggtcttcttctgtttcttcgctgttacaatggtgataactgcctttccggttgacttcttggaagccttcagctgaatggtgttctttttcagcttcttaaccgctacgatcttcttattggaagaagccacagacttgatactgtcttttgatgccaacgggatcaccagagatactttctggtttctcttgattggaagaacataaggctctgtctgtgctttttcagttgcgccacaaacgctgcaggctcttgtctgctcaccagcatctacataagtcgcctctttggtcactgtccactggccccaggtatgtacacctgttgcagggatcacttctgtctttgtgccgccgcatactgcacattttgcttcttttactcctgctacagtgcaggtagctgcctttgttactacccactggccccaggtatgtgcgcctgttgctggaatcgcttctgtctttgtagcgctgcatactgcacattttgcttcttttactcctgctacagtgcaggtagctgcctttgttactgtccattcaccccaggtatgtgctcctgttgctggaagtacctgatcccttgtatctccgcagatctggcaacgctgtacgttcacaccatctgctccacaggtaggattggtaacagtctcatctttccactgatgatcacatgcttcctctgactgtcttacaaaaacagcagcctcatccacgccgatcagttcatcacccatcttcacttcggcttgaacccaaagagcacccgacatatccaattcctgatagatttcccacagctttgcaccatagagcttaagcatggtgccatcttcacttactgcataattgtctccaggaatcatgattttttcgttgcctcgatatccatacagactccagataatttccggtaacttatctgtaggtgccgtctccggcatcctaatcttaatattcagcatggaaatctcattattatagatccagctattgctaaactccggatctctcagctcagagatcgttacatcctgatccttgtttaagatacgatcgaaatgaatctcttcttctgctacatcttcccagaattcattgccataacggtcactatggagttcctgtgctaccagtacgatctgagtctcagtgcctgatatacgtaccaatgccgggatatcctgctctgcagtagccggtgttgtctcccatttctccctgttataatcaacaaaccagcggacatttttattatccagtgtacctgtgagcttttctccggtttcaggattaatgcctgcatacccaaccgtaggattatactggttcagatctacaacagaacctactttagtacctacatcactgttgtcatcccagccttccagctgtacattgtaatacagatttcttacagaaatattgatatcagtataagcatcccagtccggatagtctttgtgatccacatcatcaaaatgtgttgccttggatatagccctgaagccaacaccaaattgaccttcatcttcgctctttgttgcctgcacaaatgctatatcttcgcgcatttctatagtggcaagatttccaggataatctccatttatctctacagagtattcatcggaaggtacctctgtgatcttcgtattaccatcttcaccctgtacttctttgtacaccttgaagctgatcttctggctttctcctttcagcatctgccagcctgtttcaaactcagcttccattgaataaatggtgtcatttacccagatatcaaaggtatgtgtctgctcaacaccgtgaatatcatcataggtaactgtcacactggtaccaccgtacttctctcctgtaaagatataaccgtcatccttttcttcgtaggatactgatggctcaggatcgtcctccagactctttatctctattcctttgatcttgcatggaacaggctcaccagacggataatctctgttttccacataacagttgaaatccttgctaagccagaaacgatttcccttaaacatctgagtaccataggtagaatactgataatcctccatggcatatcttgcgcttatgcctgctctctcctcaaacacctttataccatctgttccaggtgctcctgcttctacataaacacgaatctcgatccactgtccatcctgcagactattctgaaccacttccagaacctttccattcacatgaagcttagaagcatcttctgcatccacatgccagaatccggaatcgatcgttcccagctgatccccatcgttttcagcccgagtgcctacttcccagccgatccggtaaagtgcctcctctttatcttttttgtcttccagattctctgtattgagctgaagtacgtaatcctcttcgttgttgaatacataggtgccgccctcctcacgaagattctcgaaccatacggaataatcaagttcgtcaaaccagaaatctctgcggccgatctcttccagttcaccattttcattcttgatgttagcaatcaccgttatatcggtaccatagtctttcatcctggtaagcaatggaaatgttccatcctgggatgggtgtgcataccaaagatcctcatcaagttccagggtgtatacaacatcgtttctttctgttttctggtcaccttttccttttacacgccaggtggagattcccaggttgttcagatccaaagtaccgccaaccggaggatttggcgcttcttctgctacagagatataatcgtatccatcgcacacgtcaaaataaaactcattctcagcaacaggcaccagctcaccctgctcgttctttatggatgccctcacccggatagaagccccacctcgactttcgccatcagtgctctctacatgaatataggttttaccatccttctggataaaggaaacctccttcagtaaatcataatcgatcaactcgccattttcattctcaatcagttccagagagaagtcttcaatgtcttcgccgcccatgtcctgatcactgtgtcgccactcatgatgcagggttacaggtagatccatagcagttcccggaagcatggaattattgtcattaggataaaccgcatcaaggttgtacatatccttttctacataaaattctgtctcatgcacctgcggttttccataatagtcgttataagaaatcttcgccgtcacctgacccggacgattggcataaagattccatccaccgtcatgttctgtcacttcaaaaatatcgtcattgccttccagttcaacaccagtgatccggaatgtgtaatgatttccctcaggatgatccgcatcctctatatagcattctccttctttattgatccagatattctgatctacaagaacggatctatagtcattctcaaaatggtactcataccaggattctgcaagatccagaccggcttcatctgtatacagaacaaattcgcactgtggctcatcactctcacctggaatataacctacaacctctgcacggattgcgaaccaccagttctcttccaaattctgatattctcttgcaaacctggcaccattaatatagagcatatcaccatctgcggtccagaaagcattctgatcagtgccaatgcaaggaataaacgacgcatcgtcctctgtccttttgccaactgtccagcgaatctcataattgcccttgtctttcagactgctgatatcaaattttacccaataatgctcctcattatcatatacaaatgtataattaccgtagtcatcgtctctcagattctcgaaatatatctcataatccaaaccatcaaaactataattcctgccgcagatttcttcccactcaccagcagtattctttgcctctgccgcaatataaagatctgcataatcagctgtcttacggtatactataggaaaatctgtcgcaccatcacttacatttttcttcacataccacttattctcatccggctcaaccagtcggaaacgtacatcctcccgtactttgggcacttctgccccatctatataatgcagtacctgaagtccagacagatccagctgctggcctgcccataattcactgttatcgtccagcagcttctgtggtgcaagcacatcatatgcagatcttacctccaccaagacccgattcgttgccagaagtcttctctcctctccggtgccggtaactgcctggatgcagatatccgttccaccatccgcaccctcttttgctttcacaagcaaagagttatcctcaggattaatggtaacatcaatcagactgctgtcatatggagtgccgtctttaagaccgttataaagctccagctcatattctatggcattctctccatcaccattccctgcgtctccatttcctgtatcaccattccctgtatccacgtcaggttctgtttccgcaagattgatgacttctccatcaccgccatcgccttcattatcatcataccattcagaaacagatgtgaaaatcttcatctcactgcctggaaacatatgatagtctccactttcatattccgcatacagctcatagcggacagacgctccgtcatctgtctcttctccatctgccgagttctctccctctgccggttctcctgcattatcactgagaagatccacatcctctacctcttcacaggtaaactctgccggctcctctgtactctcatctgccggtgctgccgtaaacgaatcctccggcacgtcctccacgtcctctacagatgtttccccagaaggcatctcttctgcctgtgatacctctcctgcctgctcatgatcggaaaactcctccacatccacgatctgctgatccgcttcttcagccaatgccatagatgggcagcttcctgccaccatggaaaaggccagtgtccatgcgcccagacgcttccatacttccttatgtctcatgcacatcctccttttcttgtcaagcggatatccgccatccgcttcgctgcttgcacataatcaaatcactgtcctgcagttgatccagttatgctgttgatagttattcgctctttgagcatatttttactcaacaggttagttacattcattataatggtataaaattcatttttcaaccaataatctggaatttatattatacaatctgcacaaaaaatcctgtctgcaagctatctttacttacaaacaggattacaagatttctgatctatatgatgaggacagagtcaaaaggtctaaatccacctgagcttgctcataagtggatgaaagaccttgggactcgcccccaaattatgtgtgtcttatgggaagctgatacttcctgtatccttgaaaaccggaaagtgccagaacaagcagcagttccttctgaggtgcccgccatgactcctcaggctgaaaccattcgtgaactgtatgggtatctcctccatctcccccacggcccagtgccactgcaggaatccccaaggaaataggaatattggcatctgtactggatgcgtcatgaaataccggcgtatagccaacagcactcgtagcatcccaggctgcccggacgatcagctcatccggcttctgagcccctgccggacgtctgcctttttcctcaaagatcactgttaccttctcttttgtatcccaccgggcattttcctggctgacagcatcttctgtcacctgcttaaactgtgcagacaatgcagataattcttctgcactgtcagatcgcagatccaccagcatagagcatctttcaggaatactgtttacagaagtgccaccctccacaacgcctacattaaatgtggtcttaggcagcttttttacgtgaaaatctgcgatccggctgatggcccttcccattgcgtgaacaggattgggaagtccgaaatcactgaagctgtgaccgcccggtcctgcaaatgttaccagatatcgttcgcttccggtggcagtatggatgatcccaccgggaaccacattatctaccgtgataaaaccatcacaggcatgtggatccctgaaaatgtattttacacctttcaggtcgcccagaccttcctcgcatacattggcgcagaagataatatctccttccccatggatatccagagccttcatagccctggccacgctgaggatctctgcaatggctcttgtatcatcattgatcccaggacatgtataccgggttccttcttttttgatggtcaggtcagtgccttgtggaaataccgtatctgtatgggctgctatcatcaccactggtcccttaccagtccccttaatggtgccaaatacattgcccacccggtccataccaacatggtccagacctatcctctccatcttatccataatgcagactgcccggtcctgctcaaaaccggagggagccggaatctgtaccaattccagaagctccttaagggtacggtcatcatcttccttcagatatgcaaatgctttccggatgatctccatatttttcagctgttccatcccgttctcctttccagttcgtcctgcttattccggttggatcagctccagcagcttctccagttcttcataagaggatatattattggattcccggcgcaatgcagagctatgaggcagccctgctgtataccatgccacatgcttccgcatctcccggatacccatatattctcctttcaagccgatctgcgcccttgcatgccgcaggatcatctggcagagttcttctctggatggtcccggaagcagttcgccagtagtaaaataatgattcatttcccggaagatccatggattcccttccgctgcccgtccgatcatgatcccatcacagcccgtctgtttcatcagctcttctgccttcaaaggagaagtcacatctccgttgccgatcacaggaatctttactgcctccttcaccttacggatggcatcccagttagcctgaccggaataatactgctccctggtccgtccatggactgcaatggcagaggctcccgcatcttcgatccgtttggcgatttccgccagatccacagcttctttttcaaaaccaatacggatctttgcagtcaccggcttatggatggcagccacaatactctttatgatctgggaaatccgttccggatccttaaggagggcagaaccttccccgttattcaccacctttggcacaggacagcccatattaatatccagaatatcaaaaggctgttcctcgatgctggcagccacctgagccattaattccggctcattgccaaaaagctgcatggataccggatgctccaccgggtcgatctccatcagcgccttggtattcttattgtgataggagatagcctttgcgctgatcatctccatgcagatcaggccggctccctgttctttacaaagcctgcggaaagccagatctgtaacacctgccataggggcaagtacaaaaggattctctatttcaacatttcctattttccaacggagctccatgaagtctactccttaatgccagccggatcttctcccaggaaaaagaccctgtaatataattccaatgattccagaagttcacttttctgctgacggagctgcttgatccgcagcgcaccgccgatatcgtcatatcgtccgtcagcctccagtgcctctgtcttaaactgaagatctccgttctggtcgaactccagtgtaaaaatccctccgatctcctctgtaaaaagaacgcacatgatctgtagttctttctttacatgatccgggagagatgaaaaatcttcgttaaaataatatttctgctcatatgcgcttgcaccacagagcacaatattgtcctgatacatctttcattcctctcttgcaatgtatactgattcatttaatccattgccctagtacagtgaatattaagtaaccaccatatcgacttgccttaattttcactgtcctaatcatacgtagctgtaaagacctcgcacagatacttcccctgcattcacagtagtataagtgccatcctgccgctctacgatcaatacgccaatgtccgtgatccctctggcgatcccttcaaaagaatcctcccctgcgatcacacgtaccggctgatccatatttgccagcaattcctcataatcttcccttaaaagacttaagtcacaggtcttggcaaacttctcataattcttctcaaaagcctccatcaccaggccgggaaccaggcttctgtcaaactcatggcctgcttccagataaagggaagtagctttatctgccatttcctccggaaacttcttaatatttatattgattcctacgccaatgaccacgttgcggatcttgttgccctccacagccatctctgtaaggatcccacaaatcttcttatgggatgccaccacatcattaggccacttaatagtcgtatcaaatcccagcttgtttactgcctgtgctacagacaatcccataacaatggtaagcatagaagcatatttcggctcaaattccggcaaaagcaacaggctcatcataaccgaggtgccccgtggtgcctgccaggaacggcccagccgtcctcttcctgcactctgatactcggccaccgccagcgtaccgtgaggaaatttcctgtcagccagacgctttgccatcagattggtagaatctgttcttttcacaaaatggacggtttgacccgcccattttgtatgaatgtttgctgaaattgtatctttgtcgtataaaatatccattataatccttccggtaatcccagtgttgcagccatcacagctttgatggtatgcatacggttctctgcctcatcaaatacctttgactgtgcagattcaaatacttcatcagtaacttccatctcggtaaggccaaaacgctgtcccatttccttgccgatctttgtcttaagatcatggaatgcgggcaggcagtgaagaaagattgccttctctcctgcattctccatcacatgctttgtcacacggtatggtgtaagatctttgatacgctcttcccatacctcatccggctcgcccatagatacccacacatctgtataaataacgtctgcattcctggtaccttcctctacatcctctgtaagagtgatagttgctccggattcctttgcatactcatggcactgtgccaccagttcatcattagggaaatacttgctgtttgtgcaggctgtaaaatgcatacctagcttggagcaggcaaccatcagggaattgcccatgttataacgggcatcgcccatatatacaagacggatcccctgcagatgtccgaaatgctcatggatggtaagcatatctgccagcatctgggtaggatgatactcgttggtcaggccgttccataccgggactcctgcatattttgccagttcttccacaatatcctggccgaatccacggtattcaataccatcatacatcctgccaagaactcttgctgtatctgcaatactctctttcttaccgatctgggagccggtaggatccaggtaggtgctgcccatgccaaggtcatgtgctgccacctcaaaagaacaacgggttctggtgctggtcttttcaaagatcagggcaatattcttgcctttgtaatactcagtaagctcacctgcttttttctttgctttcagttctgctgaaagttccagaagataaatgatctcctcaggtgtaaaatcctttaatgtaagaaaattccgtccttttaaattcatagtcattctcctgtggtatgtctttgctctgttatgccggatctatccttgtcagattctttattcggtcttcttatcgtcagttacaatttccttcagggaagaagccagacctgctattccctggatctcagaaggaataatgatcttggttgctttgccgtctgctacctttgtaagtgcttcaaagctcttcaaagtaagaactgcattgtctgcccctgcttctttgatcatacgaagaccttctgcatttgccttctgtaccttaagtactgcttctgcctggccttcggcctctttgatcatacgctctttctgagcttctgcacgaaggatggcagcctgcttctcagcctcagcatccaggatcgcagattctttcttaccttctgccacaaggatggtggatttcttctctccttctgcgatcaggatcgcttctcgtctctcgcgctctgccttcatctgcttttccatggcttcctggatcgcagccggcgggatgatattcttcagctctacacgattcaccttgatgccccatgggtctgtggcaacatccagggaggcacgcatcttggtattgatcacttcacgggaggtaagcgtttcatccagctccatatctccgataatattcctaagtgtggtggctgacagattctcaatggccatgataggattctccacaccgtaagcatacagcttaggatctgtgatctggaaaaatacaacggtgtcgatctgcatggttacattatcttttgtgatcacaggctgaggtggaaaatccactacctgttctttcaggttgacctttctggcaactctctcgataaagggcatcttaaaatgtacaccagtgccccatgtggcacggtatgcaccaaggcgttccaacacaactgcataagcctggggaacaatgcggatacaggatgccagcacccataatgccagaataacgatcaccaataatgccaaaattcctcccataaattaatcctcctttttcaccttcacaattaatttgaccccacggacttccgtgatggtaactaccgtcttctcaggaatgatctccttgtcatccgctgtccttgccagccattcaatatcattgatgcgaacctgtccggtctgtgccagattgtcaatcttctggatcactactgcggactgacccatcaggctgttcacattggtacggaccatgcccttattcagacatttctttagtacaggtctggccagaatcagaagtatcagagaaacagccagaaacagtaagatctgcagccattcttctgctcccatgcctgcagcaagagcagccaccagagcacctcctgcaaaccagatagtggtaagctgcaccgtcacggcttcagctaccagaaaaaaagtaagtattgccagccagataaagacttcctgcatagaatctcctccttatcctctcctctgccttgcagcctcatacataaggatcccggcagccatggccgcattcagggattctacctgcccgttcattgggatccgtatcagacaatccgctgcctgcgacgcctggtccgtaagtccctttccttcattaccgatcaggaaagcagttcctccctgataatcctctttatcataggtattcctgccctgcaggtgggctgcaaaaagccggatatgatgtttttccagctgttcttttaatgataccacactttccacgtatagaaaaggcattctgtaaatagaacccatggtggaacgtatcaccttgggattggtaatgtccacacaggttctggtaagaaagatcccgtccactccggcgccctcggctgtacggaagatcgttcctgcattgcccggatcctgcagatcctcaagcaccatcaccagtgggtgtatccgatctgctgcctggctttcccaaatgtcttcttctgtataggaaggcttcttaagaagagtaaggatcccctgcggcgtctgagtatcgctcatctgtctgaatacggaatccgaaaccacttcacaaggaaagccttcggcatggcgcatcagctctgcatccccggtaacagactctgccagataaactctggaaacccagtcggccggagcttccagaaacatcttcctgccctctgccacaaaaagcccctgctctctccttgcctttgtcttttgatttaactgtattatatttttgatctgtccgttattcacactggttatcataaatcaggaaccttcccttagttcaatctttccagaactttgtttttacctacggccatcaaatgccagtctgcttccagcggcttcaccggatccaggttgatctccacatcatcccctaccttgatagcgataacattaagatcatggctctcacgaagctgcagctcctgcaggcttttgcctacccactctgtcggcacaggaaactctgccatactgaactccgtagaaagctcaaacacatccagaaaacctccggacatcagatttcttgccacacgaagtcccatggactgctccggataaatcaccctgtctgcgccaatcttctcaaggatcttgccgtgaagagcattcatggccttggcaagaacatagggtactcccagctccttggcctgcatggttgccataatactggcttccatgttctcagccactgcaattactgccacatccacattctgcacacccagagtccttaaaacttcaggctcacgtacatccgcgcggaccgcataagtaaccttgtcagcaatctcctgaatattttcttctcttgcatcaatggccagcacatcacaatctgactctgccagtgtttctgccactgacataccaaactgtccaagtccgatcactgcatagcttttttccttcatgtcatgtctcctatccaatcatcacatcttcttccgcaagatggatattctctgatctgcgctgttctcttgccaccacggctgcacctaaagtaagagggccgatacgtccaagatacatggtcagcattacaatgtatttccctgccagactcaaatgtggcgtcagccctctggacaaacctactgttcccagggctgaagttaattcataaataacgtccatcagatctgcctgtggcatcgctacagccagaagcataatcatgatcaataaaaccaacaaagacatccctgctactacaagggcagaacggatgtagctgctgcgaatcttccgattgtggctttccacatccttatcaccacgaagattggcccggatgctaagcactagcactgcaatggtcgttgtcttaataccaccggctgtacccataggggatcctccgatgagcatcagtaccagacacagcacaaaggtggcattggtaaatgctgcctgatctgttgtgaaaaatccggcggttctggtggtcacagactgaaaagcagatgcaagcagctgcctgcctgtagacatccctgcaaaagtatccggattgttcctttcaaacaaaaagatcaacagcgtacctccaacaaccaggatcagggttgtttttaataccagcttgctttgcagacgaagagttgcataaacttttttcactgacagcttgtgactctgttttgccttttttatttttgcccaaatatcccaccacacaataaagccaaggcccgaagaaatgatcagagccatagtggtaagattcaccagcacatttccctgataaggtgccagactggtctcgcccagaagatcgatccctgcattgcaaaatgctgacactgcagtaaacactgcatgaaccattcccttacggaagccaaactgaggcacaaagcaaaatgcatacagcgctgcgcctgtcccttctgcaaccaaaatacaaagtacggtttttcgcacaactttgaccagtcctgacatctgatccaggttataggattccttgatcagtttccggttccgcagggaaatcttcttgtgaagtccaataaacagtatacttgccagagatactactcctatgcctccgatctggatcagcaaaaggatagccgctttgcctattgtcgaccaatgggtagctgtggtcactgtcaccaggccggttacacacacgctggtagtagccgtaaataatgcatctgcaaaagaagtgctttcccccggtgcggtgcaaaacgggagccagagaaaaaatcctcctacaaaaattacccccgcaaagctgagggcaattatttgtgctgttttcaatttatgaaattttttctgtaaacatcgtctaaaactatttctgtaatccatgtttgtcataattatgagaaagggatttacaaacctcccactgatattctgaaacgctcttctgcatagcaagtgcctcgtcaatatcgaagtccacaaaatctccatgacgatatccaactactctgcagctcttgcctgctaccagaaggtctacagccattgcacccatcatagatgcatacacacggtccttacatgtagggcttccaccacgctgcatgtgtccaaggatagtggcacgggtctcaatacctgtagctgcttcgatacgttttgccatagcctgggaattaccgataccctctgcatttacgatgatatgatgcttcttgccaagcttacggctctcaataatgttgttgatcagcttctgctcatcatagtcgtatttctcagggatcagcacatcctcagccccgttggcaataccgcaccataatgccagatatccggcgccacggcccataacctcgataatactgcatctctcatgggaagtagatgtatcacgtaccttgtcgattgcttccatagctgtattaacagctgtatcaaatccgatggtgtactctgtacatgcaatatccaggtcaatcgtgcctggtacaccgatggtattcacaccaagggcagccagcttctgtgctcctgcaaaggaaccgtctccaccgatcactaccagtccgtcaataccatgcttcttgcagatctctgcgcctctcttctgaccttctgctgtacggaattctgcacaacgtgctgtataaaggatcgtaccgccacgctcaatggtatcggatacatccttcgctgtcatatctataatctcttcattcagcagtccattatatcccttcagtataccttttacatttaatccgctgctaagtccacgtcttaccactgcacggattgctgcgttcattccaggagcatcaccgccgctggtaaggacaccaatggtcttaatttttttttctgccataataattactcctccatcttctgagttccttgagatgcctgtattctctctgatacaatctgcatctcggggttaatccttttctacacatattcagcactagtttatagcatctttctgtttttttcaatactctgtccctgtttttttcagaagctttttataaactttacattaaaaacttttaatatacttcataagaagctttttacaaatttcatatcagaaacttttcagtgcacgctctaccacgcgtacattctcactgccatattccctccggaatttttccagccattcttcctgcaaagctaccctgtatccggccggcagctttttcattgcttttacatccttcagatagatcacaacggaagcattccccggaactgctctcagttcttccatcaaatgtgcttcccggtctgcatatgcatccctgtcatcaaactgcagccaaagctcccttggcacttcttcaaaggtacgcaccctttccaggatcagcttgctggccttgtcatcttcagcggatacccgtccctggatcagcacacgggcatcttcatccaaaaggctctgatacttttcataatcccttggaaaaaccactacttccacagtacccaccagatcttcaagggtaacaaaggccatcaccttattattcttggtatatttaatggttttctcggtcaccataccaccaactacaaccttctggttatccattaccacggaaagtcccgtctcttcatccggctgaaaatctgtggtctttgcactgatattcttttcaagtatacctctgtactgttccaggggatgtccgctaagataaatccccagtacatctttttcaaaggccaggataacttcctttgcatattctcccacatctggcatactgatctcataagccttcttatcttcttcaccaaccaagtcaaacaggctcatctgcccagccatgctgttcttcttattctggctgatatgatccactacccggctgtaaaccagcattttctgctgccggttgcctggcaggcagtcaagtgcccctgccttgataaaattttcgatggcgcgtttattcacctgcccgctgtttctttcaatgaaatcactcagtgtacggtagattccgttttccctgcgctccttcaccagcgattcgatcacaggcctgcccacacttttaatagcggaaaggccataacggatccttccctggtcaacagaaaagccacgttctccgttattaatatccggaggcaaaatctgaattcccatctggcggcatacctgaatatactctgccactttggctggcatttcaatcacggaggtcataagcgcagccataaattccacagaataataatatttcagataagctgtctgataagctacgattgcataagctgccgcatgggatttattaaaagcatattttgcaaaatcagtcatttcatcatagatcttatttgctgtcttctcagagatcccgttggcaatacagccaggcactccctcctgctcatttccatatacaaagttctgccgctctttttccatgacagaagcttttttcttggacattgcacgacgcacaagatcacttcgtcctaatgtatagcctgccagattacgcacaatctgcataacctgctcctgatatacgatacatccgtaggttgggctaaggattggctccagctgcgggcagtcgtagcgaatggtatccggacggttcttgccacggatatactggggaataaaatccatcgggcccggacgatacagggaaataccggcgatcacatcctccaggctctgaggcttcaattccttcataaagttcttcataccagaactttccagctggaacacaccatctgtacgacctgtgccaagggatgccagcaccttactgtcattataatcaatgtgggacatatccagggtgatgcccttatctttctccaccattttcgctgcattctggatcactgttaatgtacgaagcccaaggaaatccattttcaaaaggcccagttcttccagcgtagtcatagtaaactgagctacaatggtgccgtcctgggctctggaaagaggtacgtattcatccacctctttctggctgatcacaacaccggctgcatgcatggaggtatgccttggaagtccttccaagcgctttgccatatcgatcagatggtgcacatcctcctgctcgtcataagtttttttcagctccggattcatttccagtgctttatcaatggtaatattcagctcctggggaatcatctttgcaatggtatccacctgggcataaggcatgtccaatacacgtcccacatccctgatcacaccacgggcagccaatgtaccaaaggtaacgatctgcactacacagtccttaccgtatttgcgaaccacgtaatcgatcacttcctgcctgcgctcaaaacagaagtccacatcaatatccggcatggatactcgttccggattcaggaaacgttcaaaaagcagatcgtaacggataggatccagctgggtgatccccagggtataagcaaccaggcttccagctgcagaacctctgcccggtcctaccatgatctcatgatcccttgcatatttaataaagtcccacacgatcaggaaataatccacgtatcccatatttttgattgtggtaagctcataatccagacggctttccaactcttctgtcaccggatcgtatcgctcttccaggccttcccggcacagcttattcaaatattcccaggaggtatatccatctggcacatcatatctgggcagctttgtgttgccgaactcaatatccacgtggcacctctgtgcgatcttgtgtgtattttccagagcctccggcgcataaggaaacagtgctgccatttcttcttctgacttaacataatactgtccgccttcataacgcatacggtctgtatctgtaagcttcttgccggtctgcaggcaaagcaggatatcatgggaatctgcgtctgtttcataagtgtaatgcacatcattggtggcaaccagctggatccctgtttcctggtgcatccgcatcaactgctgattgaccatctgctgctgtggaatcccgtgatcctgaagttccagaaaaaagttcccctctccgaaaatctcctgatatctgagggcagcctttttgccatcctcatacatccctttctgaagatatctggcaacctcgccagccaggcaggcgcttaaggcaatcagcccctcatggtactcctgcagaagttccagatccactcttggcttgtagtaaaaaccttctacaaaacccttggatacgatcttcatcagattttgataaccctggttattctcagcaagaagcaccagatgatagtatctgtcatctccgcttcctacttccctgtcgaacctggagccgggagccacatacacttcacatccaaggataggattgatgcctgccgcttttgccgcacgataaaagtcgatcactccatacataactccatggtctgtgatcgcagcactgtccattcccagttccttcactctggacacatattcatttatcttatttgatccatccagcagactatattctgtatggacatgcagatgcgtgaaagccactgtgtgtacctcatttcctgtttatattatttcttgcctctgttattttttgtatattcttctctctttaatctctattttgccttctttcagaaggtgtccgattgcccgtttgaatgcatttttgctcaagccgaattctcttttgatcacttccggggatgccttatcatcaaaaggaagaacccctgcaaattcatcgatcacgctaagcacggactctgcatcctcttcgatctgcaggtatgctttctggcgatctgtgacattcatcttgccgtcttcttttacttctgttacacgcagatccagaatctctcccggacggtatttcccggcagcctcccttgcgggaatcagtgcagaatacttgtcatcaacagccacaaatacaccaaaattaccgctgatctcatatacacggccttttacctggtctcccaccacataaggtgtgcgtgtagaaagataatgatatactttcatggtagcgcaaaggcgctggcttttatcaatataaagagccaccagtacgtctttcccttcctgcatcctggtggtctgctcatgatatggaagcagaaggtctttttccagtccccaattcaggaatgctccgatccttgtcacctgggaaaccttcagaactgcagtctgccctacctgaagcatgggctctctggtggtagcgatgagacggtctttggaatctttataaatgaatacggtcagctcatctcctgctttcgtgcctgcaggcacctgtttggcagggagtagtacagaatctttgccttctttatcatccttttcagccagatatacaccgaaatccactgtttttactacagtcagtgtctgtttttttcctaattcaatcatgggttctccttattatatatttttacgaaaatgattattgtcagtatagcacacacacaatgtaaaagatactctcaatccacatgcgcctaattgttggtttgctctttggcagcattcccccaatttgcagttgaatagaatactatttaagtgtgtctgcgtattgcagaagccggcgtgtatccgcccatctggcatcgcttgtagggcctcccagtgtaacggaaatataggtctttccatttccggcctggatcatacccacaaaacaatggcctgccttacgggtatagcctgttttgatcccgtatactctgtccatattgccaagaagcttattggtggtacggaaggtataggtattgccgttcaggctggtgatggtcccttgctgccgttttacgatttttcggatcataggcttcttccatgcataacaggcgatctttgccagatcccgggcagttgtataatggtccattcctgcatccagtccgtttggtgtagcaaaatgggtattcttacatcccaggactgctgcttttttattcatcagctttacaaatttaggtactgatccgcttacatgctctgcaagtgctactgctgtatcattgtgggatgggatcagcagggaataaagaagatccttcaacacaaagctttccccttgctgcaggtacagcttggtaggctcctgggctgctgcattggcagatgcagtcaccttctcggttagtttgcaattctccaaagccaatatagccgtcatcagcttggtggtgcttgcatttgcatggcgcagatccggattcttggaataaagcacttttccagtgtcagcctctacaagaatcccacatggactgctaagggaaacagacgggccgcttcctgtcatcctgccattagaatcaaacctgcaattcacatcggagatccgtttcgttcctgtggtcagcttgccctttgcatcaaaataataggtataacggctgcggatccacccctggcttctgcggccgtcgcttcgcagataataggtcttctttccatttttgtagatccatgcatttttatacatgtatccttctgatttcttcccaaagtaataccacctggtaccgatcttgtgccagctgtactgcctgacccctttcgcagaaaaataatatgttttccccctgacagataaaaggcaatcctttgccatctgtccatctttgtcataataataccaatttccatttctggcggtaaatctgccccctgtaaccttttcaatattctttacgctggtcacttttgcagaaaccggcactgccgctcccagaagcagtatcagcattaccagaagacacagcctgtatatgcctgctctttttctctcttttcctgtactcatcatttcccccgctttaaagtaaaacaaaatatcagttctatttattttcctattttccccagttttagtcaaggcatttttcggaacgaaataaaaaacgaaataaaaaaaggcgttctatctcacacgcctttttctcaaaacttctgtatagcattattgattacggaatctggaaaggaaatcccgtgtaagagcatctttcggatcctggaaaagctttttcggctctccctcttctacgatcactccatttgccataaagatcacattttttgatacatctctggcaaatgccatttcatgagttacaatgatcatagtcagtccgtccagagctagccgtttcataacctccagaacctcccccaccatctggggatccaatgcagaggtaggctcatcaaaaagaagcagctccggttccatagccagcgctctggcaatggcaaccctttgcttctgtccaccggaaagctgtttaggcttggcgttgatatagggcgccatccctaccttttccagataaaacatagccttatcctttgaggtctttttatctcttttcagaactttttcctgtcctaccgtacagttctccaatgcagtcatattattaaacagattaaaattctgaaataccatgcccacctttgaacggtactccggtacgtttactttcttgtcggtaatatctttgccgtggtagttaatctctccagatgtaggtgtctccaacatgttcaggcaccgtaaaagggtagatttgccggatccggagggcccgatgatacaggtcacatctccctggcttacagaaaaatcaatatcttttaacacctggttattcccaaaggtttttcccagatgctttacttccagaatatgctcgcccattacttgtccacccctttcttcctgctgtaggaatacatcccactggtatgagccagggtatccgttgtggcaagatcataattatccggtccatccatcttatgctctaaaagacgcagcagtctagagcaggtaaaggtcaggataaaataaatcaccatggcaatggtaaacgactcaaagtatgtgtagtaagcacctgccacaccttttgtagtgtaaaacagttctacgatcccgataatggaaagtacacaggtatccttaatattaataatcaggttgttgccgatctggggcatgatattacgcaatgcctggggaaggatcacactggtcatagtctgcacatgagtcataccaatagctttcgcagcctctgtctgcccctcatctacagaaaggataccgcctcgcacggtttctgccatgtaagcgccggtattgattgatacaatgaaaaaggcagcaaaccacatggacatattaatgttaaaaagataggaactgccgaaatagataaacattgcctgtgccatcataggcgtcccacggaaaatctctacatagcaggccataataaatttcaggatccctaccagtattttcttgccttttccgtcatttttatccacagggatggtctgcaccactcctactgcaaatccgatcacgcagcctaaaaatgtacctacaatggcgatcagcatggtgttgcctgcgccctgcaggaaagacactccgtactgctggagcagatatccgatcctgccccaaaagctttcaggaagcatgtacgttctctccttccctgttattcagacagaggctgtacggaaatcgcttcgtccatcatctctgtaaaatcatcttctgtcattttgtcaagtacactgttcagtgcatcaagaagttctgtatttcccttctgaacagagatcccaatattaatatcctcatcagatacctggaattctccgtctgtaccggtgaagtcaagaagcttcagatcagggtatgcaatgcatgctgcttttccggtaggcatatccgtaacaaccgcatcacattttccggattccagggctaccagcatagccggtgcactttcctgtgcaggaaggatatctgcatccgggatctgcggaagacaagaatcataccagatcgtattctgctgggaagtacaggtaacacctttcaggtcttccacgcttgctgcatctgcataatctccgtctccctttacaagagtgatgatcgatgcgtaataatatggggatgtaaaatcaaccatctcctgacgttcttttgtaatagactgacctgcgatcacgcagtccactttaccggactgtactgctggtacaagggaatcccagtccagcttcacgatctccaggtcatagcccagttcttcacagatatgctttgccatcataacatcataaccgtatgcgtaatcagagcttcctgagatctgtactgcaccattggagtcatccggctgtgtccagttgtagggggcatatccacactccatcgctacctttaaggttttcttctcatctgcctttaccaaagtcagtcccagtcccggtacagatgatgctgcaacacttactgccataagtgttcctgttagtttcttccatacatagtttttcattttgatttcctcctcgtccttctttcaagtcgagcctcgtattattaagtcctataattttttatgcaatagaaacattactgaacaattgtctattacacataaaaaaatcgcaacaggcgcagtttaccaattcaccgcgccgttgcgatttatccacataataaccctaacccctggtaaagtcaaggagaaatattatacgatctcttatatatccagttctgggggaacatccagttcctcggatacatatttcccatttttcttgcgctgccttacgcattccgacaaaagatactcgatctgtccattcactgaacgaaaatcatcctccgcccaggcagcgatctgatcatataattttgctgaaagtctgagcggaatctgtttctttgccttagtatctgccacgattaatacagacttcctgaattaacaataggctgtgcgtcacgattgccgcaaagtactacaagaaggttggataccatggccgctttccgctcctcgtccagttctaccacaccattctcattcagtctgtccagtgccatctccaccataccaacagcaccgtctacgatcatcttccttgcatcaatgatcgcagatgcctgctgcctctgaagcataacggctgcaatctccggtgcatatgccagataagtgatccttgcctcaatgatctcaagtcctgcgatctcaaccttctgctgaatctccttacggatacgctcggcaaccacttcactggatcctctaaggctgccttcatctgcgataccgtctcctgtagtgtctacattaggagccacatcatatggatagatccgtacaatatttctcagggcactgtcacactgaagggacaaatattctttataattatctacatcaaacacagcctttgcagtatctaccacacgccacataactgcaataccgatctcgataggattacccagacagtcattgatcttctgacggttattgttcagagtcatgatcttcagggaaatcttattatttgtgatctgaacttcgctgctttctttcgcagatgcgccaagaacacttgccagggaacctttcccggaacctccgtctacatcgccgctctggttcagctttgtcttagctgccggattcacactgctgcaaaatggattgacccagtaaaaaccattctccttcaaagtaccgatatacttaccaaataaggtcaataccagtgcttcctgtggcttcaggacacgcaatcctacaaaggggatccagcctatagctgcccatacaataccaacaaccataactgggatcacttcctgaaccgcaccaaatgcgatagctcctacccccactgcatacagcaggagaaacagaagcatcatggccataccatttttcttgttgtttaatactttttctttcattttctttttcttcctcctgaaatatcaaatatattttgatatttggatgatatcattttaatatcatattgtcaatagagacttttgcaacgaccctccatattatctttcttttaagaactccaccacttcctgatacagcggaatagacggcgctgcgcctggacgggacactgcgattgcagaagctgcagaagccatttccagacattttggaatgtcctcactagcacacagacctgcaaggaaatatccacagaaggtatctcctgcagctgtagtatccactgcctttacacggtaaatatcatgagtataggtttcctcacctttcttgcagagaacccctgcatctccaagagtaagtacgattactgctgccggatatttctcggaaaggatctccagcactttcttgtaatcaggattcgcctcctgaatccctgcgatcgctgcaccttccacttcattaacaataaaataatctacacagtccaacggcagatcttccatggactttggaatcggtgacggattaaatgccaccttcagacccagttcatgtgccctccggatcatataaggaacttcatttacctcatactgcatcagcacaacgtcccccggctctcccttttctgtaagaaccttgtcaatatattctttagtaaagtcacggttggtgccgccatatacgatgatacagttatgtcctgtactatctacctggataatagcatggccgctctgtcctggaagcacctggatctgagaaatatccacgcctgcatccttcataaaatcagtgagcatagcaccatcttctcctaccgctcctgcgtgtactacgcatgcgcctgctctcgccgctgccacagactggttcagacccttgccgcctacattcagctggataccatctgccagtatggtttctcccggaagtacaaaattctccacctgatataccttatcaatattcatagatccaaatgaaatgattttcataaaatattccctcccaattcccgtatttcattgacattttcttttttccggcttatgataattaaaccagttttataatttactaatttctttaccaataataccatatcaggggcaaaagttcaaaagtctttcgtaaacaatcctaaaaatctcaatctttcccctgattccacttattaataatgcccccgctgcttcagcaactataatcccccggaggtaaacatggcagttaaattaaaagatattgcagcaaaagcaggtgtatcttctaccacctgttccttaatattaaacaacaaacctatcagtgtatccgaggaaaccaagcaaaatgtacttagaatcgcacttgaaatgggttatatgcgaaagcaaagcatccataatctgggattgatcgttccggatctgggaaacctttactttacagagatcataaaaaacgtatcccgcagggttcaggaagccggttataacctggttatccttgattctaataactctattgaacaggaatgcaaaaatttactacagttacgcaattccaaagtggacggtatcatgctttctctggttcctcaggacgaatccacctcccaggtacgcccattgatacgagagataacatcccacaatcttcctattgttttactagaggattctctttccacttttggctgtcattctgtaaatacagataattatcagggcggataccttgcaactaaacacctgatcgatctgggacacacccggatcggcacaattaccggaagttcagattttccaaatacaaacgcgaaccgcaccaccggatatatggccgctcttacagaagccgggattcccattgatcctgaactgatttgtccgggcatgtttactattgaaagcggttataaatatactccctatcttctggaaaaaggtgtaactgctatttttacccataatgatatgtgtgcgtttggtgtttatcattatctgcaggaacaccatttgcggatacccgatgatatttccctggtaggctttgataatcttcccatcatctctacgctgggatttcctcttactacagtttcacagccaattcagcagattgcagaccgctgcgtagatattctgcttcagtccatacagaatccttccacagaacgcacatctgttactatgcagcccgaactgatcatccgaagcagtaccggtcccgtcaaaaaatgaatcacacgttcattaaaaaatcgtaagaacgggtgcctgatcagacacccgttttctttactttactgtccaccggaaatgatatgtgccagattccacatgaatcaaaacgccgccatctttttcttcaacatcaagcaggccttcgaatccactcagatttcctttgctttctttgacattatccgcagaagtattttcaataaagatcttcgccgttgcatttgccggaatttccgtgtccattatcatctcatttcctttatgctcccagcggtttataaccgttccctgtttcgttataacttttccttctgcataatccagttggtctgtaaaatatgggcgaatcttcaccgtggtaaacccaggttctgccgcagaaataccacacattccctctaccatccagttaccgatagaacaatatgccggctgtatataagaacagtctcccctttctccatttggcagaatagcctgcatagcctcccatacggtagtagctccctgattcacctgatacagccaggatgggcactgttcattcaataaaaactcatacatctgggcagattttccattttcgcagaggatttccggaagtacaagtgtagatgaaaaccctgcatccataccatttttctttaccagtttcatgatcctctcaaacagttttcccttttctttttccggataaagatgcatatgcagggcaaggatctgtgcccccatatacggtgactccaaaatctgtccacgattgtaaagctcatgtacagcagcctcccgaatcttttgatttaactccctgtacatttttgcatcttccgtttttccaaggatttctgcgattttacttaaggtttccgtagaatatgcataataataagtccctgtcagattgcataacacaagtggtcctaacaccattcgtcctgtttctttgtctgtacacgcacttggagtgatccagtcaccaaaactccagtcagcattccagatatatttcagataaggttccctgtcaggagtcacttcccctatagagatcggatttgcactttccgcacgatatttttccagctccagccatttctgcatagacggatagcaggtttctaatatcctcttatccccatatttctgatacatgtgccagggcatcatgacagctacatcaccccagcctggagtagaatgattcatagatgtatttccatttcggaaatacgggattaccgccggaatctctccattctcaccctgatcatatttcagatcctccatccaccttcgaaagttggcttccacatccagattatagcacactgtaggtgctatcatctgcagatccccagtccacccggaacgttctctgtccggattatcagtaaaaatagacatcaaattggatcggagcgtccactcaatattcttctgcaatcgattcaatttagaattggatgtatcaatataagtaaacacctgtacatcacttcctatcaaccgccccacaatccgggaaggcgttacctcccctcgatctgcacggaggcggatataacgatacccgtgatatgtaaaccagggatcataatctccttctccctgtgcatccaataccactgtatcaatcatctggctattgttcccggtgatcacataacgataattgccatccttatccggttcttcaaaatagtcaagcttgatcacagcccccggagatcctttcagatgcatcctggcgtttcctgccattgcctgtccaaaatcaatgatctgctctcctttaggtgactgatagatacgctgtgccgaaagcgtttccaggactttgatatgctgtgcattctgtccagccattgtttcatatccataatctacttcatttaccggtttccaggaagaatcatccaattccttttcagaccagttttttatttcccgactacaatcgtatttttctcctataaaaagatccgcatatcttcttggcccatctgtggtcgacacaaaagtattgtcacttccaatgatttcctctcttccgtctccgtaaagcacctgaagctgcaccaatgctccaagcatatttccaaatctggctgattcaccagaaaatccgatcctgcctgcccaccatccatcagaaagagtcacccccagcacattttctccttcttccagaagatttgtcacatcataggtctgcacctgaatataatccgcataggaagtagcctccggtgcaaattcataatctcctactcgcactccattgatctccatgcggtaaattccatgggctgtagcgtaaattcttgcgcgcattaccttcccagttatattcatccgcttgcgtaacataggacacgggtacagcacatcttcctggatttcctgactctgtacacttccattttccacatagttatccaattccggttcatgaagccatcttcttgttccgttttcaaatgtccgaagaaacggcatttctttggcaatatcccactcttctcgaaatacaggtgtctgctcaggctcaatccattttgctttccagtcagattgatgtagaagccccatttcaaaccaagccgcttctggtgctgtccataccatcccatcctgatccgtcacttctgcattccagtaatacctggttccgctttccagaatcaccttatctaaaagacaggctgcttcctttgtttcaataagaccactgtcaaatatcttctttctgctatcctcctgacccggcaattctttttccacgatcacacgaaacgctttctgaaacgcccctcttttttccgctctcagattccaggtgagacgaggcttcagaatagaaattcccataggatttatcattgattcacatcttaaattataaacaaacatatgactgtcccctctttttttacaaaagcagggacaaaacacctttgcccctgcccttttattatctgcttacaacaaatcgatagattcctgctgttaccgcatatacaactctgtctttttccgttctcagatattgtgcttcttttgaatcagttgaacttccatttttataaataattacatctctcagtctgatctccgtcgtcaccggatccgctaccggaagcgcaatctctcctttgcagttgtatgggatttccacatcaaataccaatgtgctgccctcttttttccaacaactctttaccacgccgctaatagtgtccatacttgcatttacaaaatccagattttccggaatatatggtcggatcttcacatttcgaaatgccggatgtttctcatccacaagaatacctgccagatatttatggaaacaaatagaaaacgctccatacataggatggtttctggaagccatatctgccagaatactattcgggtcatttacctcttcccacctttcccaaatggtggttgcaccacgttccagcataaagccccagcttggatatgtagtctgtgtaaggatcgcataagccacatctttgtaaccattctggaacagcacttctagaatatatctggagcacagattaccggttgtcagatggtaatcatttttttccacaatgtcttttaccatattttccagaacagctgccttatcctcttctgggatcatctctgtatacaaagcgattgcatttgcaccctggctgtttttgccacaatatttctcctctttattatagaaatgtctcaggaatgactggcggatctcctcagccttcttgccaaatgtatccgcatccttctcttttccaacaatctctgcgatttttgccatcagactatacatatagctaaccgaagctgttgcaaccagaatcgtcggcgtgatggtggatactgctccccctccaacgccttctccgtctgccgcatgtgttccgcacataggaccggcccagtcacccatatgggatgaaaataccactccgtcctcagagtttctctccagatatttcagccagcgtacattcatgtcataattctcttccagaatcctcttatctccatagaagcaataaacattccagggaagattggctggtgttatggcaataggatccattggagttggcccataacgtcttaacggcgctgtgtctgataaaacaccagaaaccacaccctgtgtatctcggatatcccgcatccatttagtatacagttttacaaggtcataattatacagagcacactcattccgcacagacatatcgttagtccagcccaaacgttcatctctttgcggacagtctgtaggaatagaatgacgattggtctcctctgtcctgcttaccacctcatacaaacggttcagcagatcctcagagcactggaatgttgaggtcttcttaatatcggaaattaccagacagccggtaatggtatcctctgccggttcctctgtaagccccttaacatttacataacggaaaccatggaaggtaaagtcaggctcatatatttctgtaccttcccctttaagaatatatgtatcaatggctttggcatcacgaatggaaagcttatctacagaatgatctgggaatgcttcctcagcaaaggacatctcaatagtctgccccgttgttcctgcaatcttcagtcgtacccagccagctatatttttacccatatcgaaagtgtagcttccatcctccagatgatatactgctgcaggtttaaatctgtctaccacccggataggctccagaagctgtgcacagatctcaccctttacaggttctgcctctgtcatccttgtccagatttcttttttgtcatattccctgtgatcaggcatatcccagtgagggatctcttttcttgcatcataagtttccccatgataaatgctgtcataaaccactgggcctttctgggtatattcccagacgccgattccaggacgaaaccatgttttctctccctgagcattgacaaggagcatctgcatggaaaggaagaaaactggaagatcctcttttgccactgtcatattcagtccgatccagccttttccaagatgaacaccaactgtgttatcacctttttttaccagatctgttacatccatcattaaatatggaagagttttattccagtctgtatttgcattattcaaaacagtgtccgtagctctttcaccgttaattgtcaaaacataataatttggagtaaccacaaatgcataagccttctggaaatcctgatcaattctcagttctgtacggcacataggtgcttcttgacccattccagggatccccagccaggaagactgccacagggtcttatcgatcagccctgttaccatctcctgcacctggcttgttttacttctgtcttttgtatccgttgctattacctgataatagtaagatgtaacactttctaaatcttttccatcataaacaatatttgcagtctggtgggataccacttcgccgctgtcccacatatacgcatcttctttggacaggtctttacctttacttactatgatccgatatgatttctgctcttttccttcattctcctccatacgccaggagaaccttggcttaacgctgtcaattcctatcggattttcaatatattcacaaaatactctcatcgtttctccttttatcctttacgtctttgtttccagaaatcatattttctgtgtcttttttatatcttttttttgctgtttttgggtataaaaagggaagctgtcgcaccaaacagcatttaatatgcattcaatgcaacagcttccgtgctaaaaaggattatttcatcattccgtttgcttcatgttttgcaatgatctcatctacattgtctttagtgataagggttggctcaagctcgatatatctgctctcagtgttctcgcctgtcagcatctcatgaagtgcttttacagcttcttttgcctgctcgtcacagtcctgaagaacggttgcttccatcgcgccagatttaactgcgttacatccgttagccagaccatcaattccataaaactggattctctgtgtatcccagccagcagcctcgcaaacctcgatagcaccgcatgcaaggtcatcatttggagccatcaaagcgtcaaactgatcctcatcatacatctgggtccagtcttccattacagtcataccgctttctttctgccagtctttagcattctgctctgccagaattgtcacatcatctctacctgcatctttcagggcatctttaaatccattcaaacgatcgtcagatcctacgtttcctgcaggtccgccaaggatcaggatagatgcattctctggaagtgactcagatgcaacttcaccaattgcttttccaagaccatagttgttaagtccaagatctacagttactccatctgcatcttcacttttgtttacacgtactgtataaatgccatattcatccagtgcctctttataagcatctgtaaattttgtttcatccggagcatcaacaatgataccattatatccgcctgtttctgcaagctcgatcattgtctgaacatttcccgtctcacctgcaaggtcattgatggttgcagtcatatctgagtaattctcatcaatttctttcttaatagagtttgccagccaggaatagaaagactgtgcctggttgctgcatccgatgagtaccttgtactctgcatcatcggccattacaggtgctgcaattgttccacataatgttgctgctgttacgatccccaccatcgcttttttcatgttcattgtaaaatcctccttagattttatatagttttatttttacggcatatggaatgtcttccggcatatgccgccatgcccgtttattcagttgtatttaatttttctttttgaagaaattctttactttattattctttgtcagaagatcaaagctgagtgcaaggataatgatcacaccctttgttacctgttgaaaatatccgcttaatcctaacaggttcataaagttactgaggaaacccatgatacaggaaccaatcaacacaccacctacagtaccgataccacctgtaaagcttacaccaccgataactgccgcagcgatcgcatcaccatgatatccatctgctgtacttgggattgcggaatttacgcgagcaatctgaagcactgctgccacgccagtaagaatacctgcaaccaggaaagttttgataatggtacggtctacgataataccagaggcgttggctgctgcctgattaccaccaacagcgaatacatcacgaccaagagttgttttattcaggataattgccataacaacgcaacatacaagtaatacgattacaggaaccggaattgctccaacataggtagtagaaatcacattgtagttaccgatttcatatgtagcctgtccatttgtatagatgtaacaaagacctcttgcaatatagtccattgccattgtagcaataaaagctgtaagctttacttttgctaccaacacaccactggccatcagtacaacagcactgatcaagattgcgaccagtacaccaagtaacagggaaccactcttcaggtaaacctgtacagacaccataccagacagtgctactacagatcctacggacaagtcgatctgcccactgatgatcaaaatcccctctgccagcgctaggataccagttacactgatctgtcttaatacgtttgtcacattcttaatagaaagaaaaccaggaaccgttatagatccaatcaccagtaatgcgaccagtacaagaccaattccatactttttcaacaactggcttcctatgctttttgttgccttttccttactcataatccggctcctcctactgaatagttaatcagtgactccattgtcagttcttctctgcttaattctccggtaactcttcctttgtacatgatcactgtccggtcacacataccgatgaattccggtgtttcagaagaaatcatgatgattccttttccagcctctgccagttcagtcatcaacttatagatctcatgcttagctcctacatcaatacctcttgtaggctcatccagaataacaatatctgcatctgtcatcagacatttacaaagaactaccttctgctgatttccaccacttagattctgaactgtgctgtccagccccggtgcttttacccggatatccttaaacagcttttccgtgatctgatcttctttcttcttctggaggaaactgtgtacagaaattttcttcaagctggaaagggaaatattttctttaatatccctgcaaaggatcagtccaagacgtcttctgtcctcggatgccattacgataccattattaatagccccgcttacattattgtatttaacttccttgccccggacaaagattttacccgaatccgctttgtcaagtcctgccaggatcctgactacttctgtacgtccggctcccatcaatccaccaagtccgaagatttctccttcatggacagtaaatgaaatatcataaatacggctttccttacatgtcagatgctctactcttagaacctcttccccaatcttggctgtcttctccggataaacctctgtaatctcgcgtccaaccatcagttttacaagaagatctccgtcatattctgaaacaggagcagtcctgatatgcttgccatctcgcataactgtaatgtagtccgcaatccggaagatttcatccatcttatgagaaatataaagaatggtgattcctctcttctttaactcatcaatctttttgaaaagacgctcaacttcatcgctagataatgcggatgtaggttcatccatgatcagtatctcaatattctcaccctgaactgcttttgtgatctccatcagctgaatatcagaaacagaatattctcgaagagttttcttaggatcataattcaaatcctctcttttcaggatctcccttgcttcctctcttgatttcttccaatcaataaagcatcccttccgtggctccctgcaaagcatcaggtaatcttctactgccatgtccggcatataggaaagttcctgatagatcattgcaacaccctcacgggttgcatctgaagcagttttaaacttctttggctgttcattgatatacacggtaccactggttgctgagtaggatccgttcagaaccttcatcagcgtggactttcctgcaccattttcccccatcagcacatgtacgcatccctgcttgattccaaagctgacatcatccagtgctttcactcccggaaattccattgtaatggagtcaaacctgatcttgtaactatcttccatcattgacctccttttacagaaatttacttaaataaatattttctattgtaacgttttttaaaagcaaaagcaagatttaaagaataaatattttactaaatttagcttacatatttgctccaaattagtaaattaaaaacctataatatcatgtttaattctcttttgcatttgttctcaagctgttttcctttatgtttttttcgtaaattgctgtactttatgctatatttatatcattttgtgtgcattaatgtcaataaacacttttactaaatgttttacttattttttgtgtgatatgctatagtagtatatccctattgacttctcactgtatttaggatattattttagtaaattatttgttttaattttactaaattatacttagtttctcaaatgaggaaaaattatgaagataaggcttaaagacattgcagaagcagcaggtgtgtcgtcaaccacctgttcgctgatattgaatagcaaaccgattaacgtatcagaagaaactaaaaataaagtaatacaggttgctcaggagatgggttatacctataaacagaaaatacgcaatttcgggctgatcgtaccggatcttggaaacctttattatacagaagtcatcaaaaacgtatcacacaccgcccagcgttgtggatataatctggtaattcttgactccaattttaatttgaagcaagaagtccgcaatctgcagcaattatctcaatcaaaagtggacggaatccttattgccctgatctccgaaaggacagatatctttccactaatcactcttgtaaggaaaatcagtaataacaggattcccattgtactactagactactctattaatacgctgggatgtcactccgtatccatagatgattactatggaggatacatggcaaccaagcacctgatcagtcttgggcatcggaaaatcgggtgtatatgcggcaatgcagaaaatcccctgctaccgccaaaccgtgttgccggctttaaagctgcgctttctgaagctatgattccttacaatgaaaacctggtaattaacgggcacttcaccgtagaatgcggttaccattcagctcctgttcttctaaaaaaaggagtaactgccatttttgcccacaacgatatgattgctttgggtgtttatcactatctccgggaacatcatatacgtattcccgaagatatatccctggtaggatttgatgatattcctatcgtttcttccatggaactgccactgactacagtagcgcagcccatccaggccattgcagaacgcagcatagagatcctgcaggattctatccaaaatcctactgcagaccggattgccatcaccctgcagccagagcttgtgattcgttcaacaacagggccggtacgcagtctgtagtcagcttccggccacggtatgtattgacctcattctactaccgtgcctgaaattccacgacagcataagattcaccctcttttgtttccaatgccaccactactttaccaggctctgtatgcactcttggataaaatacatccccaagcactgcctgtttcttatactctgcacgcatctggtggatcttaaagtcctccggcagataatccgctgcgatccggatatactggcaattattcacatgatgatgggtatccaggttgtgcttctgcacagtgaatggctcccggtctgtcatctcctccggaagctggatcttcctggaaacctgctccatttctaagggctcttccagcacatatccacggcagtcctcttctgtaagccttgcaggcagcccggtgtttgtattaatgttgatccatcgggaattggcataagccagcctttccccattttcaccttcaaggacaaaattacgcatccctgtaaatcccttaaaggcatacggcttagtaagtgctgtgatcttttctcccagcataggataccgatcgatcactacctgccaggatgccagcacccaggcacgttttctttcttctactgccagcattccctgtccgatctcttctgattggaaagtacagcaatcctgaaaataatcaagaatcgccggcagtgtaaggcatttatcctcaccaatctcactgtatctaacctttccttcaaaacgataactcataattttgattctcctttttctgtatatatgctattttctgatgcaagttctattttccctctgtctccattcttttcagctccggaaatacagtgaaaatcatagtaagaaaacaaaggctgccgccgatcacattagataccggttctgccataaaaactccatctgtacccatcttcagcagataagggaggatataagtaagtggtactacgatcacaaccttacggagaatagagaaaaatacagcctgttttttcttattcagagatttgaatacagtctgtcccatatactgaaaatccataaagatgaatgctgaaaaatactgtttcagtgccggaattgcgtcttccagaagcatatggtccgaactgaaaatgctcatcagctgtttgggaaagaaaatgatcacgctccacatcaccgctgtataaagaaggatcatcacactcatggtgaagatcgcacggcgcacatgcccggatcggcgggccccataattatagctgataataggagaagacccttctgtcaatgcatagatcggcgtttctaccatctgacgtacactggatatgattgtcattacggatacatatacatcgccaccggttacagacagtacgttattgcagcagatcgttaccaaactgttggtaagctgcataataaagccagcggttccaagactgataatatttttgcaatatcctatgcatcctgataattcttttttctttaagagccgtacttttaattctgcttttttgtgcaaaaaagcgattacaaacaaggcagagaaaatctgcgagatcaccgtagcgatcgctgcaccgcagactcccatatgtaatacaaaaataaaaaccggatccagcagaatattcaatactgcgcctactgtcaccgagcacatcccggccaccgcgtatccctgtgcattaataaacggattcattcctgtagcgatcatggatggcaaagtacctagcagatagatcagcatatagggaagggcatatccaatcgcttcctgggatgccccaaacaaaatcagaagcggctttgccgccagaagaccagttgtcatcaaaaccagtgcactgccacacaacatggtaaaggatgtgtccatgatcagcctggcctcccggtcatctccttttccacggctgattgcaaaaagaggtgcaccgccactgccaaaaagattgcaaaatgccataatgatcacgatcaccggaaagcaaagtcctactgctcccaatgctttcgtccctgtttccgggatcctggcaatatagatcctgtccacgatgttataaagaaggctgagaatctgagctgccagcatggggatggctgtacccaggatgttttttgtaatggttccgttttcaaaatctacccgcttcatgttacttttccccttgttttttccatatataattgctatttttattatgaatgttataattgtaataatgtaggggcaaaagacctttgaccctgatccacattgataaacatatcacaaacaaaggagttatacaatcatgttctcatcttctacacagccttcaaatctgactcccaggtattcctgtatccagtttttcttctggatcgtttttgttaccttggccaattttgccagcgtatttctcctgaataccggcttcactaatacccagattggtattatcatcgctttggcaggcgttgtttctgcacttttgcagccaaccgttgccagctatgccgacaagaacagcagcccatctctgaaaaagatatgcatttttatttcactgattgcccttgttttgtcagcatttttgttgttctatacacgttctctgctgtgcactggaatcttttacggaagctgctttgtgcttatacagctgcttacccctatggtcaactcgctgggaatggaaagcctgaaccagggcaaaaagctgaatttcggcattggcagaggtatggggtccctgtctgctgccgtgatcgcatctactctgggtatcctggtagacagatttggaatcagagccatccctgcaagcatttccattgggctgcttctttttcttttttccttgtggattttccctttccggaaagtttcaaaagaacaccaacaaaatctgacggcggcagaaaaagcacctggatccggtgctttgtatttctttcgcaaatataaaaaatttaccatcgtactgcttggttctatcatggtgtatgttagccatgtgctgatcaacagctttgcatatcaggtcattgtagaaaaaggagggtccagcactgatatggggatcgctatggctcttgctgccataatcgagcttcctaccatgttccttttcggctatatgcagaaaaagatccgctgtgatatatggttccgcagctgcggtattttctttgcgctgaaaaccctgttttctctgcttgcccctaatatgactgtatattatatcattcagatctttcaggcctttggctgggctttgatttctgtttcctctgtatattacgtaaactccattatggagccacaggatgtgatcaagggccaggcttatttcaccatgacctacaccatcggaacagttcttggggcacttctgggtggctggcttattgatctggcaggtgtttctgccatgctgatctttggtacagctgccgcttccatcggcgcagtgcttatgctttttgctaccgaaaagccggcagaagctgcttccagataaccctaccctttttcacagtcattacataagttttattcctgcgcatccggaacggatatctgatctctgacaccaggaacagattctgatctgaatgcgctctttgcatactgcagtcacagatcagccatctggatccgatcctgacctcacaccatccatgtggtgacagctgcgcatagggatctcgtgccgtaacaccgcctactgccacccggctgtcatatcccaatactctggcaatatatgccatagccgctgcataatagtagcagctgcctctttttctggtaaacatgtacctggcacaagattttatattcctggccgtaggcacttccgtacccatatggaaatatgaatatttcaccagtgcatcatagcactgacgcagtcgctgccttgtcttattctttcttgatgaattcttcaacacaaaatccacggcctggcggatctctcctgcctttaccacagtaccggccctgtccacatacacatagccttttctctttgtacctgtgatcctgttcctggcagcagcatttacctgccctgttcccacatctgcccctgccagcaatactgctaaaagacacaccaatattaaaattttctttttcatgagcatccggcatcccaccatccggtcatcacatttaggatttcctgatccgtctggcgcattccaacccgtccgatgtaccccatagccttaatggtttgttccacatcctcttccacgatcccgtctcctggaagaaaacttttgttttccatactcagatgaaaggccatgatcgccgcatttaccgaggatgcaatcttggctgcacaagaaggctttgcgccatcacagatgatgcctccaacatttccaagggtattgatgatcgcagccgaaacctgactatagtcaccgccatacatataagtgatccctgctcccacaccgcaggcagaacatacagcaccacagtaagccgacagaccccctatgtaatatttctggtgcacagcagtaagattactcaccaccaaagcacggtacagcttttcttccggcacatcccattcctgagcatagacaagcactggcatagaaaccgtgatcccctgattgccacttccggaattaatcacaaccggcatggaacagccgcccatcctggcatcacttcctgctgccgccctggcacatgcacgggcagctactgtacctccccaggcattctccagggttttcccgatctgtgccccatagggatgctccaagccttcctgagagattgctgtatttaaccggatctgccgtccaataacatcacggatatcttccatacgtacacagtctgcaaattccaggatcccacgtacagaaagctctcttctttcttcttccgtactctttccatcatttttcagctggtcatagagaacctgcccatcttttaggactcgcacaatattagtatgtgtttcggaaatcactaccactgcactatgtattcctttttccacatgggcttctatatagatcttctctgtggtatctgccagggcaaatgtacagatcccatctgccaggagtgctgctgccttttctctgtcattggctgtcacactttccagaacttccaattctttcgaggcatctccgcctacagctccaagaactgctgctgcattgattcctttcatcccgccggaattaggaactgctgcaccctttgcatttttgataatatttccgctgcaccggatatgaatggattccgggcactctcccagcacctgtgctgcctttgctgtcgcataagctactgcgatcggctccgtacagcccatagccggtatcagctcctttttcagaatatccagataatttgcatactgtactgcatccactgtatttccctccctgttacattggccatccccttaggtaaatcagggcttcccctttgccctgaaggctccttctctggccttattataacacaatcaccagccgcctccaatatctgaaaacgcagtgatcaggcagtcaatgcccaagagcagtaaatacactcccataagcactccaatggaaaaaacagaaaatccagggtttacgatcatcagcactgccagcaccagccctgctgtattgatgaccaggctgaaataataataagcattaccagccacaaagcgtacaatattcagatgggacagtctggaaatacaatgtgcgataaaccaaataggcactaaaagcgcaatgatccattttcctgcatccggatgtaccaatagcataaaccctgccataacgcttaaaagtccggcaatcagggatacagaaggtccaaatcccatatgctgttccatctttacataaaaaacaagatctccgataccagttaccacagccagaagtccatacagaatcacaaaaccttccagaatactgccaggatgtacacaggtaaaaattcccagaaggatcaaaagaagtccttcaataaattccagccatccaaaaccagaacgtcttctcatttctgtccacctccttcttcattcaaaatctgcataaactcatctcctgtaatggtttctttttcatagagaacctttgcaagctgatccagcttctcccggttatcctccagaagctttttcgctttttcatgctcttttcttacaagctctaccaccttgcggtcgatctctttctgggtatccgcagagcatgcaagagatgtatcgccgcccagatactggttatttacagtttccatggcaaccatgtcaaattcctcactcattccgtaacgggtgatcatggctcttgccagtttggttgcctgctctatatcattggatgcacctgtggtgatctctccaaataccacttcttctgctgcacggccgccggtaaaagtggcaattttgttcagaatctcctgctttgtcagaagatatttatccccctgttctacctgcatggtataaccaagcgcaccggaagtccttggaataatggtgatcttctgtacaggtgcagagtttgtctgaagggcagcaacaagggcatgaccgatctcgtgataggaaaccactttcttttcatggtcggagagcacggcattcttcttctggtacccggcgatcactacctctacgctttcctccagatccgcttcctctactacagttcggccacttcgtactgcacgaagggcagcctcattgataatattggccagttcagcaccggatgcaccggatgccattcttgcaatagtatggaaatccacatcatcggatgcatggatctttcttgcatgaaccttcaggatcgcttccctgccctggagatctggcaattctaccggcactctcctgtcaaaacgtcctggtcgggtcagtgcagggtccagggattccggacggttggttgctgccaggatgatcacaccattatttccctcaaatccatccatctcagtaagcagctgattcagagtctgctcccgttcatcatttccgcccacctgaccatcacgttttttaccgatagcatcgatttcatcaatgaatacaatacacggagccttttcctttgcctgcttaaaaaggtcacgtaccttggaagctcccatgcctacaaacatttccacaaattcagagccggacatggagaaaaacggcacattcgcttctccggccacagcctttgccagcatagtcttacctgtacctggagggcctacaagcaaaactccttttggcattgcagcacctacctgggtatatttctcaggattgtgaaggtaatctacgatctcagccaggttttcttttgcctcatcctcacctgctacatcgctgaaatggattccttctgttgactgcacatatacttttgcattgcttttgcccattccaaagcttaaggcattcttaccacctgcctgctcgatcagcttcttgctcatgtactgtccaagcagtacaaagatcaaaagcggaagaaacacagtcagcagggtactcatcagcggagacatggttgtgtcaatctcttttgtaaattctgccccacttttatgaagacgctctgtcagggtaggatcctccataacacctgttttatatatcttatcttcatccttattcgtaaatacgatctggttatcttcaatttctactttaccgatcttgccatcatcaatcatgtccatgaatgttccataatccacttctttcacctgacgttccataagaacaggtgaaataaacagattaaagagaaatagtacaagtatgacgattccgtaataatacagcagcggctttttcggtgacttcacttctttcatgatctgtgtatcctccttttttattcctctctgagcaagaaatttctatgtttttgcgatttctgctcctgttgttctatattctatcgcacagactaccgattttcaataaacagatttcctcaaatgcacaaaaatacataaaaaaagagcatatgtgcacttttgcatatatactctttgcttattatgcttgaagccattgccccacatcattttagctatattttttcacagctctacagctatttccacgttcttgccacaaaatgcaactccatatttataaatatgatctataccagcagcttttaaatctatatcatatttattctcatttatctgccgtaaagctgtctcagaaagctgttttaactgtttttccgtacagtcttttcctgcctttaattctatcaggatacctggcagccctttacttaaaggttttaactggatatcatatctgccatccccggattccctgtttgaagttgcgaatgtaccccctactaatgcacataaacctaacatgaatccatgatagaaattctccccagctgtatcaaaaaaactgacagattgaagcagcatcgtctggattaacttctgaagttttttgcagtctccggtaaaaattgcttcctgaacctggattgcagtaggctggggaatcagcctttcaagcttctgcaatatttctttacgatacactaccgcaatttcctgattcggcaaagccacctgacacataaaatccccattaaaagataaagttgtactcacagcttttaaatatccggtaatgagaagaaagctgtagatcgttgacggattatttttaatctgtggataaatcaccccggtatcaatatacgtgataaaactttcgccgttaagcaacgctgttaaacggatatacatttctgcatccgcttcaccaagaatctcaccaataatatcattacttcctgttgatacccagaaggcccttggttcacattcattgctgaaataattaatgacagaccagggattaaaaatctctgttttaccaaagcaatagccatcataccatttacagatctcatcatacttgtcagatgccccataataatcggccatcttttttacttcatcagcagtaaagccaaaataagaactgtatttattatccagcacagaataaatggcaagattattcattccactgaagatgctttcttttgctactcgcaaaatcccagtaagaaatccgaaagataaattcttattatccttaaatccccctgaaaacaaatttcgcatgaacaggatgattttatcataataatctttcatatatccctgctgaatcggtgtatcatattcatcaataataataaccggtgcaatcccataatgcttgcggagcatgcttgaaaggtccagaagtgcagaggacagttttacctcgtttatcttgccttcggccagattctgatatacctgtttatcatactcatcacacttttcacttccacgtaactcttcatgccgctgagtttcttttgcaaatacatctgtaattgctgcaattgtttcttcccaagtattaaatttaatgtctttaaatgtcagaaagataaccggatattttccctgataatcctgatatttctgtccacatgcccatatttttttatccttgaaatatacagatgtatcgctgtccgtcttttcaaaaaaagtccgcagcatatccatgtttaaagttttcccaaagcgcctgggacgggtaaacaaagaaacctgagggcgctcatcaataaagtctttgatcatcattgttttatcaatataataatattctgatgatgccagacaatagtccgatacccctacaggcaatggaagtcttcttgcatctttaactgaactcataccgtcttcataatccccctttcccatatttttctgcagatattctgcagcttttgtataggcagacatggacagccccatgtcgctcccattttcaccgcatcatatacaagtcctcggatctctgaagccttgtcagccataaattcccgctgttcccctcatttttcccaccatgcaactgcccggataggcgatccgtcacagttttccagttttaaaggaaaacagctgaaccagaacagatcatctccacagagttccaaatttttcagattttcaatattcacgatctctttttctttaaaaagctgtttatgtcttgtcagattctcatctgcgataggatccaggccaatcacatcaaagccgatccctttataattgccagccagaatatactgcatcacctgctcatccaggcagggataatccccgaagtaactgtctgttccccagcgcttatcccatccaagataaaaaaggagaaaatcagcctgtgcacttttttctccatatttcataatctgcgccattgtgataggctccccttctttcaggccacagcagtcgatcaccagtgcttttccaataaactgctctgccgtgaactgatccagagtggtccgtcctgcatacagatgagccggtggatccatgtgtgtacctgtatgagtaaacatacacagctttgtttctttaaatccatccttttcataactgtttgcaggcaaaaactggggcggctctgtccccggataaaccggcatgtccggccggatggtatgtgtcagatcaattactttcatattcatgtctcctccctcaggtgctctcatattatctaaccatattttagcatgtcttgcgcctgatgtggagaaaaacttattcgtcatgatttccctgataaatattttttcaataaaaatgtgcagaaatatggaaatgtgcaaatcccatcctcaattcctacgttgctgtctgccagctttattccccaatgaatatcactgtacgaatcactggatattaactttcgcagggatcttgaacgattattgtttgcttttacttctactggtaccagttcatccttcgttctcacaaaaaaatcttcttccagagtcgcactctcttttttataataatacagccctagcccttgttttataaaggcctctgccacaaagttttcatataaagcgcctttatacactcccagatttttattcgctctcagatcttcctgcgcctcttcatctaaggatgcgatcagcaaaccggtatctggataataaatcttatattttgactcatcataatttcccttcagcggaagttccggatagttcaagcagtaacatatggatattactcccgcatcctccagccaggttatacatcccatatattcccggcttctggcctttttgtctattttgctcaactgaaacttcttattttcttttgcaagctgtgcaggaacatttcgatatacacttacaattttagtctgatccagaccctctgcgtatttccggatatcttcctcataatccagctggatctgtctttggatttccaatgtttcagaaaaagtgcctgtttcaatatactttttgacaacagccggcatcccacctagaacacagaagtccagaaacagctttttataaaccgctaattccgtatcagaaaatggaactccatcctgcatatgctttaaaagattgtcaatatgaatttctgtatatccctttgcccacagaaactcttcaaaatccatggaaaacatttcgtaatctgttttgtatccaacactgttgctatgaattttcttgtagttaattccaagtaaagaaccactgcatatcacatcaaatctgccatccagcttaaacgctttcagagaagttgcaatatctggaacttcctgcaattcatcaaagataatcagggttttgccttgaataaatttttttgatggatccagcagagatatattttttataatttcattaaccccatagccatcacttaatattgttttgtattttggttcaagtacaaaattaatacttacaatgttttcataatttttctgtgcaaaatgaaaaatggactctgttttgccaatctgccttgcaccttttacaattagcggaagcttatcctcacgatttctccatgctaaaagataatcgtctattttccttcttaaatacatcgtctgctacctcctgatgttagtatatcacgtttttggctcttttcaatttggttttcacgtttttatcttctttttattctgatttttcacgtttttatgcgtttttgcagcagtatttcacgttttttataaaatcattcaagagatgcactttctatttgtaattccaacaataccgcaaataatatgtccgaaccatttccacgcaaaaatccgggacaatgcgatgcactctcacattattccggattatgatgtctaacgattttactttaccttttgtattgcatttcactgtttatctggatgcaaccaatcctataaccccgataatgagcagcagcgggaatgctactgaaagcagtccgcctgccaccataacgatcaggatcaatggaagaaacacaatatttaatacaaatttggaaattccccaggcagccttaagcccaaaacaaaacagctttccaaacacaccgaacatacaaaaaacaaataataatgtaaacatctctgtgtcactcctttaaaatccttcaatatcttttaatatcatcaatatctctgcagctgccttaatacatcttccaccctgcggatggcttcgtcaatctgtctgcgtgccttgttgatcctgtcctgaaccatcagatccacaaatgcattgtcaaaaaagacatctgcaaaagtcagaagatcactggtttcaatatgcaggtcatatatcatacttacgtctcgcagttctctgctgaaattatccagatcatatctggcctgttccatacactgtctggcatgctgcatcttggactgcttcaccatactggaaaagaatcctccttgaaaaatatcccacaagccccagttccttgcacttgaaagattatcctgtgctgcccggaggctatgtaatgctctctgacctgcctcaatggcttctcttttttctttttctatatcatatcccatgatgattctccttattgtatactaccttttcttcctgctcatatcatacattatatcgctgtttgttgctgaaataaatccattttctgaatttctttcttttggtaatgcgtcctacataaataaaatcattcttaccagtgttccaaccacagttacgatcagccattcattctttatcatttcttcttcctctgctttcatattgtgttggcttgaaagccgatttatcttttatcccaagcctgttgctgtattccggattttgtctcatctcttccagtatccgtaccatccttcttctttcgataacgtccatacttcctttcttttttatttccttgccgtcaactgataaatccagtataataaaacacagcacaaaaatatacatctgctttattgaaataacagcacatatttctctgtttttggagatatagggaggagccagtatggggaagcaatctacccgtgagaataaaacaatttatcagatctgccgcgaagagcagggactgacccgtgaaaaagccagcgaaaaaatgatcggtgtatctgcttcaagaattgaaaaaatagaatacgagctgcaggatcctacgccatatgatatcgtccagatggctgactgttacaggcggccggatctgtgcaactattattgttcccacaagtgtaccattggtgacagatatgtacctgagattgaggtttccgagctctccaccattatcctggaaaccattgcaagtctgaatgagatcaatcctcttaccagccgcctgatccagatcgccagagacgggaaagtcacggacgatgagatccatgattttgcttatatcagccaaaagctggatgaggtttccctggccattgattccctgaatctgtgggtagacaaaaccgcaggagaaaataaccttaacatagagcttttaaacagagaaaaagaaaaattaaaattaaaaccaaaaaagggcggtaattaaaccacccttctccatcaatccgattgacttggatctctttgcctggatcttaatttacttatatcaaaatcctgtatgattccgatcagctgtccggatatgatcaccgtcagaagtgaatacccgatccgcttcagcggaatatagctgatagacagcataagcaccacaagatcgctgatcagatacacccactgtaccttaaggcccgttaaatgggatactcccattgcaagggcatcatctccggaaatagcacctccgatccttacacatgccccggctccaacacctacgaatattgctcctacgacagatgccaccaaaggcatgttataaagctgaggccataagggctcaaactgttcaaagatacggtatgccacagaaaagcttactgtggctatacctgaataaacaagaaatatacggcccagtattttccatcctaacgcatagcagatcacattggctacgaaattcgtaaccgcaggcgatatgccaaaccagtgctccagcaaaaggttcaggccgatcacgcctccttctgtcaccccggaaagcgaatggacatgataaaggccaaaggccagaaacgtgctgctcaacacagcaatgatgcaatttttaattttgatatctttaaaaagtttttccctcaatcccaatttttactcaccaatcttttctgttatttctcgctgccctatcttcctgagcagcaaaaatactcctcacatgacagagcgtgtaaagactattatcccctatcatgaccaaatcgtcaagcaaaaaccgattattgattcttttatcctaccagcccagatccatcagccagttatttaatccacgttccctttccttttcagctgtaagatgttccggatgggtatattctcccttgatattgccatctacaatataaaggatcctgctgcatctggcggcaacctttgcatcatgtgtaaccattaccagtgaaaattcagccgggttatttctacacatccactatgccatgctgttgaccattttatatttataaagcatctccgcatggttctgctcttcgatctggatatctgccaaaagttttctcacacctggatctccaaacgcaaacacttctgtattgtaagtggaagaaacaagtttttctgttccgatacaatcggttgcaaggaagctgtctgccttcttatcctctgaaggtgccatactgtacgtcgcggttggttgataatctttccccgcacagtcattgcaatcacaggaaggtactcttccacacaatacctgtgtgagcgaatctaaatgtttctgctcttttccctgcaggtctgtaaacaggtcaacaagtacctgatccttggcaagcttactatatctctggtatttttccacacaggactgctcctgtgtctgcaaatctttgatcacagttgtctctttgtcacttaatatcatctttctgcctctttcccacaggtcttaaaacctgtgattgttttgtacgatgctgatttgagtttcaaaatgcccaaatccggatcacacagattgctccgtgctttgcactcccacaatcctgtaatcatgatgatattatgcgccccggaaatagtaattattcattttctttgtaataaagcgactaagtccgtttcaagaatcataagtttctcaatcgttaaggagcttgttatattttgctccaccagttcgattatttcatatacttcccaatcgtattgatcaaagagatatctgccggcagccaggcaacgctgtctaactgatccttggtaagccactttgcagcttctgcttcttttagctcaagatggccttttgttacttccgcccaaaaacaatccatagaaaggtggaagctgggataatcatactcaatcgtatccacccattcaccaatcttgatttctgtatccagttcttccattatttctcttgcaagagcctgctgtggtgtctctccagcttctacctttcctcccggaaattcccatccacccttaaattcaccatagcctcttgccgttgcaaatattttatttttctctttcatattgtcgcagataattgctgctactacttttattgttttcatctattgaatccctctaactatttatgccgtaatattagactgcaagtatcttaataaatcctctcgcactgcatgatgcatttttatagtaacctttgtgattggctgcatacgtccacgattatcttctttctgtgcatttaaggcttttacgatatcgaactgtcccatgtaataaaaacttgtctccgcatctgattttttcacaagtaaatgctttcttgcagctccaagcacatcctgcatataagaactgtccagaccttttccaatctgggaatcccacttaaagatcagattatcctcaaatgcatctgcgtaatccggttttccatccacataatttttctcatcctggctctcttctttatgataggtaatgaaaataaaaacatcgtctttaattcgtttcataccatacatgatagaggaaagatccttcccacagttcataagcagactgacatcccttctggaatacttttcatataacacaaagggattgtccgcactcctccccggaagatacttctcctgatatctggtaataccaacctttataatatcttccacctgtgtatagaactgcctgtgtgtaagtctttcagcgtagctttgcactctttggatcattccgggccgggtgctttccaggatatcgatcagactgaatttctgatattctgcttctttactcacaaaatgtccctgcagcacctgaacagcatcctttacctgtgctatgctgacctcaaatccaaacttctttttgtattcttctgcaaaatcctcaatcctgatctgatctttgtgaagaagctgaccaagtattgcaagctcatctggacgcactcctgagagaaccgttttagacaaatactccagtgttaatttttcctgttcacttaagcaattcttgtatttttccttttccatggcctgcataaaggcatcatacgttttatattctctaatgatcactaacggatcaatttcctgattctcatagaaatcatacagaagcggaatgcgtcccaatcgattcttcaaagaaatatagctttctttgatcaaggctttcatacctttgatcctgtcgatggacttaaagatcttgtccttggagatctggtcaaaatgaacggtcgatgcccctggtatcgtactattcccactaatcacgtacttgcggatcacatctgcattataggaacgatcccctgataatgccaccggtatcatgaaattattattataattcccgataaaatccaaaacaacaacatattctttccccggtgcttttctcagacctcgtcccagctgctgaatgaatacaatcggcgactgtgtaggtctaagcataataacctgattcacttcaacaatatccacgccttcatttaatatgtcacgggagaaaatataatccagaggctgcatctcctctgttgcagcagcttcatccatggccagtctttcaaatgccgcctggcgtatctcctcactgtcattgccacttaatgcaactgtacagtatcccagtgcattgaactttcgtgataattttaccgtcctggttatcatcccgtttgtccggagtagctgtcatgcccaagaacagcttcggtttaaaataattaatgaccttggtgtagatgttgttagaactatggtgtgcttcatccaaaataatgcaatcaaaatcatccggcttgtactgaaacaaatgtgtatctctattcaaagtttctactgttgcaaaaacatagtctttctcatattcataggaaccggcacccacaagatccatggtaacacgtctgtcaaataccttttcatacgatttcttcgcctgcttcgcaagtgtcacacgatgtacaagaaataacactctcttaaacccaagctcacgcatggcaaaagcagacgcataggtctttccggtacccgtggcggagatcaaaagtgcacgctcttctccctgctccagaatcttccgcaagttcacaataaatctttcctgcatggagtttggctttaatctatatttttcaatagacggaatctcttcgtttttcgctatttcccgctggtgctttataatattgtagcgttctttgtagacttcataaaaatcatcatatgacagagcgtattcactattccaaagctttcggaactcttctacgatttcctctgcgacttctccattttccgtagaaatcagttttgtattccactctttattaaccgtcagcgccgcacttgtcatattggaacttccaatgatgatccggtaaatctcttcttttttgaaaatatatcccttcgtgtggaagccatttccggcagcttccacgtcatacattttcaacgtaatatttttcaatccattgagtttctcaagtgctctcggctcgctgaaattcagataattggttgtaaggatctgccccttaatccccttttcttcaagctcttttaaggtctgaagaagcggagtcacaccacccattgtgataaatgcaacactgatctgaaactgatcacagcgcagcaattcatcctccacagatgaaattaccttcttcccttcttctggattattcgacacaaatgctggcttgtacgccagatttgccgccacggaaccatttatataagcggcacttaagccattttgcaattcattgatcacattcgcatccattgaaaaatctccctctcattccataatgagcaaaacaaacactttgcttagcattataccttataggagagagtttgtcattgaatatccatgaagcatgcatgacaaagacaaccgaaagaaacggtaacaataaaaaactggttcgaacatattaaggttgatcagtgtatctgaacctgtcttttctatggtctttccgatgaatagctaggctggcttttcattgagatttcttatgcttttttcgttgacatttaatactgttcaatgtatcatataatcaagaaatgggttttgttactgagtaaggtcatttgactggaaaagattgctcgtttcttttttttattttcatgatatcgtataagtaatatttcccatcttcatcgtgtctgaccaacatcgcaacattaaagacgttgtatctctttatttctccatcatcaccaaataccggaagagcaaatcttgaatcatatgaataccaaccatatttagcatctttactatgcttctccttacgattatcttcataaacctcgttcgttgctattttaagcaattccggtaatccctgtgcggcattcgcttttgctttcgcatttgctcctttcaaaatccgagtataatttgagtgcgtatactcatcaggaagatccgatccaatataaatcatcttattgcaatcttctatctgatagaactctccaacatactggcgtaaatacttttcaacttcatcccaattaactgctctttttcccttgaacagaatatcgtgaataaatactgttttctttccgttcaaatcttcgataacatttacttttctctccaagttaacctcctaaacatttacgcattataacgcattgcgttatgcttattgcaaaaaaatatacagaggataccttttaattatcttcacttttgattcgacgctctatttccgctctgtatttcaacaatcgcagtaaataatccggaagttctcttttctctgcttcccaatcttgaacagtacgatacggaataccatagtaatcactaaattcacgtctgttcattcccattttttctcttaattcttttacttcttttcctctactcatgataaaactctcccaccaaaataacgcattgcgttatttaatagtatccgatatatgctatgttgtcaatccactatattatcacctcacatcatatttttcgcccatatgtttttataaaatagaaaagacaggctcaaactccttgattttcaaggaattttcacctgtctttcttcataagcacatccaatagcaggtttcctcccactgcttattgttttccctaattgatgcaggaatcttacttgattttgcttgattcggttaaataacgccatattctttcaaaagtttttcaacatctgtgttttcgataaaccctaaggcctttttaatcgctattttttctttcaatcccagcttcatctgtgtcaaagcttctccatcacgaagctttacggtagcatttagcagatctcttacatcgtaagtactgccccagacttccggcacaccacgatccacatctaaaagtgtatacaccgcttccatgccggttctcatagaatattctgtggtaaaaatagtatctctggctgtttctgcaaactgaccgataaaggcaaaattcactgccccgtcaggaaccaccttcggacgatctgtatcatttctgggcatgaagaatgcgtcaatataaggcatcataaccggaactgtattggcactgttctctgcaagttcttcaatctgattttccggcacaccgatatgatacagccattccatacagatttcttttcctgtacagtctcgcatcggttttttaatataatcaccaggtctgtcattaaagagtgcatatacccatacaaggcaatgatctttcggctgagttctaaactgtggctgacgattgatggtccagctcaggagccagctggaatctttaactgttacaatgcctccggttaccacttttccggtgaaaggatctcttttacagatattcttaatgtacggaataatacgctgatcaagcgtttccacagtagcactcatccagttacacagttcactgtcatagcagaatttatccgggtttccaaagtccggactctgggctgcaatacgcctccacatatcccatccaccgcccggcttgatttccgggtcatatggtgccggcgtattttgggatcccattgcagaattctccacacatccgccgttggtgataaaaacaagatcatcttctgtcagatcaacatagcgagtttcaccttctgttacaatttcaatccgtgtagcttgttttctatcgggttcaacatgaaattcaacattcaccactctggtattataatggaatgccacaccggctttttccagatatttcaccatcggaagaatcatactctcatactgattgtattttgtaaaacgaagcgctgtaaaatccggaagtcctccgatatgatgaatataacgcttgatataacgtttcatttccagggcactgtgccagttttcaaaagcaaacatcgttctccaatagagccagaagtttgaatcaaatacttcatcatcaaagaattcatcaatacgcttatcatataaatcttcatccggagtaaagaacagcttcataatctccatttgggctttgtcagaaactgcaaatttcttgtctgtatgtgcatcttctccacagtttacagtggcacggcaaagtgaataattaggatcctccttgttcagccagtaatactcatccaaaacactgactccctctgtttcgatcgatgggatggaccggaaaagatcccacataacttcaaaatggttgtccatttctcgtccgccacgcatcacatatcccacgcctggatattcaaatccatcacacgcgccacctggaataggatccttttcaaaaatatgaatatgctcccctttcatctgtccatcacgaacaagatagcatgcggctgaaagtgctgcaaggcctgtgccaataatataagcagacttgtgatccacaccttccggttttttcggacgagcaaatgcctcataattaccacttgaataatacataatcatacctcctaaagctttgacgactttatgtttgttagttatgccctgattatatgttagtggtcattctcctgcaatcaacaaaacaaccgtgccatcgaattcttcaacagtaaagctgcattgttgtttttttcaacaaaaacagcaacttgttggaatctcaatctatgcggcacttctccaacatacgtaccacatccccttcaataagtgcactgattcgtgcaaccagttgttccggtgatgtcttcatatcattccgtatccagtccagaattattcctacaaaagcaaatttataaaaatctgcaatgaatttcttatcttcttcccgaacactcatgccttctgcgcattcttcaactacatccttgatcagtcgataaacaactctatataaatattgtgtgatttgctcctggcttacatagtgatatacatttaatataaaaggcttattttcttcaattgcataaaaaatattcaagaagccttgttcccatgtatcatatgttgtgtttccatccgctgctctttttgaatcttcttcacaggaccattccaccagatcataaatatctttgaaatgataatagaaggttgcacgattaacgccacagtcttcggtaatatcattgatcgtgatcttattaaccggtttttttataagcatcctcttaagtgattcttctaacgctctttttgtaaactctgccacgtatcattcctacctttctataataagacacaggcagcgtatatactgtctgttccttgctaaaaataccccgctggtcttccaacggggtatcattgattacttcttcgtgattcaagagttattcttctgctgaaaactgatcttttccaacagaacataatggacattcaaaatcgtctggaacatcttcccacttggttcccggtgcaataccgccttccggataacctttctcctcatcatattcccatccacaaacatcacaaatgtatttcattgtcagttcctcccttataatatttataatcatgttacttttcaggaatgattcttatttattattatatacaatttgaaataaaagtcaatgcaaaaataggaatcatttctgttttatcgtattccatatctttttgcaaggatcttttgcggtgtaatccacaccctaaaacgaaaatgcattttttcaaagtttgaacttaggatccacatatccatcctgactcatcaggctttcaagtgcctttgcctttgctttgatttcgattgatgcaaatttatagatctcatctattttatcgtttactgcaataagaagctgttttaaggcatcaagaatctctttctcagtctcactcacaatgtcttctccgatgcctgcgtccaggtactccagatatgcagacgtcagctgtaatgtttccggaatataataatcataaaactgatccagatctgtctgatacactccttcaaactttgtaactgcatcctgcagaactggcagtcttaaaatcagttcctcatataatccttttatttcctccggcagctcacagtgcagtaaaagcctggcggcttctgtatacccctgtaatgtccgctgtcccatcttctgttcaaaagctgcagtatcaagcgctggcctggatggtgccactgtttgttcttttgctgccacatgatcctgtctatctttcataacaaagtcaccgccactgattacagactctacagatctgtcaaaatcaatgtcatcaaatgacacttccatatcctcagaatcgtctggtacagagaaatctgttgcaccttcggaatcggcatgaacattggtaattttagtctgtgcagatacgatccatgcctcttttacattgatccaaaattgtttttctatcatccctgttcaccattataatctatcccatataatgcactcatacaataaacagaatgcgggcaaaattcgcagtttcttgatccggtctgctgcccacggtcataaaaaatccccctgcgtccctcctgactcatcagcatagccgcatttttcctggcctgttcataaattctttcatccaggaatgtaagattcaaacggtaatttgtataatttttacccttatatggagtgtaagcatcatccggttccataaccggccaccttgcagcatcatccctcatctgacgcttttctgctttcctgatgtttggaaatatttcaaaaacctgcccggcaatctgctcgatggtatactttcccttcagcagcttactaaatatctgaatcagccggacaatcgccctgttctgctgatattcacttctgtaagcggagctgtctccaagcacgtattcatatacaaaacgcatcggacataacgagtaaaccaatttcgcatcatgctcatacattttttcattatctcgaatatcaaaggaacaatccagatgcttatgcggataaataccggctacatatggcagctcctgtaaacgggcatctgttccccggatttgtgtatcactcaatttatcaagtaatgtaatgtatggcgacggcgagtatagcttttcgccctgtttttgtatccatgaaatttccacatctttatttttaagtgcagtgtataagtaatatcgatttgacaatggggtcaacctgttatttttaatccaattgttaagataagtattcttattacactcagcaattgttaaaagtacgtcctcatccagcggccaaccatactttccggctgcaccgggcagtctggaaatatctgccaggcatatatgcactttctcttttgcagcaatcggtgccgcttcaacctgaaaaatattaaacacaagcgtctgaagtcctgctcggctctgttcttcatcatctgtcctgccgcccatgaaagacagcagtgctgctgccagatcccccgggtagcacagaaaatccctgaccttctcactttccaatgcttcaaatatttgttttaccttttcacgttcttccaggtatagttccttaggcatacctttgtgcatataaagcataccatccagtttattcatatgttcatgtatagaaaccggctcatttcctccaaataaagcctcagccatccttatcagctggtcaataatatccatcacttctgcaatgtggctttcatttatggaaaatgcgctaaatacggacatgttttgaaattattttttacaaaatacaattttgttctttaaggtaaaaaataagcctcaagatactttttaatcattttggagctccaactctttaaatttgattgattaagaagtctcttcaaacttactacaccaataacaaaatggagagttcagctcaatccaaggctacactctccattttgcttaatacatatagctatttttcacacttaatattcatatttttacttttatctaatcacctgctgtccgcttgcgctataaagttcaaaccattcagactgttccagttttacatccaatgctttaattgccaaatcaagtctgtctaatttctgacttcctaccaacggaattgcgcctaccggatgatacatgatccaggcatatacaataaccgccggctccacgccatgtcttgctgcaatatcttcaatcttctttctggcctttacacattcctcatcagtaccgctgaaaagacgtccacctgccaatggtgaccaaatcattggatgaatcttatgataagtcagataatccatcataccagtattaaagtgctcaaaacaaaccggattccattcaatctgattcgttaccagctgaccacctacagcaccattcatagcttcgaatttgtatggatcaaaatttgatacaccaatttctctgaccagtccttcttttttcaactgaagcaacgcttctgctgtatcccatggatcaagaagtgggtcttctctatggataagataaagatccaaatgatctgtatgcaatttctgcaggctttccttgcaagactgaagcactctttcttttgtggtattataataaccaaatgtagcaccatctacttccgttaaatatattcctgtctttgaaacaagctcaatttcttttaaaatagatggatccgctgcaaatgcttctcccattttcgcttctgcaccaccataaatctcagctgtatcaaatgtggtaactccacgttcaatacatgcatgcataaatgctaccatttcctttgtagtcatattccagctgtctgcacgccagaacccctgtactactgctgataatgatattccttctgaaagctgtacttttttcatattacttagtctcctttattgtaataatattctagtattattttgcgttctttctcatatccaatgcaactgctgaacagatgataatacctttgataacaagctgccagttcgaattcagtccaataaaacttaatccatagctgataaaggtaaaaatcataacgccaataaatgccccggatactttaccgataccaccgcttaaagatacacctccaactacacaagatgaaattgcatcgaattcataagcatttccataacctgcattcgctccaccggttcttgcaacttccagtatacctgcaagtccaaccagaatgctttctattataaaacaggcgatgattactttgtcaacattaataccagagaccttggctgcttctttatttccaccggtaatataaatattctttccaaatgtagttctgttcaggataaaccatacaattgccattactaccaacgcaatcactaccaaaaagcttacctgaccaccaatgcggaaacggcttaaaattgtcagatcatctctgataccgccaatcggctgagaattattcggttcctttgcaaaataaagctggtttaatccatacaccgctgatgccattccataagttgcaataaatggagccatacgaagtttacagatcattagtccattaatataaccaatcaatgctaccactgccaaagtcactaatatcggcacaaaaataggcagttccggaagtccaggccaaaatactttagaatatccggctttctgtgtaagggaagctatcacaacagcggccaaaccaacctgacgcccacctgcaagatcggtacctcctaataaaagtgggaacatcaatcctaatgcacaaatcagttttacagcagactgcgtcataatatccgttactactcgccattgaagaaaagatggctcaataataataattccaataatagtgattaacaatgcaattatcaatgcgttatcaataatataatcttttatactctttttttccactgcactcttattcatcttaatccaccgcctttgccttattttcgctctgcgttgccaatgtcataacatctacctgttctgtctctgctgcatcaagaacacctgttaattttccttcacacattactataatcctgtccgatacaccaagtaattcaggcatttcagaggacaccataataatggattttccttcttttgtaagttcacgcataattctatatatttcatacttagcgccaacgtcaattcctcttgtaggttcatccagaatcaaaatatcactatttgccaatagccaacggcaaattaatactttctgctggtttccacctgaaagattctgtatttcagttttcatactgggagtttttacattcaactcaccattgattttctcaacatttttcagtaattttttcggattcaatattccaaaacgatttcctgacattgctttaaatgcaacggcaagcgtattatctaacacagacagcatcggaataattcctgttgctcttcgttcctctgtcagcatcgcaaaaccattttttattgcttcccgcggattgctgtttacaatttcctttccgtttttataaagttttccctctataatctttctaagaccaaatacagattctactaattccgttctctgtgccccaactaaaccgccaataccaagaatttctcctttatgaagatcaaatgacacatttttaaatgagtgtggatctgcactggtaaaattttctactttaagaagaatatcaggctgtactacatgttcatttggtggaaaacgattttccatacttcttccaaccatcaatttaatcaattcatccacactgatatcttcaattgggtaatgtcccacataagttccatctcgcataaccgtaatttcatctgcaatttcgaataattcttccagcttatgcgaaatataaataattgaacgaccttcagaccgcagtcttcgaataatcttaaacagatgtttcgtctctgcattcgtaagtgaagaggtcggttcatccataataataattcttgcgtcataagaaacagccttagctatttcaaccgcctgtaactgtgaaacggacaaatcttttgccagcactgtagccggtatattcaactccaaatcagccagcagatcttctgttttctttttcatttttgcttcatcaacaacaatcccttttttctcaaaacgtcctgcccatatattatcaataacatttctatatggaataggagtaagctcttgctgaatcatggaaatcccctgttttaaagcttccgttggtccatcaatcgttactttttctccatctaattcaatacttccttcatctgcatgatataaaccgaataaacacttcattaatgttgattttccggctccattttctccaattaacgcatgtacagaacctggctttacatttagctgtaccctatccagggcctttaccccaggaaatgtttttgtgatatcggtcatctttaaacgcagcgtttccataatccaccctcccaaggtatcttattttttctgaaaggggcagagaggtcatacatatacgcacccctctgccattttcattctcatcgaaatcacataataattacaaacatcaattattctgaaatagacttcataagttctattgtgtcatcaagatttgtttcatcaacaattacatatggtacccaaacatattttccatctactgtacaatcaacgccaaggtcttccgctgtgaaatcttccccttttgcaacagccttcagaacattcataattgcaatggactggctcttgcggtcatttaatacagtgccaagtaatccgccatctttcattgcttcaagtgcatccatatttgcatcaatacctacaattggcacaaatttatctttctcgccctgattataaccattatttaaagcggcctgaagtgcacccatagccattccgtcattattacaaagaacaccttcgattccatcaattccataagcagtaatccatgtgttcattttgtccaatgcctgtgcctgatcccagttggcggtgtcctctgcaagaacctcatactcaatacctgctgcttcaagtgtatctttataagcctgtgttcttaatactacatcctgctggccaagttcaccctgaagaatacaaagctgaagttttccatcaccatttttatcagcaatttctttattctcattccagtaatttatcagagcctgtgcacacatagcacctgattctgaagcttctgctcctacataccaaatgttatcatattcttccatagtttcatccattggctgcatattaaagaaaaccgatggtacattctccgcatcacatttctgtgccatttcagcagtagattcacggtctggtgcgcaaattgcaacaatatctgttccctttgttaatgccatatccagcttgttgtttgccacagatacctgattttcagcatcctgcatatccagtttgattccgctagtattttcttcttcattttccataataattcggaatccactctggaactgatcatcaaacgctctccaaattacagttgcatttacatcatcttccgcataaacagatactccgctgcttaccatcattgacactgctacaattgctgcacccatcatttttcttctgttcatttaattttcctcctgaattttttgttgtatattcccaatacatttttacattttatatattttattttgcctctaaacggaactgcatcattttttctttaataaatgctttgcagctttcttttgaatttataaacatggttgtattatatttaaaagcatctccctgctctttcttcatctcttcaaaagaatttgcaactgataccagcacatctgttgctacattaatcttgcgaataccatgtcgaatcgcatcctgtacctgatccagtggtgttccagatcctccatgtaataccagcggaacatcaaccagttcgtcaattttagccagtctttcaatatttaactgaggagctgcaatataatgtccatgctgtgttccaatgctaactgcaagtgcatcaatacctgtacgctctacaaattcctttgcttcttccggaacggtctgtgctgcttctggtccaagtacctttaagtctccctcttcaccaaccagacgtcccaactcaccttccactgtgattccaagcggatgcgccagatcaacaaccttcttagtcagtgcaatattttcttcaaatggaagacctgaaccgtcaatcataacagaagaatatccggcattgattgccttagcacagtcctcataagatttgaaatgatctgcatgaaggcataccggaatctgagcatcacgtgctgcaaattttaccatgtttaccataccttcataaccacctgccagttctacacagtctgtacctgtaatgaagataaccggtgtaccggtttcgtttccagcttcaatggcagctcttgccatttcataagaaacagttacataggcaccgtatgccacatttctttcttctgcaagtttcaggatttctttcattggtgcaaatttcatattgtttttcctcctacacttcaatgttattttttattttgaatgatgtgatacatcaaacatttacacatttgttttccgcttaaaaatatctattgcttcctcataaggtgggatacctcccgtagcacctttcttaccaacattcagacttcctatcagtgaaccaaatcttgctgcttcgaaaaatgtttttccatgagacaaagcacaaatcaatcctgccataaaagaatcaccagctcctgaagtgtccacaacaggcatatctttaaagcagggtatatactgctcttctttgaaatctgtaacataacagccttttccaccaagcttaattcccagataccgaataccactgtctgaaaacttttctcgaatctgatctatctgatccgtcccggcaataaacgatgcttctatcatgctcggaaaaaaaatatcggtttctctgaaaatcggaggtaatactttatcccagtcacatacttcactgtcattcattgccgcatccataacagtaagcttcttataacgatgggcccgtttaaacaggtcggaaatcccaccattatccatccgattcattgccattacagatcctacataaaccaaatccgctttctgaattaattcatccgatatctcgtcagccccaaactggtgaaaagcggacacttccgataagaaatgccgttccccttccgcatctacaagcgcatatgaacatgcagtagaacaattgtcatctttgataataccctctgtatgcactccatagtggctacattgttccaccagaaaagccccattggaatctgctcctacctttcctgccattgtaacatcgcaggataacttggcgaggccaattgccgtattcaaggcatccccaccgcaagataatatgggtggctcaatcattaccgagtctctgctgagcacatcatccggtaccgggctaattacggtatcacataccatcattccaacacaaagtattttcattcttgtgacctgcccttcattaatttcaggttgctttgtttttgtatgtattttgtttgttcgtacattcgaactttatgtttataatatatcagtttgtacggtcattgtcaattctaatttcactgtattatttcataatttttcttgtttaaaattgttaaaaatcacgtataacaactaattgacacaatgttattcgtaatgtatcatatagccatacaatattattccgttttgtacgtacaataaacgctactactatattctttgtttttgttcgtacaatttaatcattaattctataggagattaattatgagtttattagaaatgaaaattgataaaacagttccggttccgctccattatcaactaaaatccctgattctatcagaaattgaaagcggaaatcttaaaataggagattgcctgccaactgagatgcaaatggcagaacactttcagatcagccgttccactgtacgccaggcaatttctgctttgtctaacgaaggctggctggcgcgtgtcgccagcaaaggcacttttgtcacaaacaatactcacccttccgagaacttaatccgttcttttgagcctttttaccaacaggtaaacagacataacaaaacaccttctacagaactaattagccttcaggtaattccggcaagcgaaatgcttgcaaaaaaattaggcattgagccaggagaaaagatgatttccatgtttcgtcgtcgcctttcagacaatgtacctatggttaccattcagaactacttaccttattctctttgttcttttatcctaagtgaagattttactgtacgttccttatatgaactgcttatgacacggtcagaatcttgtatccatgaaacgaaatcgattgtttctgcaacaaatgcttctgcagaagacattcatctgttacagattgatgccactactcctatcttaagttttcataacatatcgaagagatcagatggcacaattcttgattatgcttttgcaagatatcgcggtgatttgaacaaattcgagctaattgatacaccacatcttcattcaaattaaatgctatcaaggtcacaatgtcattcagttaaggtattttccagtggtttcatcacagtggtttcatcattatgaagccactgttttttattaccggaaatttatagtattctttcacttgttccagtgacagcacatccacctgggattgctcttttaacagtttcattatctctttattcctataatggttaatgccagagccccgctaaccttaactgctacagcactcgtcctgttcatttgcttccattttatatcaacggagcttcccatatccacaggacattagtcttgactttcttacccgcgcatcgtattatttaatacagttcaaataaatactatatgcagtaaggaggtgcagcatatatgcgttcctcagcattcataactttttttcacgatgcattaaacgcttacaataaaatgtgcgaacctattcttcacgaatttgatattccacaggtatcttttgatattttgatgtttctgaataataatccggatttatgcacggctcagcaaataagtgaatttcggaacataaaaaagaacttagtatctgtccatgttgagaaactggtaactgccggttatctgcaacggggaactgtagccggagacaggcgcaaagttctgctctcctgcacggaaaaagcccagccaattctcaaggccggcctggaaatgcagcaagattttaaccagaagcttaccctggatatcccccaaaaatatatgaatattttcaaggaaatcaccgactctatggccgtgaacgctcgccagatgctcaatgaataatgttaaaagaatacttctaaatgaataacacaaaacacaaaaaggagatattgcccatgcaaaataataaaaattttctaggtacagaacctattggaaagcttcttctcaaactgtctattcccacagtaattgcccaacttatcaatatgctttataacatcgtcgaccgaatctatatcggacacatccctggtgatggcagtctggctcttaccggtgtaggcgtctgtatgccaatcattatgatcgtatctgcttttgctgccctggtcagctccggcggtgcaccaagagcatctatttacatgggaaaacaggacaaccaatcagcggagaaaatattaggcagttgcttctttctccagattatcgtttcaattattctgactgccgctttactgttatggggcaaagatatattgctggcctttggtgccagtgaaaataccatcagctatgcatccaattacatgcgtatctatgccttcggtacactgtttgttcagctgactcttggtatgaatgcctttattactgctcagggattcacaactatttctatggtttctgttctgatcggtgctatttgcaatattgttttagatcctgtatttatctttgcctttcacatgggggtaaaaggtgcagccctggcaactgtaatatcacaggcgatttccacgctttggatcatcttgtttctttgtggtaaaaagacacagctccatcttagaaaaaaatacatgcgccttacgccaaaagtcattatcccttgtgttgcacttggacttgctcctttcattatgcaggcaagcgaaagtgttgtaaccgtttgttttaattcatccctgctccgttatggaggcgatattgccgtgggagcaatgacgatcttaaccagcgttatgcaatttgctatgcttcctcttcagggaatcgcacaaggagcacagcctatttccagttacaattacggagcaaaaaatgcagacagggtaaagaaaactttccgtttactgttgattacctgttccgcatatgctgcattactctgggcatccgtacagcttgccccaagattatttgtaagtatttttactgctgatgcaagtcttattgattttactgcaccaatgttaaagatctatctgggttcgctgttcctgtttggtatccagattgcgtgccagatgacatttacctcacttggtaaagcagtctgctctattattgttgccgttgtccgcaaatttgtactattgcttccgcttatctatatcatgcctcatgttgtatccaatccaactgcaggcgtatatatggccgagcctattgctgatctgatcgcagtaacctttacatctgttttatttgcaggtcagttcaaaaaaacacttgcagaaattcagaattaagcgctataaaaataataacctgattgccatagtaaactacttggcagtcaggttatcaacacatcccaaatctatcatataaatccattaaggattgtaagtaatgctccaactattttcgtatcgtacatcaatcggataaaatatattccatctgtctttcttttgttttcattcccattttttcataaaatttttctgctgaagtatttcctgcccatacatttaatgtcacttcatagcagcccaaccgcttcgcttcgttttttacatagttaaacagactttctccgatatgctgacctcgctcctgtcgatcaacacatagatcatcaataaaaagagacttaaacggcaccatattgtttgaaaatggctgttcccgtagttggcaaaatgcataacctacacaaacatctgccttgttcactgcaacatagattggattctctttgtttttcaaaagctctttcaattcgtctaccgtatattttgttgtgcctggaatgaaaatatcaggccttatgtctgcatgaatttgtaacacctgtcccagtaattcaataatccttggaatgtctctttcttctgcttttctgatcatcatttttgtctccttcatttcaagaatgcctcggcattcttgctgcgaggtgcgcgtcatgcaattgcatgacatacttctcctgc

SEQ ID NO: 126 - DNA, 8809 bp, Unknown
  gut microbiota DNA sequence
ttttctatattttaacggcgacactccgtatgcttttttgaaacttctgataaaatagcttacattctgataaccactttgcatggctgcctctgtaacagaaatatcagtgtcttgcagcagctgttttgcatgctctaatcgtaaatatgtcacatattgtgaaagggtaatatgaaaatgttccttaaaataccgggatatatatttttctgaaagatgaaactgtgccccaaattcccttaacaatatcttccctgtaaaattctgctgtatatacgaaaccatctctttttctatagtatttctgccgctggtatcatttttaactataaatccctgtttccacatttcaaggataatttgtaaaagaactatttttgttttgatctgagcagttatttttgactgactttcatcattttctgtcacatatatctcaattaactgctggcatagttcttttaccgtatctttcacttttggagttatcatcagatgaccgctgtttaatggctcaagcaatcgcttatctaacatgtcatctgtacgaaaggatatatattttaacggaaaaagaaaagtaaaataatccacagcaccagcctgtgaacccataaaatgcagattgcccggtgacactacaaaggcatccccaggttttcctatatagttctcacctgatatacttacagtcagaaggccactttttacatatacaatttcaaattcatcatgccaatgcaccggtacctgaaatgacctgcccccattcctcatatgatatatactaaacggatcgtcctttgtaccatgtggtttgttttcctttaattcaaagtacataatctctcctaaggttatacaagactcttacttttccattttccactcttccatctaagtaccattccaacggctctggcgcattcatctgctgccatggcaatataggatcctaccgccagaagtcccatatgtattccgagaaagtatgtcccgccaacagcaaacagatacataaagattgcccccattataacaggaaaaagtgcatctccgctggtttttaacgcctgtccgtatacaagatttgtcacccttccaaattcaaggaatatatctactattaacaattttaccacaagatttatcatttgtgtatcatttgtaaataaatgcactataaaatgtccggacagtgcaaatgtgacagaaaagcaggcggctgttacaagaccatagaacacagcttttctcgtacccctgtcacagtcttcaaactcctttgctccaattctccagccggtcataatcgcatttgcctgtgcaagtgcagcacctacacaatacgaaaagtttgaaatctgcagagtatatgaacgagctgtaacattcattccattgacatccatctgattcataaaacgcacgatgaatgtcagtgccacattataaagtgctgtttcaaaagcagaaggaaaacctatcttaacaatctgcgcaagtatccttcgtggtgcaatacgctgaggattctgctttgcttttataagtacagctcccataatcgctacaataataagattgacaacccttgaaataactgtggcaacagcaactcccataactccccagttaaatataaacaagaataccgagttcagtattaaattaagaacatttccaacaatagttcctattaatgaatgctttgtatatccaaacactctcaaatagctggcaaaaataggaataagtgcatttaaaaaacatgcacctccaacaattttaaggtatgtttctgccggctcaagcaaagtcggggcaatacttacgattctaagtatattgccagaaaaagcagcaagaacaatagacatcaggatacctatcactgcattaaatatcagtccaagctgtctggcctgatatgcgatcccaggtcgtcctgctccaatattttgtgacataacagctatcatacccgatgatattactccaaacataatgataaaaacgcctatatatgtatttgctgttcccactgctcccaccgcctgatcactgacagacgataacataagtgtatccaccataccagaaagcatatataacaaagtttccaagcatatcggtatagataattgcgttagtgtttttctttcaactgccatatttttctcctcacatactatccccaaaatcattctcccacccttgtgcaagcacaggtggaatcagcccttttaacactgtaatcatcttatcaataatacgatatattatcatgtatttcttgtataatatcctgcaaaaattgcactatttctacttttaaataaataaactgtaaaaattaccaatcgtatttctgtttcctgcgctttcagctccatcaggcgtgggcaaaaaatttgcatacctgtcaaggttctttcttcattcgcagtgttgcattgttaaatttgtccagtatacattggtttaacttcagtgtttttggttgttttttctaaaaatatgtatgtttttcattgacgttctcggcattttatgttagcatgagggtaattaaagacatcggatgacgaaactgggagagacacagaaatgtgcgccgaaggggctgaagaactctcaggcaaacggaccagtttccgacgaacctctggaaagcaacagcaaagttgcaccgaagaagcaaccgatcacaagtttcgggtaatctttcaggttaagatgacagagcgcagaacaagtatctatttgttctgcgctttttgtttgtcattctgatgtgagataaggaggaatcacctatggaaaaaacaacaccgctctatgccacccatcaggcacacggaggcaagatcgttccctttgccggatatcttcttcctgtccagtaccagactggtgtgatcgcagagcatatggcagttcgggaatcctgtggtctcttcgatgtatcccatatgggagaaattctttgcgaaggtcccggggcactaaagctgctgaatcatctgctgaccaacgatttcacaaatatgtacgacggccaggcaagatacagtctcatgtgctatgaaaacggctgctgcgtagatgatctgatcgtttataaggtccgggatgagcgttattttatcgtagtaaacgctgccaacaaagataaggactttacatggatgaaagctcatgagcaggatgttgaaggagccacattcacagacatttcccactctgttgcccagatcgctgtacaaggtccaaaagcccatgagatcctggcaaagcttcttccggaagacgaatttccggtaaaatactatagtgcctgctttgaccgtaccatcggcggtatgcactgcatagtctccaagaccggttataccggttccgcaggatacgagctttatcttgatgctgagaatgctgcagccatgtgggagcttctgctggaaacaggaaaagaagaaggtctgacctgctgcggacttggagcccgggacacactgcgtctggaagccggaatgcctttatatggacatgaaatgaatgagaccatcactcctctggaaagcggccttggcttctgcgtaaagttttccaaagaagagtttatcggcaaagaagccctggaggcaagcaagcctgcacgaacacgcataggactgaaaattaccggtcgcggcattgtcagagaacacatgcctgtcttctccggtgatataaaggttggcatgaccacttccggcacccatgccccctatcttggatatcctattgccatggcgctggtagacaaggcatacgcagctgtgggaaccaagcttaccgctgatgtacgcggcagaaaagttgagatggaagttgtctctcttccattctattcaaaaaccaaaaaataaatttcatataataataaaattacggaggatttctattatgaactgtccagaaacattacgttattccaaatcacatgaatgggttaaaaaagaaggcgatatcactttgatcggtcttactgactttgcacagagcgagcttggtgatctggtatttgtcaatctgccggagatcgatgataccgttactgccggagatgctttaggtgatgtagagtctgtcaaagctgtatccgatattttctccccggtatccggaactgtctgcgaaatcaatgaagagcttctggatcacccggaactgatcaacgaagcgccttatgatgcatggctcatcaaggtaaaagatatcactgatgaagaagagctgatcagtgctgctgagtatgaagctcactgtcagtcagaaagtaacggctgatctgccggaatttatctacaggaggtaactgtcatgggttcttacatacctagcaccagagaagaacgactggatatgctgcactccatcgggatgcattctttcgatgaactgtatgtggatattcctgagtctcttcgtttaaaagacggactgtctttaccggtcggcctgtctgaaatggaagtagccaggaaaatggaggaaatctcagagaaaaacacacgtttttctcatattttccgaggcgccggatcctatcagcactatattccggccatcgtgaaacaagtcacttcaaaagaagaatttgtcactgcatataccccttatcaggcagagatcagccagggattgctgcagtcgatttttgaatatcagaccatgatctgtgaactaacaggaatggatgtttccaatgcatctgtttatgacggtgcaaccgctgccgcagaggctgccgccatgtgtcgtgaccgaaaacgaggaactgtctgtgtcagtgcttccgtggatcccaaaaccttatctgtgatccgtacctactgctttggttctggagccccccttgtgatccttcccgaaaaagatggtcttacagatttggaaagctggaacgctatggatacttcctccatcgcctgtctgatcattcagaccccaaactatcatggattgatcgaagatggagctgccattgcgaatgctgtacacaattccggtgccaaactgatcgccagctgcaaccccattgcccttggtcttcttgaaactccaggagaatttggtgccgatgtagctgtaggtgaaggccagccattgggacttcctataggatttggtggaccttatcttggattcatggcttctaccaaagacatgatgagaaagcttcctggccggatcgtaggtcagaccaccgatgtggatggcaaacgggcttatgtccttactcttcaggcacgtgagcagcacatccgccgagagaaagcaagctccaatatctgttccaacgaagcactttgtgctatgaccgccacagtctatctgtcggctatgggtagtgccggacttgaaaaagtggctgcttcctgtatggccaatgcccgctatctgctggatgaattgactgccctgggatttaccaggaaatataccggtgaattttttcatgaatttgtaaccacctgtccctgtgatgcagctgttctctctgaaaagctggctgcacacggatatttatcaggacttgtgaccggacagtctgaaatgctctggtgcaccactgaaatgaatacaaaatctgagatcgatagtcttattgctgtgataaaggaggtgcttgcatgaaacttatatttgaaatgggggcacccggaagaggctgcgacctgatcccgccctgcacgacccctgaagtaactatcaaagtaccaatgcgtaaaaaagcactgcatctcccggaggtatctgagacagaactcagccgtcactatacggatctggcaaaacagacacatggagttaatgatggtttttatcctcttggctcctgtaccatgaaatacaatccgaagatcaacgatgctgcctctcttctccctggatttaccaacattcatcctttgcaggataccaaggatgtgcagggatgtctggaagtactctcttccattgaagaagcattatgtgagatcaccggaatgcaggcatgtactcttcagcctgcagcaggtgctcacggtgaatttaccggtctccttctgatcaaagcatggcatgaaagccatggtgacagcaaacgtacaaagatcattgttccggattctgcccatggcaccaatcctgccagtacagctatggctgacttcgatgtgatcaatatcccgtctgatgagcatgggtgtgtagatttggaagcattaaaagccgctgtaggtgatgacactgccggcctgatgctcacgaatccaaatacagttggtctgtttgatccaaatattgcagagatcacccggatcgttcatgatgccggcggattatgctattacgatggagcaaacttaaatgcagttatgggcattacccgtcctggcgacatgggctttgatgtaatgcatctgaatctgcataaaacattttccacccctcacggtggaggcgggcctggaagcggaccagttgcctgcaaagattttctgacgccattccttcctggacttcgcattaacaaacagacagacggtactttcacagccaagactgctgcccatgccattggaaatgtacgcagcttctcttccaatttcctggttgtggtccgtgctttctgctatatcctgactcttggccgtgaaggtattccggaagcagccactactgcagtgctgaatgccaactatatgatgcacaagctgaccggccactacaggatggcatacgatcacacctgcatgcatgagtttgtcatgacattagaacaggaaaagcatgagcggaatgtttcagcccttgatattgccaaggcattgctggatcacggtatccatccgcccactatgtacttcccgctgatcgtccatgaagcgttgatgatcgagcctactgagacagaaagccgtgaaacattggatgaagcagtacagatcttcctggatgtactagcagagtcccaggcccatccggaaaaaatgcatgaatatccatttgaaacacctgtccgcaggttggacgaagtcggtgccgcacgaaaacctgtggtacgttatatcagctgggagatgactcccacctctataaggtgagaaacaagctagtatcagtggtgggagtcaatcccccagctgatatagcctccggcaggattgcagaggtgcgcagtagaagtatgtcatgcaattgcatgacgcgcacctcgcagcaagaatgccgaggcattcttgaattataatcccgaataatatcgaactaatctctagcaggaggaatccacgatgatacagactctgaccacatacgaaagcatgactaccgatccttatacaaatcttgcagtggaagaatatctgacctttcacgcagaaccgggagaatgcattttatacttatggcaaaatgcacatacggttgtgatcgggcgaaatcagaattgctggaaggagtgccgtgtatcagaactggaagcagacggcggccatctggtccgccgcctctccggtgggggagccgtctaccatgatctgggaaatctgaattttactttctgtatgcgcaaaaaagatgcagatgtagaccgtcagcttcaggtgatcatagaagcagttgcttcctttggactgactgctgagaagaccggtcgaaatgatgtggccatcaacggacagaagttttccggaaatgcattttttgactccaagggatgttattaccatcatggaacactgctgctgaatgtagatacagcttccatgtcccgttttttgaatccttccaaagcaaaattgcagtcaaaaggtgtaagctccgtccgctccagagtagtaaatctgtcttccctttgtcctcacatcaccgtggacaccatgaaacaggctatgtttaccgcattttccaaagtatatggattacctgctgtacctttgtgtgcagatcggctggagcagactgccatttgcaaaggcagagaacgtttctcctcggatcgctggaaatacggaccaaagattccattcactaatcggctggaacaacgtttttcatggggtgaggttaatcttgatcttcatgtaaacgaaggaatgatcaccgaagcactgctttcttctgattccatggagacagactggttttctgatatcggtacggaatttcagggtctcccttatcgtactgatgtactttgcaaagcattagaccgatctctggaacaacatatggttcctgaaaatgtccgttctgacttaagtcggatggtacaagaacaaatctaatgaaaaggagagaatttatccatggcagaaatgacaacaaccatctatgacctgactgtcatcggtgccggcccaggcggatatgaagcagctctggaagcagcaaagcttgggcttcgcactgctctgattgaaaaggattctctgggaggaacctgcctgaaccggggatgtatccctaccaaaacactgctccattcttcagaactctataaggaaatctgtaatgcagaacgttttggtgtctctgcagagcatgtccaggccgatcttatcaagattcagcagcataagcagacaacgatcacaactttgcaaaaaggaattgctgctcttttaaaagctgcaaaagttactatatatcaaggtctgggaacagtaatccataccggcactgatgcatctggcactgaagggatcaagcaggtacagatcacatccgatggagctgatcctgttatcattgagacacggcagattct

SEQ ID NO: 127 - DNA, 17192 bp, Unknown
  gut microbiota DNA sequence
cctctattccgccgattcccggacatgatctgcctggtgtaatgaccagtgatgaactgctctcctggaatcaggaaccattttcttctctgctgatcattggtggcggtgtgatcggtgtagaatttgccggaatctggcaggcacttggaaccaaagtcacgatcctggaagcacttccttctttgattgccaacatggacaaggagctggggcagagtctgaagcaatccctaaagaaaaaaggtgcagatatccataccggagccaaagtacagtctctggaatctacggatgagggcctcttatgcacttacacggaaaaagatacggtctgcacttgcactgcacaggcggttttgatcgctaccggccgaaagccttatacagatgggctgttcgctgatggtcttgctccttccatggaacgtggccgtatcctgacagacgaacattttcagaccagccttcccggtatttatgccatcggcgatgtaaatggaaaactgcagctggcacatgctgccactgcacaaggagttcatgctgtccatcagattgcagcagcattatcaaatgatacatccagcagtgctgtctcacatataagtatccctgtccttgatcttgttccctcctgtatctatgctgctccggaaattgcttccataggtctcacactggatcaggcaaaagaacagggacttgtcgccaaaagtcataaaattttaagctctgccaatggaaaatccgtattatccctgcaggaacgcgggtttatgaaggtggtctatctggaagaaactcatgtgatcatcggtgcacagcttctttgcgccagagccactgatatgatcagtgaatttgctgttgccattgcccaaaagcttactctggaagaaatggcttctgtgatccgcccccatccttctttcagcgaaatgatcacccaggtcaccaccttataatgaattctcctgacagaaaccataagtatatcatgcaattgcatgacgtgcacctcgcagcaagaatgccgaggcattcttaaatttttgtaacgttttctcctgcttgtgacttaattatatagaaagacatcagataaaataactatacagcaagcaggaggagtcttatgaaacgatatttaggaatattcattctgacagttattgttggtttatccggttgtacatctgatacagacagtgatactcaggtgatcaatcatgatgattcagtgcagatgaagcaaaataaaagctatgttcagacatttaatggtcataaacagatcagagccacagatggacatatgtggacaccaccagaaggatcgcatcaggataaaaatggctatattctggatgcagacggagctgtaattggacaaacaggaccattagcgaaagatgcagttggataataaaaatacaaggagcaggaatggagaaatcagaaatcgaagcaatttaccggaaatattttcgtgatgtctttctctatatccgggcactttccgaaaatgaaagtctggcagaagaaattactcaggaaaccttcttgaaagcaatgaataatattgagaaatttgacggccggaaggatatccgtgcatggttatttgtaatagccaaaaatacatattttcgctattgcagacgaaacaaactctatgttaatgaagaattttcagaaatagtaggtgattccttactggatacaaccccggcagtattggatcaactcgtgcaagatgaaaccgttcaaagtcttaaacgctatgctgaattgatacctgcgccatacagagaagtatttcatctgcggatatacggtaatctctcctttgcacaaattggaaaatgctatcaaaaaaatgccggttgggcaagagtaacctaccaccgtgcacggcaaatgataagaatccagataaatcaggaggacaattaacatggagaagataaactgcaatgtgatccaggatattctgaccttatatattgaagatacagtaagcgaagacacaaaaaagcttgtagaggcacatctgcaaaactgtgaaatctgccgccaggtatatcaggagacaaagacggatcttgaaaatgatattaagatttctatgcagacaaaaaatagcaataataaagcaaatgacctgaaaagcttcaggaaatcgttcataaaaagaaagataaaaacaatcctgttttcgatagcagcaaccgtaattttctttgtgtcagtgttcatttttatgaataagcatatcacatatatcaactataaggaactcgggatcaccattattgcggataatgaagacgaagtaaaatataaaacaactataaaagggaattaccactggaagacatccttagacagcgaaacaggcataggaactatccattttgagcaaagtttatgggagaaatatatagatagtattttctattcatttgatcatattcatggcatcctgaagaaggatatgatagcggaaatgtatgtaaacaaagatggaactacagcaaccatctgggaagcttcagcggcagaaaagaaagcttatttctctgaaaaccatacagcaccgttgggctaatattcaggtctctttttatttaagccatagcccggcaatccaccgataattcctccaacaatatgcaccatcatactatcttgcccccgcttccaacaatgcctgttttagaccatcctcactcttggcaaattctgcttgtgcttctgcacggtgttttgcctcttcttcatggattttaaccacttcattaatggaggtaatgatatctgcatttaccttgcgaagagcctcaacatcaacattacctccttctgatgccaacgcagcatcaagggcctttgctgtatgttcaatgtccagcaccagtatcatctgatttctccaaagcggaatggtattaataacgttatcgcgaagcctgtctactacctattgatccgcattctgaagcagtctgatctgtggtgccatctgaatagatataagtctggttgtttccagatcaaaaactctcttttcaaaatgttgacatgcgtcctcgtagtctttacaaagctgaatatccaactgatcctgtgttaattctgctttgtttctaagttcagccagttttgtatttcttgcaatttcaagggctttcttccctgcaagaatatacattgtcagttctttatagcattccaaattcagatcatacatctgctcaaacacataaatatcttttgtcaaagtttgctgatgtctcttcagatctttttcaatctttttaataatcgtctcagcactttcataatttgcgatcacatatgcagctttctgttttcccttcctaaaaagaccaagtaatccttttttctgtggtacagccgtactgttaattgccacttgaagttcacgtaggcagtcacccacttcaccgaattcttttgtctttacagttcccatcattgacgaagaaaaagccgaaatgcccttctgtgctgcagtgccataagaattgaccattttaatattcaaaatatcaatctttttggcaaatgcatccacccgctgcttttcttcgtctgacaatatagattcatcaacagctcctgccttctgccccatcgtagccgttatttctcttgtatcactcatgtttttccctccggataaagtccgcaaatcataaaaacattctcgcatttgcattttttgtatgattgctgttatgatctacaggtgtgcctcttgaagtatttataataaacgcggatggtttccacatgccaacatcttcatctgtacctgcattgcagaactcagattcaatatcatcatatactgtaacatcagaagatacaatgaaaaatccagctttccatcaaaattcattttctttgcattcaataccacacatttatcattcatggtataatttttccttgtaaattgctttaagttattgagatggcacctctttatcagttggccatgatttcctgagagccacataggatattaaaaaattggcaagccagccagctggtacagcaagccagacaaatgcaatgccaaaacgcggtgcaaaaatcaacgcaacagacagacgaatcgccaggttcaccatgtttgcaatgaggaacggccgcataattcccagaccccgaagaactccatcagttgccattttgattcccataaagatgaagaaatagccaagccatctcatataatcctcggatacctgataggctagggctgttccgtctttaccaagaaacaacgaggaaatttgcgtgtgcagcgtttcaatgacaataaaagcaatggctgcaaagcacacatccagcaccaatgcagcttggtagccttttttgatacgctggggtttgtttgcgcccaggttctgggaaacatatggcgaaactgcatttccgatggaaacaaaaatcagtgaaaaaacattctctacccgcatcgttgccgcatacccagcaagtgcctgcgtgccgaaaggatttacaactgcctgcacgatcatcataccaatagacactgtagactgctgaagaaccgaaggtacagcaatttgaaacatggaatgtaactcctgtcggtcaaaccagtcaaagtgacttttatatcgcctcatccgatgtaaaaaaatcagaagcgaaaacacggcagaaatgccttgcgcaatcaaggttgcaagcgccgcaccaaacacacccaggccaagaccggccaccatccaaagatccataaagatgtttaagagtgacgagaatatcaggagccccagtggaatttttgattcgcctatggaagtgaacatcgttgaaaggatgttgtacataaacaaaaatagaaaacctacaaaatagacccgcaaatacagcactgcatcatccattatatcgacaggggtttgtaaagcactcatcatccagtgagaaaagccaaaaccaaaaacaccaaggacgatactcagaattaaaaagctaagtaaggacgttgatacaatagttttcatttttccatactccctggcaccgaaatagcggctcaccagcacaccggcacctacaccggcacccagtgccacacaaatgaaaacattggtcagcgctgcacaagcacccacagctgcaagcgcggaggagcccacaaactgaccgacgataatagagtcagccatattatatatttgctgaaaaaagctgccgagaatcatcggcattgcaaaaaccgtcagtgctttaagaggcgcatctgtgattaaatactcatcttttgacattatcatattcctccacaggtttcataattccacgtgttcttctcttcatctaaatcaaattacacattcagaatgtaagttttaaattacgttgcgtaataattatatgaagttacagcaatttagtcaagccgctgtttacttttagtaatatgaatgatatgatattttagaaacgctatattattttacaggaggaacacttatgtacctggacggtttagatgcactggatcagaagattatccagctgcttatagaaaatgcacgtatctcttactctgatatcggtgaaaagactggcatttccagagtagcagtaaaggcccgaattcaggctctggagaaaaaaggcgtgattgaagaatatacaacaataataaaccctcaaaaaatcaatggtgctgtatcatgctattttgaaattgaaacaaagccaggccatctgccgcaggtaacagatatattatataaaaatgatacagtcacacagatttaccgtgtcaccggaagagacaagctgcatgtacatgctgtcgcttcatcaagtgatgagatggaacgcttcctgctcaatgttattgatacactgcccggcgttatcagctgcagctgcaatacaatcttatcacgcattaaagatattaaaggattacggctatagaaatcagattgctcggattacactggctgctataggcatctgtttcctccgaattcagactccagttgattcttcataaatagactttccatccattgctgcacataccatacagactgcactctggcgatctctttatgaaagtatctttccagagaaagattttttctttttacatatggtctttttcagttattttgcgaataacccggcatggatttccagctgccagactatagggaggaatatctcttgtcacaacacttcctgcgcctattacacagccctctcctatactaacgccaccacaaacaaccacattggatgccagccagcaattatcttttatagttattggcttcgcatattcaagattataaaaacttccatcttctcttttcctgatattacgttcttcaggtaataatggatgcataggagttgccaatgtaacattaggaccgatcatcacattatctcctatatgtatttcacatacgtctaagcatgtaaaattaaaattaacagaactgaattttccaaagaaagtattacatccataatcaaaataaacaggcgcctgcaaatacggaagttcctctgttgctggcaataattgtcgtaatatctgcatttgctcttcttgctgatcttcatctgtcaaattatattttcttgctaatttacgcgcattcagacgtaattgttccaattctttatccgttggatcgtacaacttcccacttatcattttttctctttctgtcatttctgataacctcctgatcctcattaatattcaacatggggcagtacctcgttaaactgttgtcttaaaacaagttcctgcgtttcctgtttttataattcgtaaatgattctcagattccattttccctgaaataagttcaatgtcctttgcacagggcattcatcatgttggtagttaacctctttcattttcactcctccagtaaggattatattaccaagttagttttttctgcgtatttgataagtttttactactgcaatagtatataggtaaagaatcactgtcaatactgttttttaataaaagagactttgcaatggaaactttaaacacacttatcagcaggcactctgttcgtacctatactggcgaatccctatcagcttcagaccttgaaaagattttaaaagcagcagattgcacacctgtgggcatgggactttacgaccagatacacttaactgttgtaaataaccgggattttattgctaatgccgatactacaactgcagctattatgcatacagaaggaacacatccaacttacaatgttcttggtcttggtcctgttatcttggggcgtattcaccgcagtaatttgccgctattggtgtcggacctacttctgaaacctatgaagcaagagaaattcctgcagcaaatgaccactgctcagtttgagcagtggtctcagtatgcggtggaattatagctacatcaagaagtactaaacccagaaaaaattgtgccagtaccagagcaccaactttgatttaatttatccgaatactttatttgtccccaagtgcttccagttccgcatttagcttctccatcctgagtgagagactcctaaaaatttcaacattccggaaacggaaacctggcgtccagcctttttggcaacttccgtcttctcagacacttcgagataaatggcttccgtcattttcccagaatgttgattgctttttttaacacatcaagtgcatcttgggcatcacgtaattcacgtctgaaacaggcaatttccttctgctcatcagatgtataattaccagaaccacgaacagaaatatcacctgattcccggacgtctttcagccatttcgttaatgtgctgtatccgatgccaagattttctgcacatccacgtacaccaagatctttatgatcctcgtagtactggactgcatcaagtttaaattgtttgtcatgttgctttgccatatgagatcctccttcagcatgcctctattgtatcatgcttatgtgtatttggaatttctcattttggcatgtactatttatattctagcaccaattagttcggcaaatcctcaagaactttgattatccaaaaccctcctgtgaaatccgcaaaaaacaaggcgtgatggaatttacctctgcattgaaatatttttttcaagttaacatacagtttcatttataatggtgccacatgtgtagctgaggagtttaattaataaacacgttctatgccaaaaaaactatggtatatcttccgtgtaaactgaattcctaaggcatcagcacataacaatagtctttctaatgtaatctgtgtatcgattgtatctttacactctacctttatagaagatgccaaagctgccaatccagcaatccctactccgtcactattatcaaaaatcggaattccctttaaaaatgcagcaatcattgttcccatatagcaatctcctgctcccgctgagttcactgcctttttccatatagccgggactttcattttttgtccttctccaaaaacaaatgctccttctttcccccatgtaataactacaataatatgtggattaaatttttgcatctgtaaataacattcatatggatcctgaatgtttttacatccaaactcttgcataaatgttcgcatttcatctttgttaatagataaaaaatctatatatcttaacatttccctatctacgcaaaatggaacttctgatgaggtaaatgatgccgtattaaaacaccctcgctttcttccacataatagtaaatgctctcttacttccaaaggtacttctggtgcagcaagcacaagtcccacattttcatccgaaattttctcaaaaaaattatctatatcttttttctcaacttgattactcgcactattgcaagctgtaatattccctccatcactgtctggatatgtaaaacacaccgaatacaaagttggaacatcttcaactacacctatatagtctgtattgattctagcttgtttcatcatttttattatattattgcccgcatcatcattccctactttcccaatcgtataaattggaatatcgggtccaagtgtcgctacataatgcaaaataatatgtaacttacaataatctttagcatctgccagcttcgcaaaccgtgattcatcccgccccaaagttgtattctcttgaaatttaaacagaatccctgttccaattcctcctgtgcctactacataatcaaatttttttgatttcatatattgattcccttaaattcccattctggatgttctgaaatagggtgacatgccgtttcatacgttgcggttataactgcatctggatgattttgtaataatgtcatcggatattcggcatcaacatctgaaaacaatgctactctaagagcagtctgtttccacgttccagtatcactaaataaccttactttttttgcggataaacattcttttattcctaacgtcactgacatagggggaacaaactgataagctgcaccataacttctttgaccaagagtgattatagtatctaaattgttctcttgaatacgaatagacgaattttttaattcttcaattgaaacatgacaaaatggatgtcttttactctgattatacgcaatatgaccatcttgtccccatccacccaatgtgaaatcaataggttttaattcaatcttctctctaatgctctctatattattaggtcttaaaaaatttctattttcttcctttacatttaactctggtaaaattgggccataaaaatatttcttcataaaagagcaaaaattatatggatcattttctgccaacaaatttccttgccaatctaagcactcatccatatgaaaaatttctacattttgcaaactaatacgattttcattaatatattttgcaaatggctcataccagcatttaggaccacatggaataattgctctatagcttcttccctccatatttgctttcttgatatcctctgctaactcttttgccattagctctcccatttcttcagaatttttcactaaacgaaaaggtagtttcaaatccggatgattttctaaatcctctacacgaatactacaccaacgatataacaactttcgatctaccattagtaccctccatttacagtcagagactgctcttaataacagtctccgacttctctaacttatcattttacatttcaataagtttaatatccatcaaatagcagaactctttaattgtatcgtaaatttctgtatctccatatgcaagggtgatatactctccattccatatctgtactccaagatcataatctacatccattttaataaacgcatgtggccaaaaccacataccagatatctttctctgacgctcaagttcttctggatctggtgtatataccgttcctctatggagaattacttcgaactcaccattatctcttccaactcttgccattacaactttaccaggcttcaaaacagcctctacagaaagtcctcccgcttctccttctgttggaagtccatgatgtgcaaatttggctttcattggaccgctcaatgaaggagcacatgccccatctccaataactttgacttcttttttctctttatcaatacactgaaaatctccataataaactggatcattggataaattactaagtaaaaatacagtcattacattattataatcacataatgtagctgtcggtattcccttctgtaacatcatactctgagcaaagcaacttgctgcatacatgtctgcaactcctggaaatgactgaataacatacatatcaaagtcttcttcttcaataacctttttaagtccaagatacaatctaattgaacgttcagtacatacatcatctggtggtaactcctcaaaataaggcttaattaatgtctccttaacttcttcgatttcctccaaagttgcttcatctgcagctttcaagattgccatagaatctcttgaatcaatatctacgccaaatttcttcatccattgtgatggatccgccacaccacatgtcaatcccattccacggccaccaaaagcgccaactgtagaaagattcaatttattgcgtaatgcacatgcccttgagaagcatgcaactttttccactgtttcatcatccaatccgtacactgaacgatatttcattccaatttctttaaatgatgcccctaatgcaagagttcccacaagcctccacccctgtgatccaggagcagtccatataatcacaccttttccacaacgttcaaaatctctaactgcggcaacaatctctgatgcccatacccatgtccctgaatataaaataacaccatctactgaatcatcatgtttcagctttgctaaagccgcctttgcttcttttttgtatgctactactatgtcattttcaacaagatctacaccttttgctttaatcgcagatttcccctgttcaatcaactcatcattaataaattttactcccataggatcttcaagtccatctttatgtactccaaacacaacaaatcccattttaggtctaatcatcataatcttatcctcctttttattttcttcctatattttttttctgaatataatgatcaaaacttactgcaagcaacaaaatcaatccttttactacacgctgccagtaatcgtccactgccatcattgtcattccatttgtcaagacacctataataaggactccaaaaataacatgactaagatttccaacaccgccatttaaactaacaccaccaagaacaaccgccgtaattacatccatctcgtaactttctccagctcttggctgcccactatttactcttccaagcataacaagtccagcaagtgcgctacaaaatccactaatagcatatactgcaatctttactctcgcgaccttaattcctgaaagtcttgcaacttcctggtttcctccaatgccataaacatatctgctgaattttgtttttgacagaacaaatattcctatcgcatatacgattgcaagaataattactggaataggaatcactccaacatgaccttgtcctatttttgagtaagactcatcaaatccaaataccggtgtaccccccgtaattaaataagcaacgcctctcaaagaagtcattgttccaagtgttgctatcattggtggaatctcaatatagtgtataattgcacctgttattcctccaattacgactcccaatgctaatgctattattgaagctaataaagatggaattccctttaacatcatcattgcagtcaaaacgccactcactccaagaatagctcctacagaaagatcaattccacctgtcaacataacaaatgtcattccaactgcacaaataccactaattgatacttgtcttaaaatattcaccatattatttccagtaaagaaatttggggcaaaaatactcataactacaaataacacaatgaaaatgacaatgattgcatattctgctaacatttttccaaaatctatttttttttgcattatggtcctcctttaaagcgacgcgtaattcaagatagcttcctgtgaataatcttctggatacaattcgcctgctattttaccatctcgcattaccataattctgtcagacatcccaattaattcaggcatttcagaagataccataatgatactctttccactatctgctaatgctctcataattttatatatttcctgtttcgaccaacatcaatgcctctcgtaggttcatcaatcatcaaaatatcacattctgtcgcaagacattttgcaagaactactttctgctgattacctcctgataaattctgcactgcttggcgtaatgaactaatctttattttcaaatcagcaacaagtctttcacaaagagctttttcttttgctgcatttaagattgaaaaccttgaaatcctttcaagaatacacaatgagatattatcacgaatacttaaattcataaccaccccttgcgtcttcctgtcctctggaagtaatgctatattatgcttcaaagcatcttgtggagttttaattattatctcctttccatctttaataatctctccattataaagattatccgctccaaatattgctctgactacctctgttcttccagctccaactaaaccaccaattcctagaatttctcctctttttaatgaaaaagaaacattctctattctactatttgtaagtccctttacctctaatactgtttctacatgtttttctgatgatctaggataactttctccaagacttctaccaaccatatctgcaattaatttgcttctattcgtatcagaaaccctgccggtagaaatccaatgtccatcacgcaacactgaaactctatcacatatatcaaagatttcttccatacggtgtgatatatatataatagtaatgcctttttctttaaattgccttacaagtctatgcaatgtctctgtctcacgatctgtaagtggtgccgttggctcatccataataataagttttgcattcttcgaaattgcttttgcaatctctactaactgttgctgtgcaatacccagattttttaccttttcttttggatctatatctatgccaatctcattaaataatctctgacattcttcttgcatcattttcttatcaaggagtccattttttagtctttcacagccaaaataaatattttcaactacgctcaaaaacggaatcaaattaaattcctgatatattgcggtaattcccaactctgaagactttactggtgtaaactctgcatattcgtttccttcgaaaacaatagttcctgaagaaggctctgtcgcaccagttaaaattttaatcaatgtacttttgcccgcaccattttcaccaacaagagcatgtacttcccctctggtaatctgaagattaacatcgttcagagctagtacccctccaaaccttttacaaatccctttaacttccaatatcgtatcttccataggatgcctcctccataaatatcatcctgttttcttgtcacagaggctgactactattcaacctctgtgacaaatctacttatcatttttcttctcctgctacatccgtctgccataccggctcataatggcgctccacaactgcgtcttcctgattttctgttaaatattcaaacattgcatatgcaatctcatatcctgcatcataggggaacaaattaatggatgaacgatatatactattatctgctttcattttctctttgccttcatcagttgcatcacaacctccgacataaaagttttcatcaatatctcccattgctcgtattgcttcataagccccaattgcagtgtaatcatcacaagcacatacaacattcacttctggatgtgcaagcattactgattcagatactttcattccaagatccgtattactagcattctgtcttgcaataatttctgaatctggagcattctctgtaattccatctacaattccatctcctctacgaataactgcttcaacatcatcttgagctaaaacaagtgcttttccctttccatctaagttcatgttaatccaatcagccgctgcacttcctatagaatacccgatggaatactcatccaaggatccatcaatctgagcattactaataggttgcgcttccgcagaaatcacaatccctgctttcttcgcttcatcaactacatctttcaatgcattttcatctaaaggagaaatcataattccatcaactttacgaccaattacatcttccacatatgttttctgggttgctacatcatattttgcatccaaaacctgcgtagatattcctaattctttacatgccgcctcaaaaccgttgtaaacttcaataaaatacggatttgcaatatcctgtgttacatatacaaattccatatcttcgcctggcttttcctcagcatacactgacatggatgtaatgctgcaaattgttaatgttaataaatacgctattgttctttttttcatttccgttcctccttttaaaaatatacatttcgcagaatcgaaacgtttcgttttttgaggttaaaacaagggatgcagatatcctttctcatctaatcccttgttgtttctcttaatactagtttgggttccaatatgactgacggtggtacaattccatatttcataatattcatcaaattatttacagctatgacacacatttctttaattggttgcataactgtcgatataggaatatgattaattatcgaatatatcacatcatcatatccagttactgaaagctcttcaggtatacgaattcctcgctttctcgcctgttgcattacaccgcatgccattatgtcagaaatagtcataatcgcctgtggccctttaaaaaaaatttcatctgcgacttcctgaattgcttcaaattcaaatgaactttcaactataactgtttcatctgggcataccccaaattctctacacgcctcataaaaaccagaaatatacggttgatccacctttttatctccaaccataacatatatttctgtaagtccttgctccaaaagatgctttgtcatttcataaaatccttttttcagatcacacaaaacatacggaacatctagttcttcatatcgtgccgtcaaaaataaatacggtattttacactcatcaaactgttctacatatctaatatcagaatgttttaattgcggaatataaataacaccatctactccacgcgtaataaactcattgatatatttttcttcgtttgcactattactgccagtaattccaagaagtaaaaaatatccataactttccacttcttttctcacatactctactattacaccgtaaaaattattcacaatatcagggataatcagtcctatcatttttgtctttgagaccctcaaacttctagcagagctattcggcttataattaagttcttttgcaattgaaataatatgttctttcgttttctgagtaactcctggctttccgttcaaagccaatgaggcggtagataaagataccttcgcaactcgtgctacatctttaattgttaccctctctttatccttcgtacacttctattccttcctctctttttagtcgaaacgtttcgcatgtttgtattatatatttccatttcctttttgtcaatatatttgtacattttttaaattatttttttattttcagtatcttgtgcgtttttgcgaataaatactatttacttatctattatattattatattatgaagatgtgttattccctctttttattccacttcatacatatattcttttcctccattcaaatacaactattcttatagttcattttctatcaaatagttacaataaccggaggaaaatactgtggaacgagaaaaaatgcttaatggaaaaatctatgatatatcagataaggaattagaaactcttcgtatcagagcacgacaactaacaaaaacttacaacgatacctttgatactgaaacacaaaagcgtaacaaaattttagcagagcttatgcctcatatgggagctggtacgtatatacaaggacctattcaatttgattatggatgctttaccaaaatgggaactaactgctatgccaattacaatcttactatattagacggtgcctgggttacaattggtaatgatgtgtttttcggaccaaattgtacacttgttacacctattcatcccttcttaactaatgaacgaaaaatgagaacaaaagaagatggaactttatatgatatggaatatgcaaaaccaattaccatcggtaatggttgttggctagcctcaaatgttgttgtatgtggcggtgtcaccatagggaataattgtgtaattggagccggaagcgttgttaccaaaaatatccctgataattcttttgccgctggaaatccatgtaaagttatccgaaaaattatagaaaaagactctttaaagtatcgcaaagacttatattaacatttgttgattgtaccaaaaggctgatgcagtagtgactttt

SEQ ID NO: 128 - DNA, 2626 bp, Unknown
  gut microbiota DNA sequence
tgccacttatgcatcagccttttcctatacctcttcataccaaagaatttcttctactgatttaccaaaatactctgcaatatcatacagcagctgatatgtcggatttttaaatttattcctttccagcctgcttatattgtctctgcagtttcctacgatctcagcaaattctgactgtgtaaacccggcttccatgcaaagctccttcagactagtcctaagttctctcacaaataacatctcccattaatcatcataatgattcattccgccaaaggaccccggtcttgtttctccaaccttgttacctttgctgtcgtaatgatttatacttccaaataatcccggtctgctatatccatctttcttactcattgtactttcctcctgataaatgctttctcaatcattttactttagcacccctggtacctttaactgatgatcatattatcgcaaaatagggatgtcaaaatcgcacaaccaactggattcgtcagtccatatagttctgaagcacattttgcaggtactccttatactgctgccgtacatcttccggtcccacaatcctcatcctggggccaataccggtaatccaaccaaagaactgtgaacttaccgccactggcactctggctctgaaatgctcttctccatgaggacacatccatacatcatggccaaagcgatcaatcacaacaccggccagttcatttctgcattccagtgtgacttccgcatcgacaccgccatacataccaaacgttttcttggcaaatgcagccagatcaaaatttttgaaggactctttccctttacgatcagcctccagaatctctgtatcccgcattttatcgacacgataatgtttgatgattccggctgctgcatcataagcaaccaaatagtagttttcatcatcccatgtcaatgcccacggactgacaacatagaaagcgccattcttttttaatttcagttctttcttaactgtccattccgcataatgaaatttgatctctttattttcaaagatagcattgtgaatataatctacgttataatacaccgtttcattctctgtcttcggccggtttacgatgaagacatatctggaaagcatttcagcatctgtcttacagcagagcttctccaatttctgtatcaattctttggatttcttttctgtaataaattttgaagactgaaccgcatccaccaaaagcttcaactccggcagttcaaaatccctggcaccgatataatagcccggacacttgcctttcttctgctggatatccaatccgaatttatcaagaatctccatctccgtataaattgtccttcgatccgtactgatcccatattcctgattcagaatcgtgcacaactccgatgcatttaacatatgttcatcatcggtacgttccagcaggatttccatcagatataacgtacggagcttctgatcaaatgaagccatggtggtcacctacactttctgtctcaacttttcctagtgaaacattctatattctttgtatctgtttttacatttaccactcttcacatttaatatcacttatctgctcgattggaatgatcgtttgatctgtcatgattatgatatgctcatattcgtctatcttttttacaataccagaatacataacataggatccgccggctttttttgcatcgggaataaaataagttatcgatactttctgttctataccgatattatttctgattatattgattttttcgttcagctgagcaatcgcttcctcgctcagttccaatctttcatcggttaatcttgctgtttcttttatcgcagcatcatgcccagtcaaggctgcaaaaggagcaaactgcgctgcccgatcccgaagtggcatttgcggatgattcttagagaccggatgtggtaaattaatgatatcttcataagaattatttttcatcctctttcaactcctttacgccttatgtccgccaatctgttcatttctgtccctggcggttgctccttcctgaagattcatccccttcagcacagcgttttttccaaatttctttttaatactgagcattgcttcctgcatacgtttttcccgatccagcgcagcctcttcctcttcctgctttttcctttgcgcctcataatccgtaaaaagattcagctgctcatacacttcttctttcttcacagaactttcatccacaagcctgttcgccgtgatattgattcttctgacaagcaggtttctgtcaacgattctgtcatacagctctattactgcatccattatcagttttgttgaggaagtctgtcgtttcagattgatcgttccatgtgcatgtttcggaattcttcttccataacggtcgatcgtaacctctccatgatactgctttttcctgtcggcattgttcagattctcaatatcataaccaactgtcaacacgatctggtctgtgacaagctttttatccaccaaatccaaaaccatctggtccgtcatctctttgacgactaattttgctttttcaaagtcataaggacaatgaagtacctgaccggaacaaacactgttcgtttccggtttgtaag

SEQ ID NO: 129 - DNA, 2292 bp, Unknown
  gut microbiota DNA sequence
cgcaggagaagtatgtcatgcaattgcatgacgcgcacctcgcagcaagaatgccgaggcattcttgaataaaaagaaaaacgtgaaggagataatcatgagcgaatatataattatgacagatacttccgcagacattccggaagaattacttgcaaaaggtcacattcagcttattcccatggcatttgaactgaatggagaagagcgggtacattctgatccgggaaattgggacagcaaggaattctatgggaaactgcgtgacggcggacagggcaagacctcacagattcctcctatggtctatacagaatattttgaaaagatcttgaaagaaggaaaagatatcctgtatatttccctttcaggcggacttacatctacatggcaaagctcaaagcttgctgccactgacctgatggaagagtatccggacaggaagatttcctgtgtggattcccatgcggcgacaggagggcaggggatccttaccctgatcgcaaggaaaaatcaggaaaagggcatgagcctggaggaaaataccgcctggctggaagaaaacagaaataatatctgccactggtttactgtagatgatctggattttctgaagcgaggtggcaggatctcaccggcaattgcctggatcggcggcaaattaaagatcaaacctgttcttcggatcgctgaggacgggactcttgctattatggaaaaggtaagagggtcaaaagcagccctgaattatatttccggtaaatatacatctattccagaaaactatgatcctgagtatccatatgtattcctttgccatggggatgcacaggagcaggcagaaaagttaaaggcagacattcttgcagcaatgccccaggcacaggttgtgatcatgccaatgagtcctattattggcgtacatacaggaccgggcgttcaggctgtgatctattatgggaaaaaccgggcctgatcaaagatcctgaagattgccaaaggagtaacccatggtttcccatcgggtaagaagttcatcgagaatatcagcatttgtagaagaggtactgtgaagcagcacgatggcaccaggatggatgcgtccaagcagcttttcaaaggcctcttcttttgttggctgtttgtcctgataccagtctacataggcaagactccagaaaaaagttttataccccagttcttttgccatggaaagattgacaggactgtagattcctcttggaggccggtaatattttggcatagaggatccggttgctgattggtaaagttcttccacatcctgaagttctttttggaatccttgcatggatgaaatggaagacatatccgggtgggtcatggtatgatttccaatggtgtggcctgcctggatcatttttcttaatagatccggatgatctgaaataaagtttcccaccacaaaaaaagctgcagatacctggtgttttttcagggcttccagaatctttggcatattaccattttcataaccgcagtcaaaagtaaggtatatgattttttcttctgtgtctgcagcatagtaagcattatattttttcaattcttctatggaagcattcccaataggacgtttccccttttcctgaaagcttaaaccccagctggtgttttcggaggatgcattgacgctgccgtagtcaggcagtaattgtccagtggttttgcctagcagagagccggtacagaaagctgctgcaaaaagaatcaggatcataagatggacttttgagatgggaaaaaattttaaacggaaatttttcatagaacctcagaagaaaagatttgtatcagtttatgagaaatagtaaaaaatatgtgaaaaaataagagccatccgtcttaataaccgatgactcttaggagtgttcactgtccaatggaatgtacctcactttcaaaatttaataaaacaattcaggtatttcgcttaagctcttggtggaccgtaccttcctttcttagaatataggaaaatcaattcttatttcggtggtctgtacctcactttcttggagtttatttgaataacatttctacgtttctgggggaatcactccttttctatttattatgtttcccttttgttttatgtgcttactataacagaatattttgcacgtgtcaatagaaaaatagaaaataaataaaaaatatgataaataaaagactataaaacgataatatataaaaaaactgaaaatttccacaattaaccagaggatatttggaaaatattgaataactgtg

SEQ ID NO: 130 - DNA, 1664 bp, Unknown
  gut microbiota DNA sequence
ataaaagtaattgaaaacagattcgcagcattatatgggcaggtatcctgccctggtaaaggagcaaagaatgaaacttatttcatggaacgtaaatgggatcagagcctgcttgaccaaaggatttgaggaaagtttcaagaagctggacggagatgttttctgtctgcaggaaaccaagtgtcaggaaggacaagtgaaaatagaacttccgggctatcatcagtattggaattatgccaatcgtaaaggatattccggtacagccatttttacaaaaaaggaacctctttctgttttttatggaatgggtatagaagagcatgataaagaggggcggatgatcacacttgaatttccggaagtttatatagttactgtatatacacccaattcccagagtgaacttcgccgtcttacataccggcagcagtgggaagcagatttccttgtttatctgcagaagctcaaggagcaaaagcctgtgatctgttgtggtgatatgaatgtggcacacaaagagatcgatcttaagaatcctaagaataatcgtatgaatccaggatttactgatgaagagcgggcttgcttttcaaaattactggatcatggctttacagatacttttcggtatttttatccggaacaggaagggatttattcctggtggtcctacagatttaaggccagggagaaaaatgcaggatggaggatcgactactttcttacatcttcttcattagaagaaagattaaaagatgcaaagatccatacagagatcatgggatccgatcattgtccggttgaattggagatcaatctttgatatagcctcaggcaggattgcagaggtacgcaggagaagtatgtcatgcaattgcatgacgcgcacctcgcagcaagaatgccgaggcattcttgaataaaaagtaggagggcagcacatgcagtctatgaataacaccagaattaaaccgggatatccacaggtccttggggcgtacaagctggagggcggatacaattttgcagttgaagctcctgaggatgcccaggtttccctgctcttatataaacgaaatcagcttgcaccagttgaggagattcctatgggccgggaataccggacaggcagagtttttgccatccgtcttacagataaaagcgttgccaactgccagtacaattttctgatcaacggaagcgtggttcaggatccctgtgcctgccgtctgacaggcaggaggaaatttggaagtccgtatactgaggatcctcatgcagtacggtgtgagcttcttaaagatactccatatgactgggaaggagatgaagggatccagagagaatataaggatatgatcctttacaagcttcacgtaagaggctatacaaaggctgccggaagtaccataaagaaaaaaggtacatttcaggggctgacagagatgatcccttattggaaggatttagggatcaataccattgaactgatgcctgtctatgaatttcaggaagtggccgataaaaaggaacaggaagggatgatcaccagccgaaggaaaaaggacgaagtgaatttctggggatatattcctggaagttactttgccccaaaggaagcctactgcgccggcagagatccggtacaggagtttaaggat

SEQ ID NO: 131 - DNA, 1816 bp, Unknown
  gut microbiota DNA sequence
ctccattaaatatactacaactaatcagattgtttttcaatcagatttaccaaacaatcaaaaaagtaatagtgacaagttcaaaaacttatagcgctgccagaacggtttttttataataaagttacaaaatatgaaggagggtattaagaaatgaagaaaaaaattattagtattcttttaagcagtgttatgattttctctatggggatttcaacagtttctgctgctgcagctgacgatacttcagctacagaaagtgttgtagtcagcaaaacagagggcattacagataccgcatacggaaaggttcgtggttttattgacaacggaacttatactttccgtgggattccttatgcaaaagccgacagatttgaacagccggaggctcctgatacatgggacgatgtgcgcaattgtcttgtctatggttctacagcacctattacaaaaatgacagatccggatggtggagattttctgattcctcatcgttactgggcacagagcgaaaactgccagaatctgaatgtttggacacaggatctggataccaatgcaaagaagccggttatggtatggttccatggtggcggatacaccaacggttcttctatcgaaggtgttgcatatgacggaaagaatcttagcgaatatggtgatgtagttgtagtaactgtaaaccatcgtttaaatgtacttggttacttagatgtttccgaatatggtgaggactatcagtattctggtaactgcggcacagcagatatgattgcatccttaaaatgggtaaaagaaaacattgctaattttggcggcgatcctgacaatgtgactattttcggacagtctggcggcggcggtaaagtcatcagcatgttagcttcccctgaagcagaaggattattcaatcaggcggttgtacagagcggaagtgaacgctatatcgaaaaagatactgcaaaaaagattactgcaaaaactcttgaaattttaggaatttcagataaccagattgaacagttaaaagaggttccgtatgatactcttgatgctgctgcaactgaagcattaaaagaagttggcgatgaacttggaacttctttaagctggcgtcctgttcttgatgaagattatattcagagtaagttccaggaatggacaaatgacattccggttatggtaggttctgtatttggagaaatgaattgctggacatgtctggatcccaatgaaaccaacaaaaactcctggactgaagaagaagttgacgcaaaattaacagaaaaatacggtgataaagctgaagctgtaaaagaagctttcttgaaggcttatcctgaaaagagtgcttgtgacgcttattatgtagcagatcgtacaaagttcaccaatacccttacaaaacgagtagaagctggtgcaactaaaaattatgattacgttgtatcttatgaatctccaattgatggtggtgtaaatctgtggcactgcggcgaaattccatttgtattccacaatgtagatctggtatccggcagctatggcggaagtcaggatgcttatgatctgcaggatgtaatggcaagtgcatgggtaaactttgcacgcaccggagatccaaatggtgacaatgtacctgaatggagcacctatacttctgacaacaaatctactatggtattcgataccacaagtggagaaagagttgattatgatgctgaattacaggaactgatcagccagtaacagtatataaccgctctagtaagtaataaagatattaaaagtatataacctctcttaatagaca

SEQ ID NO: 132 - DNA, 43436 bp, Unknown
  gut microbiota DNA sequence
gcaggagaagtatgtcatgcaattgcatgacgcgcacctcgcagcaagaatgccgaggcattcttgaactacattttacatttacgctttctctttctgcggcagctgtgcaagaataatggctgcaaacatgatcacacagcctgaaatctctcttgcacttaactgctgtcccagaatcacccagcctgccagaacagagatgcaggactccagactcaagatcaaagatgctacggttggattcatatttttttgtccaatgatctgcagagtataagccactccgcaagacattacgccagcatacaggatgggctgccaggccgtaagaactgcacacatctccggcttttcaaaaatcagtgccggaatcccggacaggatcccgcacaccagaaattggatacaggacagctttaccccatccactttcggtgaatagtaatcgatcaccagaatatggaatgaaaaaagtacagcacagatcagaaccagaatatctccttttccaatggaaaatccgtctgtaatacacaaaagataaagtcctgcaacggacatagctactgccagccagataaacggagaacacttctttttcagaaaaagccctaaaataggcaccagtacaatataacatgccgtaataaatcccgccttaccaacagtggtatatttaataccaaactgctggaaattacttgccaggcacataaggattccacaggccaggcctccccaaagcagatccttcctgctgccggatccctgtgcctcttccgctttcttgctgctgtttctgcccataaaccagatcacaggaaggagtactgcagacccgatcaacgatctggccatattaaaggtaaagcctcctacataatccattcctacactctgggccacaaacgcaacgccccaaatggttgcggttaaaagcaggagaagggaattctttaagggtatctgttgttgtttcataataattttcctcgtattttcagcagatcaaactagcatatattaccggtccacacttagcgttccatcatactgatggattcaatgcctacacttcctcctcgaaccacttcaatatgtccgaactcttctttgatcagcttaacaacagcgtcattcttcgtagctgtctgcacaaattccagaagcaggctgtctttgccatagtcgatcactcgtgctttaaaggtctctgcaatctgaaaaagttccaccttatcctctgggctgcagccaaatacttttacgtaaagaatctctttcatacgtacaaacatatttgtgaaatcaatcaccttgatcacttctaccattcggttcagctgctttttgatctgttcaaaggtttcgtcatcacaaaatgtaccaatggtcatacgtgacactgtattatcctctgttgttcctactgtcaggctgtccagattatagcttttccctgaaaaaagtcctgaaatttttgccagaacacctacctggttctccacatacagggaaatccatcttttctttaatcctttatccaatgtactgttcctccctttccttaacaatccaggatcatatcttccagtgtaccgcctggcttgatcataggataaaccatctcttcagggtcaatgatgaactcgatcagtgtaggtccttttgtattttttcttgcctcttcaaaagctgccggaacatcctctctattcataacacgaataccttttgctccatagctttctgcaagctttacaaaatccggagtatacgcaggcatctcctgtccttcgctccttctgtacaatgcaccatatttcaaattggtcatgctgtaccgcttgccatagaaaagcttctgccactgacggaccattccaagatattcattattaaatacacagatgatgacaggcagttcttccaggactgctgtggcaaattcctgaatattcatctgcattcctccatcacctgagataacgatcacaggcttatccgggttaccgatctgtgctccgatcccacctggaaaaccatatcccatagttcccagtccgccggacatgatcagctgcttcttctctgtgatctccacatattgggaagtcagcatctgatgctgccccacatctgtaacaatgattgctgtatcaaactggcgattgatttcgccgaacacatccaaaggtccaaggggtgctccctgacgcatagtcaatggatgctcttccttccagtcctggatctcattcagccatttcttggtggtacagttttccacatattcattcatcttttcaagtgcttctttggcatctgcaacaataggaatatctacatgaatattcctggaaatggatgctgtatcaatatcaatgtggatgatctgtgcattgggcgcaaattcatgaagctttcctgtgattctgtcattaaatctggttccgattgaaaacagtacatcacagttgctaactgccatattggctgcataagaaccatgcattcccaggttgccaataaatagcggatgatctgtagggatggcaccgcgccccataactgtagtaaccaccggcacatttgtcttttccaccacctgacgaaacagctgattagctcgggcaatattcactccaccgccagccaggaacaatggccttttcgctttattcaaagttttgatagcacgtttcagctgaccgatatgcacattggtattgggcttgtatccacggatgttcacactcttcggatactctgcgctgccaagttcagccattacatccttgggaagatcgatcagtacagggcctggcctgcctgtacttgcaatataaaatgcttctttgatgatccttcccagatcttcccttctgcgcacagtcactccatacttggtaatactgcgtgtgatccctacaatatcaacttcctggaaagcgtcattaccgatcagattacgtgcaacctgaccggtaaagcataccaggggcacactgtcataattggcagtagcaagccctgttaccagattggtagctccagggccgcttgtcaccaggcatacgcctacctttcctgtggtccttgcataagcatctgccgcatgcaccagtgcctgctcatgacgtggcaggataatggtaatatcgtcctgcttgtacaattcatcacttatatcaatggtacaggcaccaggatacccgaaaaggtattccacgccttcttctttcaaagcttttacaagcagtttattcccagagatctgtttcatgtatgttcttagcctccttatcctggatgtattttctaactactatgaaagtcagatgctcccagttattgatactcccacatctgtccgggactttcatagtaaagaaacgccccgagctgtcataaagctcagggcgaaaatccttccgcattaccacctgaattcagaagaaatatttgacagttcaagtcgaacgcattatttaaaattataatcttccatctgtattcttgtcaacctgtgtttttggaaaatgtagcatgtgaacatcagcctgtatacaactgatagtattttcctttctcagccattagttcttcatgggagcctctctcaatcacacgcccctgttccaataccatgatgcagtcgctattccgtacagtagacaaacgatgagcaatcacaaaggtagttctgcctttcatcagcttatccataccatcctgcaccagtttctcagtacgtgtatcaatggaacttgtggcttcatccaggatcagcaccggtggatctgccacagcagccctggcaatagacaaaagctgcctctgtccctggctcagattcgctccgttattacgcagcatggtatcgtatccgtctggcagtctgcgaataaaactgtctgcattggccagtttagcagctgcaacaatctcctcgtctgtagcatccagctttccataacggatattgtccttcactgtagcagtaaataggttagtatcctgtagtacgatccccatggaccggcgcaaatctgcttttttgatcttgttgatattgataccgtcatatcggatctttccatcctgaatatcatagaaacggttcaaaagattggttatagtagtttttccagctcctgtagatccaacaaaagcaattttctgccctggctttgcatacattttcacatcatggagcacgatcttatcatcattatagccaaaatccactccatccagaaccatatcccctttcagttcaacataatctgtttttccggtatccttatgaaaatgcttccatgcccatcgtccggttctcgcatcagtttccttcagttctccattctcttcctttacattcacaagggtaacatatcccttatctgtctccggcttctcatccagaagttcaaagatacgttttgctcctgcaagagccataacaatactgttaaactgctggctcacctgattgataggcatgctgaagcttttattaaaagtcaggaagctggccagcccgcccagagtaaaccctccgatgccattcaacgccaggcctccgcctacaatggcgcagatcacataacttagatttcctatctgtgcacagataggccccattacattggcaaatttattagcactattcgcactggcaaaaagctggtcattcagttcgttaaatttatccaggctttcttcctcatggcagaaaaccttaactaccttctggccttccatcatctcttcaatatagccgttgatcacacccaggttcttctgctgatcaaggaaatactttccgcttaaagatgccacctttttacttgctgtgagcataatagctaccatcacaagggtaactaaagtcaaaggtacattcaggatcagcatactaaccagaacacttacaatggtcacagcactggaaagaagctggggaatactctggctgatcatctgacgcagtgtatcaatatcattggtatagatggacataatatccccatgtgcatgggtgtcaaaatatttaaccggaagcttttccatacctgcaaacatgtcatttctcagattccgaagagtcccctggcttacatagatcatgatccggttgtacaaataggtactggcaactccaatggcataaaatccggccactttaagaattgccatggcaagaggatgaaaatccggctggtcagattgcagaagagggagtatgtactgatcgatcaatgtctttgtaaacatagtaccctgtacatttgcaagcacactgacaaatatggccactacaacgatccccacatggatcttatagcttttcaggatgtaagccatcagcgttttcagcatttttcctgggttctccacctttggaccaacgccctttcctggccttccaggtacttttctggtattattcatgcctgctcacctcctctgttttcatcaaaatcaccaccagccttggtctgggaatgatatacttcctgataaataggattattctccagaagctcttcgtgagttccaaagccatttactcgtccatcttccattacaatgatacggtctgcactctgtatactggaaatacgctgtgcaatgatcagcttggttgtatccgggatttcttccgcaaaagcctttcggatctttgcatctgtagccgtatccactgcacttgtggaatcatccaggatcaggatcttgggctttttaagaagtgcccttgcaatgcacagcctctgcttctgtccaccggatacattggtaccgccctgctcaatataagtgtgatatccatctggcattctctggataaattcatctgcgcaggcaagctgacaggccctttcacactcttcctctgtagcctctttatttccccagcgaaggttttccagtattgttccggaaaaaagtacattcttctgaagtacaaccgcaacctggttacgaagcacttccatatcataattttgcacatcgatcccgcccactttcacacttccttcgcttacatcataaagacggctgatcagattcaccagactggatttggcgcttccagtacctccgataataccgatggtttcccctgcgtgaatggacagattaatatctttcaatacgttttcttttccttctttcttatagcggaaagaaacatggtcaaagtcaatccttccatctggaacttcaactacaggttgtgccggattggacaaatctgctttctcattaataacttctgtcacacgctctgcactggccatactcatagtcaccataacaaataccatagacagcatcatcagactcatcaggatattcatacaataagtaagaaggctcatcagttcgccggtggtaagactgctgccaacgatcatttttgccccaagccagctgatacaaagaatacaggcgtatacagtaaactgcatcagcggcatattcataacaaccagcttttctgcccgtacaaacatttcgtatactttattgcaggccttctgaaatttactggtttcataatcctcacgcacataagcttttaccacgcgaattccggatatattctcctgtacgcttgcattcaagtcatcatatttcttaaaaacctcctgaaaatacctggtagccctgcgaaggatcataaccaatgcaaaaccaagaaaaataactgcaatcaaatatacacttgcaagtctggcattgatcaggaaggccatagtcatggcacagatcagactggctggtgcccgggtacacatacgaagaatcatctggtacgcattctgaaggttggtcacatctgttgtcaaacgggtgatcagacctgctgtgctgaatttgtcaatatttgaaaaagaaaatgtctgtatattggtgtacatggccttccggagatttctggcaaatcctgaagatgccagagcaccatattttccgccaagaaagcctgcaatcaaacctgcaatggcaagtaccgccataacagcacccacgcggtaaatgtaggatatgttgcctttttccaccccgttgtcgatcatccgtgccatggcgaccggtatcatggtctctaccacaacctccagtatcataaagacaggagtcaggaacgaagcctttttaaactcctttacctggctcaataatgtttttatcatggaaatcctccttttctatattattctttatcatatccacaacctggaaaaacgtatccagcttttcctgaggaatatcttttttcagagcaatctgtaaaagatcaaaattatgcatgatcccatgctgatacttctctgctcttgcagtcagctccagtcttttcaatctggcatcccccggataaggctttcttacgatcagatcctttttctccatcagctgcaggatcccggtagcagttgatctggcaatctggaaattttcctccagatctttttgaaaaaccggtttctctgaatgctcatatacatatcctatgatccatgcctgcatacgggtgatccctacttcctcatccattttggagtgccagcaattcacacgcctgccaatcatattatcaagagtacgcacctcatatccaatatgtctctctttgttctttaattccttctccatgatttcctcctttccgcagttataattgttcgtatgcgaactgttcgtttacgaaccaattatatataagatccttacgcttgtcaaggataaatcaatcgagtctgtttcgacgacttcctcattactcctgacctttctctttttgttccttgattccgtgaaataaacatagtatgataatcaaagcgaggtaaacacacatggataataagaaaagaaaacacatatatttttcaggcagggtgcagggtgtaggctttcgctacatggccatgcattttgccgaagcttacggacttacaggctgggttgacaatctttgggacggcagggtcgagatggaggtacaaggcgaagaaagcagtattttccatatgcttacttccctggaaagcggcacgtttatccgcattgatgactgccagatttccaatattccctcggttgaggacgaatattattttatagtcaaataacttcagccttacacagaaagggaattgcctgtatgagaaaagttctgtctttttttcggagacatccggtttccagtattattgttattttgctcctttatgtagcgatcggcgcacttgccccctttgcggttcctggacagctttccgtcgatgagaagacattttcaaaagaagattattatacagaagatccggatgctcatagtgctgaccgggcccatatcgtagaagagaatcaggaagcccttacccagaggatccggatgctggaacttgccaggaaagaagtgatcctatccacctttgatttccgtgaggatgaaagtactacagatctgtccgccgccatttatcatgcagccaagcgcggggtaaaggtgaatatcctggtagatggaatgtccggactgcttcgtatggaaggaaagccttttttctatgccctgtccagccatcctaatatccacatccgtatttacaatccggtaaatccacttcggccatggagtattaacggcaggatgcatgacaaatatgtgatctgcgatgatcagcttcttctccttggaggccggaatacatttgattatttcctgggaagctatcctacagattcccgcagctatgaccgtgaagttttgatctataacacagattttaaaaatggctgtacaaatagcgtgatttcccaggtaaaagcatatttccaaagcatatgggaaagttcctatgtgaaagatttccacgatcaggaatctctctcttcccggaaatcagtacaaaaaaagatcctccttctggaagatcgatataaaatgctttcggatctgtacccggagtgctttcaggattattcctatcaggagcataccgttcccacccaaaagacctgtttgatctttggacctgtcactccttatggcaagaaaccatatgtatggaatactttgcaatgcctgatggcctctgcccgggaaaaggtgattcttcataccccctatgtggttttggataaagagatgtcctttggcataaaagaaatatcccagaatgtttcagacttttccatgatcatcaactctgtagaaaacggtgacaatgtgatcgcttccagtgactatctgctgcacaaacagcaggttctggataccggtgctgctttatatgaatttgacggtggacagtcctcccatggaaaatccattcttatcgatgatgatctttccctgatcggttcctataatctggatatgcgaagcacctatatggatacagaacttatgctttgtgtgcaaagtaaggaactaaatcaggaactgcttggatatctgaatacctacctggcacaaagccgacgtatcctggataaaaacaattacgaaatgccaaagggcatgatccctcagaccatgcccctgcctaaacaaatactatacagaatacttggaccactgcttcagccatttcgttatgtggcctgaaacagtctcacctgtacttagcttttataaaatccaccggtttccacatcatatatacctctgggagtgatgcggatctggggaattaccggaagtgccataaaagacaatgtaataaaaggatcaaagcccattggaatgcccatctgatgggctttttctttcatgtgccgcagagtgttttctatggtctcatatccggcatcgctcatcagacccataacaggaaggggaagggtctcccacactttatgatctgccacaatggtatagcctccctgcacacggatcagttcctgtacagcaagcgccatatcctgatcattatctccgatcacaataatattgtgggagtcatgagaaacactggatgcaatggctccgcctgtaatgccatacccttttacaacagctcttcctgttttccctgtagctttatgccgctcaactactgcgatcttactgtacgctttatcaggaacaaataattctccaggtccggttagcttcagaatctgttttcttgtagtgatctgcccttcttccatttggattacatgatacattccatcttctgaagaaagttccagctttttagcagaaaattctcccacatgaactgtatttttcaattccttactgcatttcttgatttgcacctgctctgtttttttaacgattttcccttggtaatatacttcctgcacggataccttttccagatcatccagcacgatcatatcagcctgacgtccaggcgcaatagcccccaaatgctgcagtccgtagcacatagccggacgaatcgttgccatctgaatagcctcaacaggatccatgccaagcaaaatagatttacgcacattatggtcaatatggccttcacgttcaatatcttcaatatgcttatcatctgtgcagaagcaaaaaccctctccgttcattttattctttacaatgcctgtaacaattgcttccagattccgggcagcacttccttcccggatcagtacatgcatcccgcatctccgttctttcattgcgtattcaaaatccgaacactcatgatctgtggcaatgcctgccatcacatatgcctgcagatcctgatctgaaaggaaaggtgcatgaccatccttaattttatcccggaaaaggagcagcttatcatgcatggacttgtctccatttacaacagaaagataatccatcacctcgcccaatcccaggattcgtttatttgacagatatggaaccatatcctcagcagtcagggtacatccattgtcatctatccctgtagccggaacacaggacggcatcatcacatatacatttgcacaggaatccgctgtctgatccaggatataccggatcccctcaagcccggatacattggctgattcatgaggatctacaataaaagtagtggttccatgtctggatgcaatcgctaccagctcccctggtgtaacaagggtagattccaagtgaagatgactatcaataaatccagggcaaagatatttacccttaagatcatgttcttcctttccctgatagtctccgattcctacgatcatcccgtctgtaacagccacattcccaggcaggatctctcctgtgaatacattaatgatctgtgcgttcttcaataccaggtctgcctgcttttctcctctagtaacctttgaatattcacaatattgttccaattccatacagtccacccctttttattgtaatttagaattgcaaatacgtcaggttctgaatattttagataatactaccatatttatctgtaaattacaatcaggaaaggacccctcaggtttattttatctcagtcgagaagactcccacctctttcaggtggtaaataacagcaagttcgtctcagtgggagttcaatctccgactgagataaacgctccgcgaggatgcgcagtgattctgtaaagaatatgtcagcttacgctgaccagaatcacgcgccaagtctcgcggctgctcgacttgaatcttatttatcgtctcctgtcagacgaagcacatcccggatctcatccgtcttcatatccaggatcacagccaattcatccagagtaaatcgtgtttctccatcatcatctgtcagttctttcactgccgattccagcttttctacccttgccacaagactgtcatcctgaaattttctttccgtctgttcttcaatagctgcaaggattcccttccgcagctgtaaccgcagccattggtcatttttcacctgcggtttttcctgctccaatgcttccaaaagtgccacattagcctcctggatcaaatccgccaggtggatctcttcacagttcatctctgctgccatattggccgcaacaggcagatatacctgggctagttttcccagggcaagtgcatccccatgggcagtcctctgaaacaattctagcaattcctgctcctcaaattcttctgtcaaaagcccgttcagatattcttgcagatatgctttttcctcagcagtaagcggcatcctggtgccggactgcagttttggctcttcacacttttctgtctctgccccctgtatctggattccttttgttttcaggtattggagcatcttcaccatctgttcggtttccagttccatctcctgaaagcaatccctgatctgtgcctggctcagcacctgtccattctcttctgcaatgctgcaaagcttctgcagctttttctgaaattcaacaacgtccataaatactcccttcccggcagcttctgccgttagatctgaactttgtagtcttctggttcatacctcttattcaagaatgcctcggcattcctgttacataaaaaggctgctgcataatgtactgatccctgaaaagaatttcacggatgtcgattatacaacaacctaaaaactgcggataacaggacttgaacctgcacgtcgtagacaccagaacctaaatctggcgcgtctgccaattccgccatatccgcatgtcatgtatggtgatgccgccatcagacaacatacctgtttaataaaaagccgtaaatctcatataagatttacggcctaaaaccaatgagacatcggggattcgaaccccggacaacttgattaaaagtcaagtgctctaccaactgagctaatatcccatataaaagactgggctagctggattcgaaccagcgaatgcagcagtcaaagtgctgtgccttaccgcttggcgatagcccaaaggcaaaaggtggatacagggattcgaaccctgggcctccagagccacaatctggcgcgctaaccaactgcgctatatccaccataacgtgtcagaagggattcgaacccccgacccacggcttagaaggccgttgctctatccaactgagctactgacacatctctcctcatcagagaagcgggtgatgggaatcgaacccacgtatctagcttggaaggctagtgttctaccattgaactacacccgcatttcgctgaaacggtaatgatgtttaacagcaatcggggtgacaagattcgaacttgcggcctcctggtcccaaaccaggcgctctagccaaactgagccacaccccgctgtaatcatttacgacttatgaaattttgctttgtcgtttgacgcaagatgtattatattatagcaatacctaaatgtcaacacctattttgaaatttttttattttttttttgaatttttttattcccaggaaaacaggcacaaaatccactatttcttactgatatacatgatcttatggattccatccctggcattttcaatgatcagatcaaaacagtcaaaatggtttttaatcatactggtcatactcttatacccatagtttctggcatcaaagcccagatatttctgcttcagcacagctccaatctcggcaagattcacattctcatcctcatccagataatccaggatataccgaatcacttcctcctcagatggaatactgatctcctctgcagtctcttctgcttcttcaggcagaatatcatcctgatcatcatctagaagctgaacttcttctgcttcttccggcaaatctgcctgtacctctgtttcttcctcttctgcttctttatagatcagatccaggatcttaaactcatcacaagccttcgccagtgcctctttcgttttcttttcgcccatgcctaccactgtcttacctgcttcccgaagtctgtacaccagctttgtgaaatcactgtcactggaaactatgcagaacacatctacaccgccagtataaagcagatccattgcatcaatggtcaaggcctggtcggcaatactcttcccatatgcataggaaatctgaagcactggcataattccctgaaggggcatcaccttataccacgccttcactgtctgtgaatttacagacccatacaatctgaaaatccgcacatttccatactccattgcctcctgtttaatatattctgcatactttgcagaaatattatcaccatcgatcaatactgcgatctgcttttccacttattactgcctcctatttttctgtttgtttaaagatatctgatctctgccaccggtgccttcccctgctgcagttccattactgcgtaacttggccttcgtccttcctgacggggataggacaggcttcccggattcagcagaagaatcccctcttctgtttcctctacaggcctgtgagtatgaccaaacaatactacctgacattctctggcttttccttcatctaaaaccccatagagccctatactgaccccataataatgtccgtgagtcaccaggatcctgtgcccttccagctggattatcacttctcttggaaggtctgagaaaaaatcattattaccggaaacaatagtacaaggacattctaccaaagcctccatgaaaatttctcttccttccacgtccccacaatggataaaataatcaaaaggcgtttctctcaggacggtttcttccagattttcatcctttccatgtgtatcgctgacaatcagtactttcattttaattcgtccttaatcgctcttaaagcctttcctctgtgactgattttgtttttctcttccatggaaagttctgcagaagtacatccatattccggaaggaaaaagatgggatcatagccaaatccgttttcccctttttcctcatagccaatccgtccttccatggtaccttgcactgtttttacggtgccatcaggagaggccattgcaatggcacatacaaatcttgcagtcctccgctcatccggaactccttccagtctttggatcagactgcgattcttaatatgataatccgtgtcctcccccatatatctggcagaatacactcctggttctttattcagataatcgatttccagacctgaatcgtctgccagaaccgtctcaccgcataacgcacacactgcttttgccttaataacagcattttcctcaaaggtctttccgtcctctacaatatcagcaaaaatccctgcttccttcatggaaaggatctctgtatccacatctgaaaggatctcccggatctccttcattttttccgcattacctgttgcaaaaattatctttttcatagggactccttcttttctgtttttcttggtggcttaggcccaaggaactgataaaaataggtcttaagcataccattatatatctttctgttcttatctgccttccgccctatatcgttttctgccctgtcgtaggaagtgatcatatacatggaccacttatccagattgcggaagctttctcccagatctttgtaaatagccggaagtgcttctcggtcttccagtctttctccataaggaggatttgtgataataaagccgtatggcttggaatgacgcagctgtgacacaggtctctgctgaagatggatcagcttgtcaaccttcgccatttttgcattggatctagctgcttttaaagcttccggatcaatatcatacccctgaatatctgtttctatatccatttttacccgatccatagcttcttcctttgcctgataccagcagcctcttggcaccagatgtctccactgttctgcaagaaaggaccgattcatacctggcgctatatctgcagcgatcatcgcagcctcaatagggaatgtaccgctgccgcaaaatggatcaaccagaatcctgtccttattccagggagtaagaaggatcagtgcactggccagtgtctctgtgatcggtgctttcacagtcatctggcgatacccccgtttatgaagggaaataccggatgtatcgattccaatggtagcaatatccttcatgaaagaaaccctgataggaaactccggtccgtcttccgggaaccaggaaatatgataaacctccttcaggcgttctacaatggctttcttcataattgactgaatatccgaaggactaaaaagcttgcttttaatggaattggcttttgccacccagaaacgcccatcctttgggatgtatctttcccagggaatggcttttgttttctcaaaaagctcatcaaaggtaactgcctttacttctcctgtcttcaagaggattctttctgttgtacgcaaaaaaatattggcatctgcgatgccttgtgcatcggccaggaaagtgacctttccatcctccaccttgctgatctcatatccaagatccaggatttctctttttaatactgcttctagtccaaaatggcagggtgcgatcaattcatatttttccatggataaattcctttcttctgatgattatgaaagcttcaggcttttcaccgtatttccatcgaaatcccggatagaaaagatcccgtcctcatatatcgcataggtaggcggattcccttctttcggaatggaaacagagcctggattcaaaagaatatatccgtctcttttttctgctttcaacacatgggtatgaccatggatcagaatatcgcctgccatcagtggtggaagatgatcctgattatatacatgcccgtgggttgcaaaaaaggtcagatcatcaatcgccaatatacaataatctgccagaactggaaaatccagtaccatttgatcaacttcagcttcacagttgcccctaactgcataaatctgattcttcatttcattcaacataggaatcacctgcttaggcgcatagtcccttggcagatcattacggggtccatgataaagcagatcgcccagcagcaccaggcgctctgcttcttctttctcgtatgcttccagcattttcctgcaataatatgcggaaccatggatatcggatgcaaacatgtatttcatgaaaaattctcctcattaaaaatattttaaaatagtaagtatatttttaaatattgtgtaactgtaagggtactgaacagttacggtattcctttttacattatcacggttagccggaaattacaaggtttcttccccgatatgccaggaatcctccaatcacagatctggttctgtaaccctttacagccagttcctttgccaccttcaggcttgcacctccccggtcacagtaaaacacaaggatttttccttttgaaagttccatggaaagacttcctgtttccatgtatctttcatatggcacattgaatgcaccttttacatgacttttttcatattcttcctgtccccgtaaatctatgatcaatgcgtctttgcgtccaacataatcatctagcatttttgctgacattgtttcaaagggaaacataagaaactcctttttattatatgatatgcatacaggatgtaaaaagaatgtgcacatgtttctgctttatcatataaaaagggacgctgcacaggcagcatcccaaatcagaaaatccgttttagtaccggtcttcttcccggtcatattcatcttctgttttgtttttactcttatcagaagtatttgcatttctgcagttctttgtatccattgcgtttttattggaatttcggttggatccatttacatttcctatagaacttctgctgtttctgctttcattttcataattctttgccatttaatctttcctcctgttgcagattaatttcattgcattgttcattatctccaaaagcaggcggaatattcatcaaaatgatattgattttttttccattttatattataatctaacctgtaaaaagaatttacccttcaaaaattttttttacataaccccttatttaattatttatactcccctcgaaacacccggtagctcccctaccgggtgtttctctttggatttatactctccccgaaacatccggcagctccccttttcaaatcccctgtatctctacttctgcattttctgtatctgtatcctgggaagaatgctccagccagatcatatccccttctgaaagataaaattttctctcattatcctgtgccagcccatacatcgcactgtgtccattatgttctacacgaatattcgcatacccttttgtcacagtgaagatataagatcctgcttccaggtctgttcccaccagtagtagatcatcacctgtcaaagtaagaactgtgtccgcttcctcccaggaatcttctgtcaggttgtcatacgtttcctgataagcagagtctgtcctgtccttcaattcttcgattactgccggtacaacactgatcaaaataatcaatgccataaaccatatgacacttcctcttatccgtttcctttccctattgacagttctggcggctggctgtgcatttcctctcacagtctgatacgcaccttgacttctccctgccgccctggtgcctgtccttgtggctggctttgaccttttctgtccagcctgcggatactcctgtatcttcttatcacccaaaggacgttcctcatcctccatcataaccctggctctccaagaggcatgcttataatgatctcttcgattctcattcaggtgatataaaatctcatcatttcgatatggcatgccgcaaagcttgcaccttccattggaaacaggcccgccacacacctgacattcttttctcattgtgaactctccttcctgatcgccaacattgtaatattattttatctattttatataattctttcaaggtgtaaattgccatttacatattttcctgttataattatactattctttgcacagatagctttttattactgtgttaatatataacaaggaggttcctatggaacaactgatcattcccatgggttatcatgcagacctgaatctccacgatacccaggtagcaattaaaactgtcaaagattttttccagcagacactggcacagaagctgaaccttctccgtgtatcagcccctgtctttgttgatccttcatccggccttaatgacaatctaaatggcgtagaacgccctgtaagctttgatatcaaaggccaggagcaaccagctgagatcgtccattcccttgccaaatggaaaagatatgccctcaaaaaatacggcttttcccatggggaaggtctgtacactgatatggtagccatccgcagggatgaggatctggataatattcattctgtctatgtggatcagtgggactgggagaagatcatttccaaagaagagcgcaacatggagaccttgatttccacggttcgtactatctacagcgttcttcggaaaacagaaaaatatatggctgtacaatatgactacatagaagagatcctgccccgggagattgcttttgtttccacacaggagctggtagatatgtatccggagctcaccccaaaggaaagagaatacaagatcgtcaaagaaaaaggtgctgttttcctgatgcaggtaggaaagacccttaccaatggagaacgtcatgacggccgtgccccggactatgatgactgggaattaaacggcgatatcctggtatactatcctgtacttgatattgcccttgagctttcttccatgggtatccgcgtggatgaagatactctggataaacagctgacagaagcaggatgtgacgaccggagagagcttcccttccagaaagcggttctgaataaggagctgccttataccatcggcggtggtatcggacagtcacgtatctgtatgttcttccttcgcaaggcacatatcggggaagtccatgtttctctttggccagaggagatccaggaaaaagcagcacagggcggcataccgctcttataaaagaacaggaacgagggatccattgtgaatatattattttttttaacccccaaaagcgaggtagcatatatttttgaaaatgaaaccctgcggcagactcttgaaaaaatggagcacagaaaattctcctgtattcccttattaagtccggacggcaaatacaccggcacgatttcagaaggagatcttctctggggcatgcagcgtctggagatctcagacctgaaagatgcagagagtgtaccgatcatggccattccacgccgtgccaattacaagccggttcatatcaattctgatatggaagatctggtagaccgtgccattaaccagaattatgttccggttgtagatgatcagggattttttatcgggatcatcacccgtaaagccatcattaaatattgttactctgaaatgcaaaaacgagactgttgatcagcctcgtttttctttatacaaattatgatttcacagattgctccctgctttgagctcttgcagtccttcccaatattctttttctcacaataccttggaaaggaattccttaagtcttggattcttgggatttttaaaaaattcttcagggatattttcttcctggattttcccatcatcaataaataccactcttgttgccacttcccttgcaaatcccatctcatgggtgacaactaccatagtcatgccgctttctgccagctctttcatcaattccagaacttctccaaccatctccgggtcaagtgctgacgtaggctcatcaaaaagcatcacatccggattcattgcaagggaacgtgcaatggcaatacgctgcttctgtccgccggaaagcatgtccggataagcattggccttgtctggaagaccaacccttgccagcagatcatcagcctttttagaagcctcttcctttgtcatcagctttaatgcaaccggagcaagcatgatgttttcctttactgttttgtgcggaaacagattgaactgctggaacaccatcccgattttctgtctgtgacggttaatatctaccttaggatctgtaatatctgtaccttcaaacaggattttacctccggtaggctcttccagaagattcagagaacggagaaatgtagatttaccggaaccggaaggcccgatgatcgctactacctctccctgacaaatatctgtgctgatcccattcaggaccacattggcaccaaaagctttttgaagctcctgtacctggatcaggacttttgatttatcaacgctcattcgtacgcagcctcctctccagtttattcataaagtaagtaagagtcattacaagtgccagataaatggctgctgctgcaaacagcggccaggtaggatcataagtacggctctggatcagcattgcgccctttgtcaaatccatcataccgatgtaacccaccactgaagtttccttgatcaaaacgataaattcattaaccagtgcaggcagtacatttttaaaagcctgagggatgatgatcatgcgcattgtctgggagaaattcagtcccaggctgcgtccagcctctgtctgcccctgatcaatggacatgattcctgaacggacgatctctgccacataagcgccggaattaataccaaaagcaagaccgcccacaatgatcttattcacagttactgagccaaaaataacaaagttcataatcagcagctggatcatggtaggcgtaccacggatcacggtaaggtatacacgacagatcccattcaaaaacctgaattttccattcttgtcatgtgcagaacggatgattgccacaataaagccgatgatcacgccaatgatcactgcgaaaactgtaatctccagcgttgtttttaatccgtccagcagccactgatatctgttttctttaataaaattcagataaaatccatgtttaatattttcccacataattcttcctgttttccttgaaaagagctgttggcaatccatatgtcaacagctctgtagtttacggtataattcttatattctgttacgtattatttatgcctttggtgtcaaaacaccaaaatcctattacacattatttctttacaatgattacctggcttgcatttgcataggtatctgtaaagtcaacattctctttacgatcatcagtaacagtcatacctgctgcgccgaaatctgcttttccggaattcacagctgcaagaatggaatcaaactccatgtcttcgatctgaagctcgtagccaagcttatcacagattgcctgtgcaatatcagcatcaataccaacgatatcgtcgccatcatgatactcatacggctcaaactctgcattggtagccattacaagtgtgccattggaacgatccacatcctctggggactcgtaaggatgctcaccgatctcatcgccaatgtagttcgccatgatatcatcgatcacaccttcatcttttaactctttcagggcaccgttcatcttgtccagaaggtcagtatttcctttctttacgcagatcgcatactcttcttccacaaaagggtcgtccaggatcttcagatcatcattgttctcaacaaacttctgtgccggctgggaatcaatgatcacgcagtcaatctgtcctgcctttaatgcctgaacagcttcacttcctttgctgtaacgctctacagtagaaccctcactctcatattcagaagcatccagatctcctgttgtaccaagctgaacaccgatggtagctcccggaagatcatccttggattctacagcagcagatacgctggctgccatggatacggtcattgctgtactcagtgccagagcagcaaacttttttgaatttttcataaccttttcctcctcttcaggcattgtatgcataaagcctgtatattctttcatttttattttataattctaccatgaatttcttaaaatgcaagagtagacttgaataaacatgcagttttttataacaatttttatagcagtatttcttttcgttcacacttttataacatttttcctttattatggatagcataactttccagaccaaataacacctataaggaggcttgataatatgaagtttacaaaaatgcagggaattggcaatgattatgtatatattaattgttttgaagaaacggtaaaggatccatctgcagttgccagatttgtcagcgaccgacatttcggcataggttcggacggtctgatcctaatccgcccatcccaggtggcagactgtgaaatggacatgtacaatctggacggctcacaaggtgccatgtgcggcaacgggatccgttgtgttgccaaatatgtattcgatcatggaatcgtaaataaaaccagcatctccattgctacgaaaagcggcataaaatatgtggatcttacagtcaaagatggcaaagccagcctgatccgtgtaaatatgggatctcccatcctccaggccacacagatccctgtagttgcagatacggagcaggtgatcgatgcgcctatccaggtagatggacaggaatatcattacacagctgtttccatgggaaaccctcatgccattgtatatgtagaagatacagacagcctggatcttgccaagatcggtccatcctttgaaaaccatgtgaatttccctgatcggataaacacagagtttgtacagatactggatgagcatactgtaaagatgcgcgtatgggagcggggttccggcgagacactggcctgtggtacaggcgcctgtgcagtagccgttgcttccatcttaaacggccacgtttcaccagataccccggtcactgtgaagctgcttggcggcgatcttcagatcttctggaacagaagcgaaaacctggtttatatgacaggtcctgcagtaactgtttttgatggccagatcgatctttccttccttggagaataaaataccccgggatcatggatcccagggtggtacattaataaagcatatgaacatttttacagaaaagccatgatccgttccacaataaagactgccccacaggcgatcagtgcaacggtgagaaggcttttctctttatatgcagcgatcagtgctgcaccaaaccctgccactgctgagatcctgctggcagtagcagacaagatggccggaaatgtcattgcagccaggcatgcgtaaggcacgtaataaagaaatgatttgatatatggatttacaatttctttttttgccagtgtaatgggcagaactctgatcagataggtcacacctgccattaccagaatatatatgtatacattatgactcatgtacttcatcctccttcaccggacacaaataagcagctccgcctgctgtcactaacgtggtgatgatgatcacaaaaccggatgaaactttatttaatcctggtacaactgcaaataatgtgctgactgccatagcagccacaaccaccaaaagcactgccttgttcttctttgccggcggaatgatcactgccaaaaacattccatagatagccaccccaagtgcactcatgataaaatccgggagcaggcttcctgatatggctcccagaagcgttccaagagtccagcccggaattgccatgcacatggcaccataattataaaaagcactcacctttccctcctggctggcacttacaccaaagatctcgtctgtaatgccaaatgccaccagatatctgtgtgcccatggctcatctcttcgcagtttctgtgacagagaaaaggacataagacaatatcgcagattgatcaccagctgagtcaatgccatttcccagtatgacccacctgccacaataatatccagacctgcaaactggcctgctgatgtaagattggtcagggaaatcagtacagcctgccatatgctaaggccggaagacactgacatcattccaaatgtaaatgaaactgccaaatacccaagaccaatgggtattccgtctttgattccttttttgaagctttcattcttcatcggattgttccccctagtaccatatcatatcttagatacataagcccggttaggcagataatttggtctgccctggcgtccgcttaaagaataaggcattgcaaaatatgtatctacagagcttgccagtgcccagtccggatcatacaccttgccattcacctcagcccatccatggcctcctgatgaaatagcgtatacctctttatatcctacagcacttgccataaatgcaaaggcagctccataagaaaagcagttgccttttcctctaaaaaacatgtcttcagcaaaatccatctcccagccatttcttggagaaaatcctctccagctgaaatatccgaaattcttctttgcatattcaaaacagatcttcagcttttctttctttggcatcagcggctttgtgatacgctccactgtctgattggctgcaagcaggatacgaagtcttctaaggcttgcactgtccttttttgcctttcctgtacggtcgatggtgatcccgttcacctttgcagatttaaccatactccctttggaacctctggcaatattgaagtaataataatcattgccgatcttctgccagcctacatgctgtgctcctttttggtcaaaataaaaagtctttttaccgatcttggaaagcccggtaagctttttacccttttcgttgtaataatatatgttctggttctgctttttccactgctttttgtatctggctgcagcctgggtaggtactgccaaaagcattacagccagaagcattacagcacataataaaaatctttttcctgttttctgtttcatttccctctccttatcatccaaatattcttttttctttcaggccagctgcctccgacaaatattttacaacatctgctgccacacatacaacatcttcttcatgcataaattgagttatttcagaatcaaacagcatatttgcctgtggatcaaactcttcatccccatcccaaaacaggacagctatattaagaaaaggaaaaacaggcagcacataccctgcatctccctggggaagcctggtaccgcccagatcttcacatgcctttttcagttcttccacatgtcctgaaaaaacagtctgaagtgtctggatcaccgtctcccgatatgccttttcaaaaggatacaccctctttacctgcctgaaaggaaccagttctcctgaggcacagggattttccacagcataataaaaagtattataaatcaccatttgggtattaaaaccaacctctctgtccggttcctcctttctttggatctttccggttttcctgtccaccctgtatttatgattaaaatagataatataaatataattgtcatctgcgcaaagcctgaacttatttattattttctcctgatccatttcctttagaaacttttgtctccagttctctgtcacatcatcataatttgacattttcttcctcccattagctgatctgccagcggatatgactgccgttttcatcttttgttacgatcagctggtcttccatttcctgcttcagctctgttacatgggaaatgatcccgatcagtctggaaccagatgccatatccttcagcacacgcactgcctgatctctggaatgttcatcaagggaaccaaagccttcatcaataaacatcatatccagatccacagatgcagaagaagcctggatctgatccgccattccaagggccagggacaaagctgccataaaggattcgcctccggaaagggtacgcacttcccgtaccttcccggtaactgcagaatacaccatcaggtccagccctctgtttttcccctcacctgcacgttccagttcgcacaaacgcagctgaaactgtccggcagacatttcttcaaatctttgattggctgcatacaggatctgctgcagataatatctttgtacgtaggtttcaatatccattctggctccggatactttccctgccagcatattgtacagctcttccagtcttctgtgctcctccatgatccttgcccgttcctccatctttggagataaggcatccaggcagtccctatctgccttatagatttctttgatcctggtcagatgatcctgcagctcttccagctcctccagggttgttttcacttcctctgaaagtctttccatgtcaggtctttctctgccatttatgaattccacagcctgtttttgcctgttggctgcatccagctttctttccttataagcctccacctggttctggaattgctccagctgctgattgtcatacaaaagcagttctttcatctgctgcagggtcaggcctttttcctgaagctttttctcaaatatctgttttcccaaagcagtgtttttttccagaacaggcagttcttcttcacatttcgtaagaagagcctccatcttttctacatttgctttgatctgatccagttcttcccttgtctttttccaggtcttctctgcatttgtctttttctctttcatctgagccaaagcctgtaatgcctcttcctttgaagaatagcctttgctttgctccagctgctgtaaggcagcctgttttcccgcaagaaaattactgcattttgttaccagcaaaagagcatcttcactggttttctgcagctcctctttctgtttttccccatccttcaggctcttctgtattcctgccagttccttttcggcctgctccagacggaaattttctttctccacatctgcattccatcggatggaaaaatccttcagataattcagcagttccttccatccgccaggaactggtatattctcctcttgtccaaactccgcctgtttcatctgctgccaaagcctgtccgcttcctttttgaaatatccctgtttttcttcaagcagcttctttcctgtgccggcctgtccagcctttttctcctgatcctcctgtaaaaccgtaagctcctctcccagcttctgaagcccttctcttgtgagggtctgatgttccagcgggatctggcagggggatggatgctccaaagatccacacacaggacagggctgtcccggacgaagctgttcttttgcaagaaagcctgcctgtgcatctaaaaatgcagtccttttcactgtgtactcctggtttttcacatcatatagattccgcgctttctgataatccatctgagctttttctgcctgctttttctgttccacagtatctttggccagctgccacagctgggagagttccttctggaaccggagcatattctcctgttttgcctgccataaggctctttgtctgtccgtaactgacagtctttctccctgctctttccataaaccaagtctggtctccaactctttaagactgatctgggcattttcaagagtctggcctgccagtctggattcctgctctttttctttgacttccttttgaagcgcagccatcttcctgaatatttccagggaagcctccacctgttgggaaacctttgcaaaaatctcctgtactttcttttgctgctcccttgccttctcctcgcttccggcagcctgctcacaggcctttttcatctcaggcaattcttcctgataatgtttgataagggttcttgtattttctacctgtttcttctgatcttcatacctttggtatgtcccctgcagctcctgtgcatccctgatctgccggatctgtatagtaagaagctgcatccgttcctgatcctcttcacactctgccagcactctcctggcctcatcaagctgtacaaactggtggcacagggaatctgccagatttagctcatccctttttttcagatagatactgttcttttcttccacctgcttttccagactctctttttcttttctcagtctgctgcacaatccttccagttttgccaacagattttccatgtcaactacagacagccgttcagactccaagatccgcttctttaataaactgatctcttctatatccggatctgcttccggaatcaccagatgagaggtttcggtctggcagaccgtacggatccgtccgatctcagacagtttttccctttttctttttcccagttcttccacaatatcctgaaagatctgcgtatgaaacagcttccggaaaatctcttttttggtatcagacttcgcccgcagaagctccataaactctccctgtgcgatcattgccacctgcataaactggcttttagtcagtcccagaatttctaccagtctggcattcgcttccttctgaggatattcccgcccgtctggcataaataaagatactttttccttttcctcaatctgcccctgtcctcttttattgggtctgaaatgacgaggattacgacgcaccacatatatttctctttctccgccgtatctggcagaaaattcaaattccacataaggctcaacggaaggatctgcatactggctttgcaattctgtgccgtttttcttatttacaccggaacttgcttctccataaagtgcaaaaacaatggcatcaaaaatcgtggttttcccggcacctgtgtcgccggtgatcagaaacagattctgatcagcctttgtaaaatccaatatcgtcctgtccctgtaagaaccaaaagcctgcatggtcagttttataggccgcatatcagtgtgcctcctttacgcagttgatcacatctttcagaagctctctttcctgctcatccatgtccttcagaaaagaacagcacagttcaaaaggatctttctgaagctctccatttacttctctgctgtaatctgctgtacgcagattctcacgtcgtatctcaagaagtccgggaaaagcacagcgaagcctgtcctgcatatccataatatccagatctgccttgtcgttaaggatcactgttacataatcctcacagctttgatttaccacttcttccaatgttccccgtatcacccgtatctgatgcaagggctcaagcggaagcacgcttacacatacatctccttttgcgcccatttctacctgcaggatcccttttcgctggcctgcctcactgacagatgttgggaaaggagtcccacagtatcgtatcacctcactgcccaccttcattggcttatggatatggccaagggccgcataatcaaacggctcaagcacactgctttggacttcgtcaatattacccactgtacggatttccgaatccattctcggaatatcttctgccctggtgccggatggcaggtaaaactgatggctgacgatcacgttacgttcttctttcctgatactttccctctggatcaacctacgcacagtctcatcataggaaagattattaccattttcatcactgccggtgatagccttcacagtggatggctttacaaaaggaagcaggtaaaaattcacttttccccaggaatcatgaaggcttactttctctatatactccccttctctttgcggtggctgcccgatcatgtacagattctgtctagcaagtacagaccggaagcagttcactctggatgcactgtcatgattaccgctgatcatcataactacagtctccggtgctgcctgtgcaagcccctggataaaacggtcaaacacttccactgcctccgcagatggcactgccttatcgtagatatccccggcgatcacaatcgcatcaggtttttccttctgtacgtattctgcaattttcccgaaaataaattcctgatcctgacgcagatcccggttctgcagtttcaaacctatatgcagatctgataaatgaaaaaacttcatacatcctgcctctttctgctttatatgtgctttttatgtgttttttatcataccataatccgcacgcaaaaaaaagacagggcaggtacatcttttatgcactctgccctgcttattactgttcactttgttcgcagtaaccctttcttcttattcacagcacttaatcttcttatagatatcatcatctcatagctatccttgtttcttattcacatgatcttcttatatccacccttgtttacacatttcaccatctgctccagttcctccatctcccagctgcaagcctgcccagggtctcctttgaaccacacgcaggttccgcaggaggagcttaatgtccttggcaccggcatgatccggctttcaaatccggcctctttacactgcttgtggaatgccatggctccaaaatgggaataaaaagtagctataaacgcttccttcattttttcagtgtaaggatataatcctcaccctcttctttgtaagatactttatatccctgatgggttgcaaaccgtgtcacattttcctttgccgtaggattatccaccaggatctggtacatgctttctcctgcttccagtgcctttttggtcaggatcaccggttccgggcaggaaagccctcttgcatcaacagttctcatttcaggctgctcctttctttcttatggaattacaagctgcaatcaccaacagtactacaattcccactaataccgctgctttgccatttgctgtagggccttctgcggaagatgccaggccaaaattatgtgcaatagcagcacctgctgccagcccgatcacagtaactgcagaatctgtatttccttctcctgccagtaccagctgacgcataggacacccgccaagaaggacacagccgaaacctgccagtgccattcccaatgcattccaaagtccgtcggtatgtgcaatgggctgtcctgtaaatccaggattccagaatcccaggattgcatttccaataaatgcagctacaagaatagccaggaatccactaagaagcttccattctccaaacagcactacatcacggataccgcctaccatacaaagtcttgttctctgtgccagtgcacctaccaccagtccggccacaagagagatcccgattgcagcgtgctttgccccagggcctccatccgtttctgtaaaatggataaatgcaggtgcagctatcagaagtgcaaggatcaccagctgcagcaccgtaaaaatcgttccttctgttttctgcatggaataagaacgcttcagagtatatccttttttcaggaaaacaacacccagaaggattccgcctacaaatccaatgattccaaataaagcattaaaatctccgcctgccagacgcaggatcatacggaaaggacatccaaggaacatcaggcatccgatcataacaaacatagcaatgacaaatcttgtcactggtgcagagccgcctcttggcttaaattcctttgtaaccaaagccaggataaacgcccccagtacaagccctacgatctccggacgtatgtactgtactgctgctgctgaatggaatcccaatgctcctgtggtatctctgataaagcaggcaatgcagaagcccatgtttgcaggattaccaaagaaaaccagccctacagcaatagctccgataataagtcctgctgcaatgatcaggatggtctctttttttgtggttgaatcattcatactactctttcctccctacctgaatatacagaaattttatcattaaacctgtttttattccaattaattattaaaatgttttttgtcgatttatagattttatcaatatattatggtacactgattacaagaatgcctcggcaggtaactgtgacatcactgaacagttatgaatcaacaccatatctgctaagtatgtttcctatggcctgctgagtagctggtaaaattaacagaaagtcaggtatctatcatgacagacagaatttatttcgatcaggcaagtacctcttttcccaaagcccctggagttgccaaggcaatgtatgcctatcttactaacctgggaacgaatgtgaacagaggctgctatgaagatgcttatgcagcagaagaaacagtttttaataccagaaagcttctggcacagctttttcactttccactgacaaaaaatgtgatcttaacaggcaatatcacccaaagcctgaacatgcttttaaagggactgctgcggccaggcgatcatgtacttgtatcttccatggagcataatgcagtgatgcgtccacttgtccagctttccagagatggcatttcctttgaccggatcccctgccgcagggatggaaccatgatccttgaacaggcagaagttatgatcaggccttccacaaaagctatcattactttacatgcctctaatgtatgtggcacccacatgcccctggcagagcttggtgatatctgccgcaggcatcatctattcttcctggcagatactgcccagacagcaggtatctttccgctggatatggagcaattacacatagacggtcttgcttttacaggacataaaggtcttcgcggtccgcagggtaccggtggttttcttatatccaaacagctgtcagatcagatggagcctttaatttccggaggcacaggcagtgtttcccatacagaagaggttccttcttttctgccggatcggttcgagccgggaactcctaatcttcccggtattttcggcctgcatgcagcacttaaggagctgactcctctatccatggagcagatccgtacaaaggagctttctcttaccggatattttcttgaaaagcttatggaactggatccttctgaaaagcatatccgtatcattggaagaaaggatctgtccatgcgaagtgctgtggtttccatccagactttggatgaagatatggcttctgtggcatggcatcttgatcatgactatcatatcatgacaagagtggggcttcactgtgcaccaaacgcccacaaaacactgggcacctacccagccggcaccatccgcttttcctttggtccccaaaacactaataatgaaattgacttctgcataagggcgctgaaagagatcctggatctttaaggcttcccggaaaggatacctatggaatttaaacaactggaagcctttgtggcagtagtggaatataatagcttttcggaggctgccaaacatctttatcttacccagccaaccattagttctcacatccgttccctggaacaggagctgaactccaagctgatccttcggactaccaaaaagcttacggttacagcacgggggcagcagctttatgactgtgcggtaaatatactgaatatgcgcaacactttggtggatgaatttactggcaatgataaaaagatcatagaccttggtgtttccactatcccctcctcctaccttctgccggagcttctgggtgctttcagcagccagtcacctaatgtctactttcatgcctgtcagtcccacagtcagggggtgatcatgcgagtactggatggcagtatagatctggggcttgtaggctgtaaaagtgaggacaaggattgtcagtttattcctttctgttatgaccaattggtactggccacccctgtaaccccctattttcttaaaatgcaggaacagggtgcacagcttgccgattttctggaccagccctttatcatgcgggaaaaaggttccggaacaaaaaaagagctggaccgttacctggaaagccagggaatcagccagtcttctctgaatattgtggcacggatgaatgatctggaagctgtgcgaagatccattgtgcaaggcatcgggatttctgttctttcctaccgctctgccagggatctggcagattccagacagctgctgctttttcctttggataaagtatcatctgtgcgtaccttttatattgtatataataaaaaccggatactgaaaagccatgtaaagcagtttatccactttacagagggcttctaccagaatccggaatcaccttaaaaatcaataaatgcatttgggctggtaactgggaagatactgagccgttgcatattttttataatacagattcgatcaatgtcctggtgtaatctgttttaggatgatcgatcacctgctctgttgtcccatattccaccatctttccgccgttcaggaccataacatgatcgcaaaatgcctgcaccagtgcaagatcatggctgataaaaagaactgtcaggttctcattgtgttttagttctatcagcagttccagtatctgcttctgcacagtcacatccaatgcactggtagcttcatcgcaaatcaggatggacggctttacagccagtgctctggcaatggctgccctctggcactgaccgccactgacctgatggggatatcgctgtgcaaattccttatcaagcccgcatttttccaaaagcagctccactctctcatttgtttctctgcgattcatccccatattacgcaggctttctccaatcccgtctcctaaggtatgtcttgggtcaaaggattctgcaggattttgaaataccatctgaatgtcctgatatatgctacgcaatgcctttcctttagcctttgtaatttcctgatcacctaaaaatatctgtcccctggccacatcttccaaacgggtgatcatttttgcaatggtgctttttcctgagcctgattccccaacaattcccagacattctccttgtttcagattgaaactcacatcatccactgcaatgaatcgcttattgccagatatgaagcttttacttatatgttcagcctttaaaacagtttctgccatttcactctgcctccggaagctttctgtggttcaaatgaagcacagagcccataagttccctggtgtagctatccttagaatgctcaaggaccttttttgtttctccataatctctgaccagtccatctttcagcaccagcaccttatctgccatttttcttactacgcctatgttatgtgtaactataatcatagatgtatgatactccttgcgcagcaacagcaattcttcaacaacctgcttttgcactgtcacatcaagtgcactggtaggctcatccgcaaggagcacctttggctgcatgatcatagcgatacagattccaacacgctggttcattccaccagacagctggaatggatagctttccagcacacgttcactatcatgcaagccgattttttccataatctccttggcacggcatcgaatctcttttttactgactttctcatgttctgtcactgcttcatacacctgtgctccaaccttgcgcacaggacataatgcagatttgcagtcctgaaataccataccgatttcttttccccgatatctgcgcagctgtttttcattcatttcagtaagatcgtgatccttataccagatatttccttttgttactattccttcctgtcccaaaagtcctgtaattgcctttatgatcgtacttttaccacttcctgattctccaacaatcccaagaatctctcctggtttcaggtcaaagctgatatcctgtatcacttcttcaccttcatatgaaactgttacatgttctatacgaagcaatgaatccattcaaattccctcttagcacttaattaatatccagatccgcagtaatctcataataatcacatggatgagcttccagtcctgtcacattggattttgttacgattcccatattcaaatgtgatacaaagaaaaatgcgtcatcatccaggatctgctgttgcagcttcactgccagttcacctcttttttctttgtcaaaggtctggtgcagctgatctgtcagctttgttacctcttcgttctgatagtttccataatttttagcacctgttactgtactggtaaagaaatattccggatcaccggtaggcgccgtggtggtagagcttacatatacatcgaaatcgccgttttctgcataagttctgtggtctgacgtattattcacctgcaggtcaatgccgatttcttttaaggtagcctgtgcatactctgctaactttggctgttccagacgagtaggataagtaagccagttaatggtcagcttctgtccatctttatctgcatatccatcaccatccgtatccttccagccagattcctccaacagcttttgggcttcctccggatcataggacactgtattcactgcatcatttccataggaaaagctgcttggaaatgctccttttgccggaatcccccggccttgcataatgactgagcagaaaccttctttgtcaattcccatttcaactgccttacggatattctggtcctgcatcagctctgaatccatattaaactgaccaaagaagcatctgctggtggcgcaggaatgaatggtataatccggattctgatcaaataaagcatagttatcatactgaaggccataggttccctggatatctcctgtctgtaatgcagctgtcagggcacttccatcagcaaaagatttcaccgtgattttgtcaacttttacatcaccgccccagtagttttcattcttagtcagatcgatctgtgttggtgttacattcgtagcaatgtaaggacctgttcctgctacatttgcagatcctccttctccctgaataccatattccatatcaataatggcaccatatggatcaccaagataattgatgattgcaggacagggttctgttgtgtaaatcgtcaaaatctgtccatcagcttctatatgatcaattttaagatcatatggtgcacggtcgtgaacactgatcagatcttccagacactcctttactgcctgggcatccatagccctaccgctggaaaacttcactccgtcacgaagagttatttttacagttaaatcatctacaaattcatagtctgtagccagccatggctcaacctccatgttgtcattgtacttaaaaagtgtttcacccacaccataacggatggcactccagccagaataattatcatgaggattcaagcctgcatctcccatttcttcactgtaaccggttgtaccatacacaaaacttttttctccctctgcatacacactggatgctgtggcagcaataagcattgctcccgtcaaaactgctcccaatatttttttcttcatccttttattatcctttctttttatttctttgttttggatccatataatctcttaatgtatctcccagaaggttaaaaatcattactgtaataaaaattgccagtccgggagccagcaccatccatggtgagatctgcagcatacttctgccgtcattgatcatacttccccattctgccattggcggctgcacccccagtccaagaaaagacaatccggcaagctccatcatcattgttccaatatccagaacagaggtgatcagaatggagccaaatatattaggaagtatatgtttgaatatgatcttgcaggtgccgcttccagatagtcttacagccattaaatagggcatatccttttgagtcagtgtaagtcctcttgcaagcctggcatattttggccatccgatcactgccaaagcgatcaccgcattctggatcccacctcccagcacccctgcaacagcaagggcaaaaacaaggcttggaaatgcaagaaacagatccgaaatgcgcatcagaatagtatcagcaagtcctccgatccatccacagatcatgccgatcacagttcctgccaccgtaacaatacacacaagcaaaagtgttgcataaatactggtagtacttcctgcaagcactcttgaaaacatatccctcccataacgatcggttcccataatatgggccaggctgggcggcttctgtgcctgtagaagatcctgtgcatatgggtcatatggacaaatgtgctttgcaaatgctgccactaatagcaacagcaaggtaagaaaaataaagaaatatagctttcctttaatatgattcttcttccctttctttgcagggactttaacacctttttccgtctgtttcatgttctgtcacctcccagccgcacccggggatccagataatgatataaaatatctgtgatcaaattgaccaccacatatatgattgccatccatgccacataggcctgaataatgggataatctcgcattgtaatggcatctactgccatcttccctaccccatcccacataaaaatagtctccacgatcgtggttccgcctaacaggcttcctattgacagtgccaacaacgtgatgatcgtaatcatggaggatttcataacatttttccagataataacacttcctcttaccccccgtgccctggctcctgtcacataatctttgttcagttcttccagaaccgttgtacgcacctgtcttgtatatttagatgccatggaaatcgcaagcgtcagtgttggcaaaaccagactcaaagccatattatccgttgtaatgacaggcagccagccaagcttaatagaaaacaaatacatcaacaccagtgctgcaaagaaattaggcatagaatttccaataaaactgaagaaacggatcaaataatcaacccatcggttatgtcttactgcagaatagatccccagtggaatcgcaatcagcattgtaagaactactgaggatacggtaagcacaattgttgacggaagcttttcgataaacgtatcatatacgtctcttttggatacatagctttttcccatatctcctgtaatcattccgcaaaaccattttccgtattggacaagaaagggcttatccaagccatattcttttctggtggcatcaatcacttcctgtgaaaccgctgatcctgcattttcatacatatatgtaactgcatccccacctgccaaacgcatcatcgcaaaggataaaaaggtaatccctataagaatcgggattagttgaagcagtctttttaaaatatattttgtcatggatgctcctttatttttgaatagatcattcagataatcgactggtaagaaaatccagaaattcctgtatgcattcttccggctcctcgtctttatggatcacatacccaaaacatactctgctttttcccggttccagtggtattccccacatggttccggttttattttcagaaagataacttccgcttatattggaaacattactgttcttcagcatcttttccataatataatcgctgttggttaaaacagaaatatccatattcttccatttaaaacggctgtcttcaactgctcctatatcaaaaaattcatcctgataattttgtatgaaccgcatcttttccaaatcatccggtaagatcctgtctctctttaaacgataaaaatctgtattttgccctggatacaaaatggtatctgtttcctgcattatgacaaacttcattttatttttacccagttcatgcaaaaaactccccatttgatgatttaatatataaacaaaacctatatcatccacataatccctgacacgttccataacgtctcttactcctgctgcagtaatctggaaatggtatccccgttcactggttttattataaaaatcaacaaactgatttgcgaaccaggaactgggattcatggagattctgatccattttgtcatcccatgggaaaccatattctccagggcttccatttcattggtgattttacaggcatattgatatacctttttccctactggtgttaatcgaatacctctgggtatccgttcaaacagctggattccaagggcatcctccaggcccttgatcaccttacttacgcttggctgtgtggagtacaaaattttggctgcatcactaaacgaccccgtctgggcacatattttaaaatattgtaactgctttaaatccataaatttctccatatattttgtgagaacaggattggatatctttcttccttatccctgctggttacttttcggtccacaataaaaacattggtgtaggattataaaattcatccttttcacaataaatcctgctgctgatgcccaaatccacgtagattctttttacacctaatgtttccagtgtctgcagatcccaagctggtcggctgcatgaactgatgggaagctgatgcttaatctcatcacattcccgcatcatatcacttcccagcatattgtgtgcatgcatcttaggaagtaaagaagtatctgtactgtcttccagtccgtaatttgcatcaaaatttaacataataccgccatttttcaaaacccgcatccactctccatatgcttttgacgcattaggaagcgtccaggtcagatttcttgaaatcaccatgtcaaagcagttatcctcaaagttcagtgtctctgcatccattacctggaacgtacagctcactccttcttcttttgcaaggcttctggcaccttcgatcatgtttggagtcaagtcaataccagttactctatgtccttcctttgcaagaagtacagaaaaaaatcctgctccacaacctacatccagaattttcaattttctgcccttttcctgcatgcatttatggatttcattcatccatcttgatgcaaggggactgtgaagttcatctctgcgctgcttcagaaagctgtcactgcgttttgtccagtaattggtgattctttccttcctgtcatcatcttcgtaactaatctgcccataagtgatcatgggaccatcctgcagcacctgcagggaacgtgtctgatacaggatcactccatcactataggccacacagcattccagttctttcccttcataatcccgcacatatccaagtacatctccggattcaaacaggtctcctgcctttttctcaggataccataaaccattgtatgaggcatcctgatactgaacatttttcacttccaaaggataatacttgcgataacttttatgaccatcataaattccaaggtaccgcaaaatggtgcgtacatccctcttcatggaacgcacctcttctgcatcccagcatcccattccccctctttccagaagcacacttggaattccctggaaggcagcataattgtaagcaccaccggaaactacatctgactgtaccatataaggcacatccacctgctgagccatatgtctggaaatttccacagttcttacatctgcacgtcctgcatagtatacataggaagtcagttcctcataatcgtctccgctatgcagatcaatatagtaatctgccttttcctgcagttccttaaccactgcaaaagccagcctctccagtttttttccttctctttttccaggaaaaaggcggttcagatttccactctctgccatatctgcactgccttttctggactcaaaagcctctcggcaaaccacttttacaagaatcactgtaccggacattttctctgcattcagatcctctgccagttctacagcagactggattcccacatattctcctggatggatcccagctgtgatcaatacagtctttcccggatttttcccacggatcaccgttatcggcagagaaaattctccattgccaaggattaaaaagccatgtgcccgatgccctggctgcactgtcagatcacctaatgtataaccttcccatagttcttgttttacagcctgtatcatgaacataggcgttgatccataattcagtttttcttctgtactccacaccctgttccatacattggtgtcaactgtaacagaagcatgaagctgtgtcagcaccttttcatcccatgccggacgctgcttcccggacaatggaacctgtctggcaatctcttccatgcgatcaatatctgtacagagataatggtcatccaggttttccttttctacattttccctgtccttatcataggccagccgtttctcctcatcatacagatatccgtaccaattggcgtcaaaattcaaaagctgtccaccgggacgaagcacacggatccactcccgataagcctttaccggatccggcagattccaggtcagattcctagtgatcaccacatcaaaagtattatcctgaaagtccagatcttgggcatccatccgataaaatgacacatgatccttcttatttccaagatacttttccacattctctttagccttttccaacattccttctgtgtaatccacagcatccacataataaccttcgcctgccaggatcacaggaaaaaaacctgggcctgtgccaatatccaggatccgcaggctttccctggctttctgtggaaatttatttttcagaagcataagccaggcttctttttgtgtgccaagaagctctttttcatttacctctgaatatccttctgtccgtgtattccaataatccttaatttctttcatcagttctgtcaactgtatttcctccgcaagtctcttccaactgtttcttctatcaatttttaatttcttatttcaatctttcttttcc

SEQ ID NO: 133 - DNA, 3165 bp, Unknown
  gut microbiota DNA sequence
gttctgcaagcccccaggggggataaattattatttgacacataaaaacaatttgctgaacttcacgaagtatggtatactaaataaaatatacaacaagtgcagttccaactgtctgcatcagagaataccccatctttacgattccttaacattcgctgtaccaggggtatcaaagctatataagattgaggtgaaacattatgaaatccaatgaatctgcagagaattatctggaaaccatactgattctcagtaagaaaaaacctgttgtgcgttctgtagacatcgcagaagaactgggctttaagaagtccagcgtcagcgttgccatgaagaacctccgtgagaagaatcacattacagtgactccggaagggtacatctaccttaccccatccggtcagcagatcgctgatatgatttatgaacgtcatcagtttctttctgcatggctgatcagccttggcgtagatcctgatacagctacttcagacgcatgccggatcgagcatgtgatcagtcaggaaagttttgaagcgatcaagaagcatcttgctccggaaatgcaataattttctcaaacaaaagggtgcccattgcctgtggttatacaggatggacaccctatttttattctgttattcctgatctgcttttttctcgtagaaaacagcagaaaacggtgataattttaatgcattttcccctgctgggagaatcttgtctttcttagtatatttcctgttgccgccataaacttccatatcacttgccatcagaagatcatattcctcttcaagccggatctgatattcctgggtctgatcagagaaattaaacaatgccaggattgtttcttcttcgcttctgcgctcaaaaacatatacgcatttttcttcctgatgacagtcgatccattggaaccctttattttcaaagtcatgcctgtacagtgccggatgttccaaatagcaatgattcagttccttcataaatctgtggaacttctcatggataggaaagtccaatagcatccagtccagatctcctacctcgctccattcttttagctgagctagttcatttcccataaaattcaatttcagaccgggatgtgcatacatatacatataaaaggcccttgcctgtgggaatttcccgtcatatcctccattcatcttctgtgcgatggttgctttcccatggaccacttcatcatgagacagcggaagaagatacttttcattatagaaatacatcatagaaaatgtcagcttatgatactgctccttacgctgctccggagaagactgaaaataagaaagtgtatcattcatccatcccagatcccatttgtaatcaaagccaagtccgccttcagaaacagccttcgttactccctggtaaggtgttgaatcctctgcaaacagcataacatccggtaaccgttccttcagcccctgattcatggtcttcaaaaacttcagagctgataaattctccccccgattgctgtctccctgccagtagatcagattgccaacagcatccatacgcagtccgtcaaaatgaaattcctgcagccaataaagagcacaggactgtaaaaagctgcaaacctctcctctggaatgcataaaattacagcttccccattcattgcgtcctactgcaatattaggatattcatataaagcagttccatcataattagccagtgcataatcattaacagcaaaatggaccggcacaaaatccaagatcacaccgatctcatttttgtggcactggtcaataaaatacttcagatcttccggctttccgtaacgtgaagtaggactgaaatacccggttccctgatatccccaggattcatcacaggggtattcacaaagaggcattacctctatataattatatccgtttttcttcagataaggaataataagacctgccatctcccgataggtgtaccatctttcaccagagccttcttccgggcatttccaggatccaaaatgcatttcataaatattaactggtttattctttctgtccttgccgtttttctgccactctttatcatgaaatctgtagtctttagatgtccaggtaacagaagctgttcctgggcgtaattcagaataaaatgcataaggatctgcgtgatctataaaagaaccatcatttttgtaaatccggtatttgtacatctgccctgatgtcactcccggaatatcgcattcccagaaattgccatcataaatacggttcataggtgtttctgtccatccattaaactcaccgatcacacttacacgattagcagccggggcaaatgtacggaaggtgacacccttttcccacacatgtgctcccagaaattcatatgcctgaaattccttcccgatataaaaattataaaaatccatatattcctccattaaaaccgacaccagttgttttttttcgattttagtgtataataaaaatgattttttatccaccaacaatccgaaagaaatgtaggttatccaaccaatttaaaaaatcgtcgggaggctgctttatggatatacgtattgagaaaacaaaacaaagcattatcaatgcttttattgaaatccggtcacgcaaggaagtagaacggatcacagtgaaagaattatgtgaaaaagcccggatcaataaatccactttttacgcccattataaggatatctatgatctttctgatcaactggaaacagaactggtggattcgattatggagaatttcaaccatcctgaaaatctgctccaaaatcctgctgattttacaaaagaaatctttatgggatatatggctaaagataccctgatccgtacccttttttccggaagccgcagcaagttccttgttcagaaaatggaatctgccctgaaagcccttgttttctctgtctatcctgattatcgcaaggatccccagctgaacattatgttgtcctaccttctttatgggagttattacgctttttatgaaaaccgcaagtacggagacgcctctgtgatcaattcgatttcccagttcactgccagacttttacctgcatttacataaataaaataaaaaaagaaggagctgcctatttgaaccgctccccgtcaagtagacaattg

SEQ ID NO: 134 - DNA, 806 bp, Unknown
  gut microbiota DNA sequence
aaacggaaaaataattagaaaatcggaacaagatcctgctttggttcatatgctaatctgaaaagcattttttgagggactatatgggggcagtttcaaaaattcatgccatggaagaaaatgtagacaggggaaagcttcaggtaacaataagatcaggggcagacaatcatccggtagaaaatgcgttagtcagaatatcctataccggtgacccggacagctttattgaagaggtacgcacagacgagtccggtcagacaccggtactggaattaaagactccgcctttggaatacagtatgagtgctgatcaggaaaaacagccatatgcagagtatactgtgcaggtggaagctgaaggatataaaaaagaagaggtggccggaacagaagtactgcccaaagtactggcaaaacagccggtgtttttggcagcacggaatataacagattcttatcagaggattgtgattccccctcatacattgttcggggattatccgcctaaaatcgaagaggcagaagtaaagccaatagaggaatccggtgagatcgtgcttagcaaagtggtaattccggaatacgttgtggttcatgacggtccagtgaatgatccatcagcttccaattattatgttcggtacagagactatataaaaaatgtggcaagcagtgaaatctatgccacctggccagacgataccatccgggcaaatgtgctggctatcatgtcatttacattaaaccgtgtatatacggaatggtaccggaataaacagtgattcatgactgaggctgggtga

SEQ ID NO: 135 - DNA, 581 bp, Unknown
  gut microbiota DNA sequence
tcttttcattttttcgcaattcatctcccacctgcagaggaaggagaattcttgctatatttatgttaaatctgcatacatctaaatgccggtatgctcttaataagtttgcttcatattcttctttatgctgtgaaacttccctgttttcacgataataaaggtgatacatttttttagtcatatgttttttgattcttgtgtataaatagcatatgctacgaatcctccgtaagtttcattactgtgttgacttttcctttaatccccattatagttgtaattatattatttacaatcatcaaaacattaaaaatgtacagtttatcaacacattaaaaagaactgtggagaacttagaatgttttaaacaaaccagaaatattttcactccaaaaacgtgaaaacaagatcattatatcatactacaaggagtttcttatcatgaaatactcaacgaaattaagtgatactgttcatgtgatggttctaattgctatcaaccaggaaaaatccctctccagtgcctcaattgcagaaagtgtccatacaaatcccggctttgtacgccagcttatgtt

SEQ ID NO: 136 - DNA, 235 bp, Unknown
  gut microbiota DNA sequence
aaataatctaagactgcttgttgtttcaattcttcggaatattttttattccctttcaatgtgaatgcatttgctcccataaattcatagtttcgaatccattgttggacagatgcgagacttacatcaaacatatgggcaattcgccgttggctttcttttccatccagatatagatttacagcatatatcttatcctcaacagatacttttcttttagacataaaatatgctc

SEQ ID NO: 137 - DNA, 25900 bp, Unknown
  gut microbiota DNA sequence
gctacttgctcataaccgaataactgctccgcagtttatcagaaggagcttgcactcctcctgatacaagcaagtccccacccactgcttattgcttttcgcaattgaagcaggggacttacttgattcggttaaatatccggagaatatgtttaagcagcttatctgtatcagctgcattaacttatctgttggaaatgtagagaaagaatggtataatcatgtctgttaataaatgtatgaaatactaacggaggaacatatgtacaaagccattttatttgatctggatggaacattaacagattctggggaagggatcatgaaaagtgtgcagtatgcactggaaaagctgggaaagccggaagatgatctggaaaaattacgggtgtttgtaggccctccactgatggaagaatttatggaatatgcaggcgttgatgaagaagctgcacggcagggagtgacctattacagagaaagatatgcaccaataggtgtttttgagaataaagtatatccggggatcaaggatatgctggtgcagctgaaaaagaaaggatatcttctgggagttgcctcttctaaacctgaatatttcgtgaagcaggtactggagcattttgaactggatgtatattttgatcagatggtgggcagtgaactgaatggcggaagatccaaaaaatcgcaggttgtggaagaagtgttgcgtcgttttcatctggagaatcacagagatcaggtgatccttgttggagacagggaatacgatgtgttaggagcaagagaggcagggcttgactgccttgcagtatcttatggctatggttccgtggaagaactgacaaaagcaggacctttgaaaattgcaggctctgcagaagaggtgctggattttttcgaataagcccccgcaggaaactaaaaatgccgatgcagatctggagagcaatttatcccatggggattcattttggaatatcacagatcgtggcttatgcaggcttgtatttccttgtattacgaaacgggggaaataaagatgcttattatggacaggtaatgatgcttaccggccttaccggtcttctggctttgattcctactttgtttttttataaaaaagacctggcagcgagaaagtatggaggaatccttaaggaaaaaagaacaagaaatcttggattttgggaaggcattttattgttcttcatgggaggtgcccttgctcaatacattaacatgattgtaaatattctccttatggggtctgatgccagtatgaaatatcagaatacagtggaaaggatgacaggtggaaagactttactttcaatgatcctgtggattggtattgtggctcctttggcagaggaggctattttccgatggctggtattcttaagatttcgtgataatctacggttgatcacagccgctatattatcaggtgttatgtttggaatttatcatggcaatctggtacaggggatttatgccagcattcttggtactgtgtttgcacttctcctggagtggagcggcagcttatggggaagtgtactccttcatatgggagccaatatctggagtcttataagtggaactgcagcagcctatattatggaaaatgaggaaagaatcatggcatggggcatgctggctttaggattgttgattctgactgtttttggaatgcgatatttttataagaagtatacaggacgaaataggataagagagatatagggaatatccgaaagctgaaggaatgtgaaaagaaaagcgaaattgacttgcaaaagagaaggagatttccagattgacaggtaatagaactgctgtcaggtatgttttagagtacatatctggcagcagtttttctctggagatctttttgcagaaagaacctgatgatagaggtgtttcttctggaaacgttttttagatttttttataaaattttaataaggcgaagccttgtgttaggaatgatagaatggtatcataagtgtattaagacgattaacacactagcaatagaatcaatatcagtgatgggagttaatttgtagtagaaaggagttgcctatgatcgtacttgattatcatgaccggcggccaatctatgaacaggtcacagaaagattcagacagctcattttaagtggggcgctgacagcaggaagccgtcttccatccgtgcggcagcttgctatggaattgtccattaatcctaatacgatccagagggcttacatgcagctggagcaggaagggctggtctatccagtaaaaggaaaggggaactttattgcagacagtaccagtatcaggcggatcagcaagaaggcttacacccaggagatgcgtgaactgatctataaaggacagacgctgggctatgacgaagaagaattgacagaattagttcgggtctgttacaaggagggaataaaatgatagaagtgaatcaatgcagcaagaaatttggcatgcttcaggctgtcaataaggtatcccttcagatcggaaacagagaggtctttggtctggtgggaagcaatggagccggaaaaagtaccttgctgcgtatgatggcagggatcatacgtggggatgaagggaacattctggtagatggtacagatgtttacgaaaatgagaaagccaaaagcagctttttttatattgcagatgacagttattttccggctaattttacaccaagggagatggctgtttattataaaaatgtctatccttcattccggatgcagaagtatgagaagctgatgaagcagtttcatttggatgaaagaggaaagatcaacaggttttcaaaaggaatgaagaaacaattgcttgtgatcctggggattgctgcaggcactaagtacatgttgtgtgatgagaccttcgatggactggatccggtgatgcggcaggcggtcaaaagcctatttgcagcagaaatcatgaaccgggatttttcaccggtgattgcttcccataatttacgggaattagaagatatctgtgatcatgtagggcttctgcatcagggagggattcttttgtcacaggatcttgaagaactgaaattccatatacataaagttcaatgtgtcctttccgattcgcagaaagaaaaggaactggcgaaagaactggacgtattgagtatccagcatcagggatcgctccttctgatcacggcaaggggaacacgcacagaaattatggaaaggatccaggcaaaaaaaccgcttttctgtgaggttttgcctttaaccctggaagagatttttatcagtgaaacggaggttgcaggctatgaaattaaaaatatattctggtagacagattaaaatgaatataaaagagcaagtatggatccctgtgatcttgctgattggtttttttctggcttttcctgtagccgaacttctgatgatgggcaattggtttggcatgaattatacctacgatcagatccagatcctttatgaaaacctgtggaaagacgggttcctcaggacaggctttgcaattacggtaattgccgcattgctgaacagcgtcagtgaattctggtatctttattcatcaaagaaagtggacttttaccattccattcctgtgaaaagatccaggatgttcttttctagaatgtttacagggatcatattctttgcaggaccatatttgctgatggaatttcttacagtatgtattggcgcaatgcgagggtgtttcagcttacatttaatgaagctggcattttatatgttcctgattcatttgatctgttatctgctggtatattttactattgtactggtgatctgtattactggtaattttcttatgggcgggctttgttttgctggagtttttctgtatggatctgtgctttcaagtctgatcacgggatatgaagaaacctatttcagaacctatgcccgaatgttatacggagtgtgcaaggttttaaaaagagatgtatcgccacttttcctgggaaatgaactggtagataaatacagtcagggtgaactgaaaggatttctgtttcctgttttgtgcgtggtactggttttgacagctgcgtccttttgggcttacataaaaaggccgtctgaacgtaccggtgaagctttgatctatccttttacccaggtggtgatccgcattctggtggtgatccccactggccttggaaccggattgttcttttcactgtttccggaaaacacttcatccagggatgcctgggagatctttggattgctggtaggagtcatattgtcctacagtcttcttgaaatcgtttatcagatggattttcggaaaatatatgtccattgggtacaattgatcctgtgtggggttttggcgattctgatggcagcaggatttaaaacagatgtaatcaggtatgacaggtattttccgaaaagcggacaggtagaaatgatcagctggaatggtgttaatatggagtccagcgattatgcggaagaaaaagcagatggtcgttatgtgattggtactaataacgtggaggccatgattgatctggggaattctgaggatctgctgcaggcagtgaaaaaagcagcagatcgtacttataaaaatataaagaataatgttggtaaagaagacctggaagagtcaggaagaatggtaactttcgggtttaccatgaattccggtacaaccatttaccggaattatattgtagacagtcagattcttaaggatattttacaggcagcatacagggaaggcgattataaaaaagacaggtattccattttgaacattgaatctaagtatctgttcagtattaccggtatattcggagatggtgtttatactacactatgggaaagggacaaagaaaaaagaacagagtttctggaggcattgcgccaggacatactggaagctgatgcagaagttctgacaggacagccttgtggcaaactttatctgagctttgggcagattccccaggagagaacccctgataatatggtgccggacggaagagaatgtttaagcggtgcaggaggcatggtttatatattcccccaattcagccgtagtctggcgcttcttaaagaagaggaggatctttctatatctcttcaggatgttgatgttgaaagtgccgatgtggtatttgacctttcagaagatgccaccgttttatctgatccggtacagtatacaggaaaagaagaattggcagaattaaagaatatactgattccaccagaacttgttccggaatgggaaacctttgattctccatgggcagatcttacattaaacatccgcggtaaagaggctgtagagggatgggctatccgtcctggagaaaagacacctgaatttattttattggatcgggagcgtgcccaggagggtatcctgggggaaaatgaaagtgaggacagtactgatctgataacgaatctggaagatacaacagatactgaggtaatggatatttatgagtaaaagtaaaaagactgaaaaaacacaagtacgtttggatcgtttccttgcagatgcaggggcgggaacccgcagtgaagtcaaaaaaatgatacaaaaaggcagggtgctggtgaatgatcagccagcatccggtccggaacagaagatcagcccggatctggacagagttttgctggatggaaaggagcagacggaagcaccggattacttatattacattctgaataaaccggctggttatatcagtgctacagaagatccaaaagataaaaccgttatggaactgcttccaaagatcgcaaggagaaatctttttccggtaggacggctggataaggatacagaaggcctgcttttgatcaccgatgacggagcactggcgcatgagctgctttctccggcaaagcatgtggataaaacctattatgcaaaagtgaaaggagtggtcacaaaagaagaccaggaggctgtaaaaaatggtgtgaacattggggaagcgaagcttaccatgccggcaaaactggagatcctgaatacagacggggaatactcagagattcttctgactatccgtgaagggaagtttcatcaggtaaagcggatgatggaagcagtaggcaaaacagtggtatacctgaaacgtctttccatgggtgggcttgttcttccagaagatctttctatcggccagtggcgtatgcttactgcagaagagcgcaaaatcattaaaagactgtaaaaatagcatagaattttgaaaaatcctctttacactagcatttttcttatgttataatacaacggttgttaaagttaaacacgcacggtgattctcatggatggtgccctacggtgtgtggttgggtccggacggaaggcgacctgtgcggaagaaaaaaccaaaaaaggagattacaacaatgagcgttatttcaatgaaacagcttttggaagcaggtgttcatttcggacatcagacaagaagatggaaccctaaaatggctccgtacatctacacagagagaaacggtatctatatcattgatttacagcagtctgtaggcatggttgatgatgcatacaatgctgttgctgatatcgtagctaatggcggaaatattctgttcgttggtacaaagaagcaggctcaggatgccatcaagactgaggctgagcgttgcggacagttctatgtaaacgagagatggttaggcggtatgcttaccaacttcaagaccattcagagccgtattgcaagactgaaagagatcgagacaatggagtctgacggaacatttgatgttcttccaaagaaagaagttatcgctttaagaaaagaacttgataaattacagaagaaccttggcggtatcaaagagatgaagagaatcccggatgcaatcttcgtagttgacccgaagaaagaaagaatctgcattcaggaagcacatacattaggaatcccgctgatcggtatctgcgatacaaactgtgatccggaagaacttgactatgtaattccaggtaatgatgatgctatccgtgctgtcaaattaatcgtttccaagatggcagatgctgttatcgaggctaatcagggacaggcagatgttgacggagaaatccaggcagagtctgaggagtttgcagctgaggaagcagcaacagaggaataattgtcaggccggggaacggcaaagacagatgatcgaataacaggaggaaaatacaatggctattacagcagcacaggtaaaagagttaagagaaatgaccggcgccggcatgatggattgtaagaaagctcttacagctacagaaggcgatatggataaagcagtagagttccttcgcgagaaaggtcttgctaccgctcagaaaaaggcaagccgtgttgcagcagagggtctttgcaaggctcttgttgcagaggatggcaagaaagcagttgttgttgaggttaatgctgaaacagactttgttgcaaagaatgagaaattccagggctacgttgctgatgttgcagcacaggcactgaatacagaagctgctgatatcgatgctttcctggcagagccatgggcacttgataccacaaaatctgtaaaagaagctcttgcagctcagatcgctgttatcggtgagaatatgaacatccgtagattcgctcaggtaaaagaggacaatggtttcgttgcttcctacattcacatgggtggtaagatcggtgttcttgttgatgttgagacagatgttgttaacgatgccatcaaagaaatggctaagaatgttgcaatgcaggttgcagctcttaagccgctttacacaagcgacagcgaagtaagcgctgactatatcgagcatgaaaaagagattcttctggctcagatccagaacgacccgaaggaatcccagaagcctgagaaggttatccagggtatgatccagggacgtatcaagaaagagttgaaagaaatctgccttcttgaccaggtatacgtaaaagcagaggatggaaagcagactgttggcaattatgtagcacaggttgctaaagagaacggcgctaagatcacaatcaagagctttgttcgttacgagaccggtgaaggtatcgagaagaaagaagagaactttgcagaggaagtcgcaaaacagatgggaaaataatctgatatttgcagatcttaaataagactcataaaacccttgaaaatccagtattttcaagggtttttcttatgcccggaataaaagaagccagcaaagcaacttcgaataatgagaaatagttcgccatcctggtagaaatagtaactataaggtttttatacatttttttgctcctgttttctgaaaagcgacaaaaatttttaaaaaatgcttataatatagggcgtattcaaaatttgactattaagatttagaatgaaagtggttataatgacgagaaaaaataatttttaaatattttcattatagctattgactatatagctactatatactgtatactttggttcatgaagagagaaaaactaatcacatgtatgaaaatcatggccgctgtggcggtctgcgcggctggcgttgcgcttttagttctggcagactggggattggatcccttgacgaattttgaatatgccttatcccggaaactgcatatttcgttggggaaagcctcgatgctgtttgaagggctgaccttttttcttttctttttttcgaatcggaagctggtaaaatttggctcttttgcattttgtttcgggataggtccctgtattgatttctggggatatgtgtttggttttctggaagggcagggaggatttgcttttcgtatgggctgcctccttttaggaagccttttgatcatccttagttttgcttactacataccgctgaattatggcttgcagtcactggacatgtatagtgtgtcgatagcttctctcttaaaaaaacagtatggagtgggtctgacgattacatactgtacattgattttgctggccgcattgctgggcgtccgaccgggagtcgtcacatttgtggctacatttgcttatggagctgcgattgacggagtcagaaaactgtttaaatggtaaatataaattatattttaaaattatattttaaggtaaaaccgttggaaaggaggacatgaaaaaaatacgtatttaccggttttatcagtctacatatcagattgaaacaaaaaataatagtgatgttagggaggaaatatgaaaatcacaggattagatatcagtaaagtaccattttcaatgagaaagtcctatatggcagtaaattatttgtttgaggattattatagcggatatacaagctgtacaggtttttcgagtaatctggataaaatgccattcgtgtctacccctggattgtatctgcgttctgtttgcacaaagggacagaataacaatatggaaatgattcgtttcattccgctgtataatgggcaagaggttccctacgagatacatgcaggatatgagaaagtggaacttatctgtcaggaagggaaaatagcattttgctatgcggatgaaaacagactgcttatcagaggtgaaggtgaaaaactgggattgcgtctggattgcgttatagaaggccgctccagtttcctggttcagattccggtaaagggcggaagaagctatcataaactgacaaatcatatttcatttgataattacggaatatttacatccttgggaactgtaaaagtttaccaggaatgggaagcagatcatcttttgaacaccgcatgtctgtatgatatcacagcagaagacggtgcgtttcagtgtatgatcaaggaattacgcacatatgtctgggcgaatgtggaaaaagaaggctgtgttgattttgaacagacggtacgcaatacaaaaaatgcatttgatgagttttgctcaaagctgccggaggttccccaagagtacaaagaggcacagaaactggctacatatctctgttggtctggttctgtagctgaacgtggatatctgaaacgagaatccatttatatgacaaaaaatattctgtgcgctgtatgggcatatgaaagctggctgatagcggctggtttgtgtgagacagacagcgaacttgcatacgatcagttaatgactatgctggatagccaggacgagttgggaggaattcctaatttcaaaggcgaaggaatggaaagctatgaggccagtatgccgccaaatctgggctggatcgtgatgaagatgctggataaaatccagtttacgaaaaatcagctggatgaaatatatgacaagatgagaaaatacacttacttctatctgaatcatatggatgaacaggaaagtggtgtgtttgagtatcatcatggatatgatgcgtgcggagacgatgacacagttttccgtaaggaattgaatattttgagccctgatttgacaactttaatgatcttacagatggattgcctggcaatacttgctgagaagctggataagaaggttgaggagaaacagtggagagacctggctgacaggagtctgaaaggactgatcaatacattgtttgacgaaaagaatctgccatttgccagaaataacattacaggcgagagaatttacgctcaaagtccgatcctttttactcctttgatgctgggagaacgtcttcctttggaaatcagaaccagtattataaacgagttgaaaaatggaaagtacattacagaatacgggttggcatctgaaagccttgacagtaaatattatcatgcagacggattcttccgcgggccgatttggtttactatgacactgacgctgatagaaggactgacgaagtgcggtgagcaggagatggcggatgacctgaccgttaaatattgtaatctgatacgcaacggaggctgtgcggagtgctataatgcagagactggagcaccattgaataacaaggggtatacatctacagcagggacatttttgatacttttacattattatttgagataaaggagaaaagtatatgaaacagaaagctggaaaattatcatttataatacttgccatgactatgacaatggggttgatgacaggctgttcgggaaagagcagtgagaagagtgagagcaacgatgataaaattacattgaatgcaatcagctttatgggagaagatacgaaaagaaatgggttcaataaagtaatagaagcttatgagaaagctaatcccggcgtagagattaaaattcagaacctggattacggaacctttactacaacgcttcagactagaattggagccaatgacgcaccggatttgattttcggaacagctattttgaatcaggagttggtaaaatccgggcagatagagattctgaatgattatgatattctggatcagtttacagaggatcagctgtcctgtatgacaatagagggcaatacctatggtgtgccgttggacagaatggtaatttgtgccttttacaataaagatatgtttgaagaatatcatgtggaagtgccttcaacattaagcgagttttatgaagtgtgtcagacttttgaggaagcgggagttactccgtttatccgtccttacaaggacgcagcgtatattcagtatgatttagacactcagttatatccgattattgacaaaatagatgatgttggtttctttacggatctggaatctgggaaaacgtcattttcttcttcaaaggaaatgaaagaagctttggagttatttgccaagagattgtcttatttgtcgggagacgatttaggaacagacccggctgtaagcagtcagctgtttgcggcgggagagagtccaatgtatatcaatggaagttggacagtaggagatattctggcaaataatcctgatggaaattttggaatttttgctgttccgatttcagacaacgaggatgaaaataagatgtatgcggcggttgacgatgcctggatggtaagttctaagagtaagcacaaagaaaacgcaattgactttttgaaattcttaacatctaaggaaggcctgcagatatggtcggaaaatgcgaaagcaatcccaattaacggcatggaggtaaagagtctcgatccgttgcttcaggaggtttcggaatatatccagtcgggaaagattgtcaatgttgataaatacgtattcttttccggagaggctacagacaaatttaataagaatatgcagttgtttgtaaatgatccagatgtggaaaaaacactgaaaacactggattctgaattccagattcaataaatcaacagaatagggggaaacggaatgataagaaatttaaaaaattcatcaaagcgaaagttgtgcaatgttctcttcctgcttccggcctgtattgtatttgcagtttttgtgctggttccgtttcttcagggaattccgctgtcactttatcagtgggacggatacagtgatacaagaacttttgtaggtctttcaaactatttacaggtttttaaggatccgaatataacggaggttgtggggaatacattgttctttacattgctctatctgattggctgtaatgtgatagggttgcttctggcactgctggtgaagaagacgtcaaagctgaatgcagtgttgagaacgattttctttatgccttttgtacttagtatgattcttgcaagctttatgtttacatatatatattcggatgtattttatgcattacttggaattaaaagctttttgggcaatgtaaactatgtaaatccggcaattgcggcgattgcaatctggaaggatagcggttactgtatgattatttacattgcttcattgcagatggtgccgaatgagtattatgaagctgcaaggatagaagggtgcagtgcaatcaagtcatttttcaatatcacaatgccgttgattgttccggcgtttacagctaatatcacgttgattcttgcttggggaatgcaggcattcgactatcagatggcggccaccggaggagggccaggtcatgcttcggagacagtgggaatgtatatttataaaaatatattcgtttaccataatgcgggatatggccaggcaattggaattctcttgacagctgggctggcggttctgaccattctgctgaccagttatctgcgaagaaaggaggtcgagatgtgatgtcaaaagtaaagacaaaacaaatcgtcattagcatggttgcgattttacttgcactgattatgctatctccattttacattggaatcatttattcctttaagacaaaacaggaaattacactcacggggctaagccttccaacacattttgattttcagaattatgcggcggttctggaggatggaagtttttttaaaggaatgcttaacagcatttatactacgattccatctgttatcttgcttatgattatatgtcctatggcttcatatgtgtttgccagaaataagaaaaggatttataatgttttatattccttatttctggttgcaatgctgataccataccagtcagtgttgcttccgatttatgcagatatgagagactggggaatgttaaacacatttgcaggcaatgtatttgtgaaggtggggtttcagctctccctgagtattttgatctgtacaggatttgtaaaagggattccgagagacctggaagaagcagcttatatagatgggatgggatatttcggaaccttttggcggattgtatttccattgatgaaatctgtgctgatatccattttgattatcaatgcattatttgcatggaatgattttcagttgtccacagtaacactcatcagcgaggaagtacagacgcttccgcagttgctgtaccgatatttcggcgtacattctgtagatttgaaccaggcattcgcagcgtttaaccttgcgatgcttccactgatcattctctatctcttgttgcagaaatatattacggacggagtaatggctggatctgtgaaaggctaattccgggaaaggcataaaagtggttagaaattatataaagccaggagaatttgcgaaaatggtaggggtgaataagcagacgttgctgtactatgataaaattcatctgttttcacctgaatatgtagacgatatgggatatcgttattatacattcacgcagctggattgtttttatgccataatgactttgaagactatcggaatgtcactggaggaaataaaagaatactttgatacaagggacgccgaaagaacagcaaagcttctgcaaaaaggcattttggaaacaaagaagaaagttgcggagcttgttacgttgtccagagaaatgaataagaggattgagttgcttgaaaaggcaaatcatgtgacctgtgggaaaatatacatagagcaccatgagacgcaatacctgtattgcacgaaatatatttccatggatgcaaaggaaatcgagagacaagaaatctatggaaagatgattgggtatcgtgttttgcatcagcttcactgcggaccggcgatcggaggaatggtggaaaataaatttctgatgaatccggttggcaatactacgctgtattgcaggtattataccatagtagacgagccttgcgaggaagatactgaggatggtgaatacctggaaaaaccagagggaaactatctggttctgtattataagggagcgtatgatactacctataaggcgtattcccagatattggaatatgggagaaaacatcattttcggctgggagagttttcttatgaggaaagctttattgatgaggtgtccgagaataatccagataattacgtgacccagattactgttccgtttcagtttgagtgaggtaatacttgtaaagttgtttgttttagagcaatcggggtgcctgaagtttattcagacaccccgatttgataagtttagatattataaacagtttttttcaatttatatattattagttttgcaaaatgttattactttaagtgtgaatttgacagataatgtaatgttgggaagttatagtgaaactgcattagcaggagcggcagctgtaaatcagattcagtttatttttcaacagtgtttagttggactgggagatggagtagtaattatttgcagtcaatattggggtcgaaaagaagtaaaaaatatgaagaaattttcagcgattgccatgtgcagtgcaatttgtctcgcttttttattgtttgtatttaccagcactgctcctgatcatgcggctggcttttttacttcagatcatatgattattaaagagggaatggattatcttgctattatccgttttacatatgtactttttgctataatccagattcttcttgcaactcttcgtagtgttgaagttgtaaaaatagcattccgtttgtcagtgctggcattttttcttaattgtggaataaattatttgcttatttttggaaaatttggctttccagagttgggaatcaaaggtgctgcagtaggaacattgtgttcacgtattgttgaatttattgttctgctcatgtttatatggaagaaagagacgaaattaaagcttaggcttgcagattataaatgtttagataaaagtttttgcaaggactatttccgtattacaggccctttgttgatcactcaggggctgtggggattgaatacagcgttgcagacttttgttttagggcatatgaactcagcggcaattgcagcaaacagcgtttcgtccacattatttcttttgattaagtcagcttctgtaggagcagcatcatcagcaactgttataatcggaacaatcatcggaacaggcgaaatagaattggtaaaacgctatgctaaaaaaatgcagaagatatttttatgcatagggttgtgttccggtttagctctcttttacttaatgggaccttttttgagtctgtataatttgcagccggaaacaatgaaaatgacaaatacatttttaaatatattatgtattgtggttgttggaatgtcttaccaaatgccaacaaacagcggaatcatccgcggaggcggcagtgtgaattttgttgtgaaaatggatttgataagtatatgggcgattgttattccgttgtcattttttatggcttttgttgttaaggcatctcctgttgtagtatttgtctgtttaaatttggatcagttatttaaatgtgttcctgctttcttgaaagtaaactacggaaattggataaaaaagctgacaaaggattaatagaatggcaatggttgttgttaaaaaacaaaatataccatgaatagaaagaaaaatttttcttgacttctgaatattttggtagtaaaattacttcagttcgttaaacaactaaaacttcaaaggaacaaattccttgaagggaaaaagtaggagcagaaaacctgtctacagagagctgcatttggtggaaagcagtgtcaggcctgttttgaagatcatccctgagaagagaaatcgaacgttactgtgacaagtagatttccccggctgttccccgttatcggaatcgcgtatgtcagtacgttgtcttttcgtacttgtttcaaaggagaaacagggtggttgcggcttatatgtccgtccctagtttaggggcggatttttttatgtaaataacgcaatcgtataaaaggctaaaatcctgacaagtagccaaaggaggaaacatcatgaaagtctttaaaaaaatcatgaatgcagtagcagcagtggaaaaatttattcttgtagtatctactttgctgatactgatcttgactgtaggaaatgtattttcccgtaaagtcatccatcgttcctggtcctttaccgaggaacttgtggttgcagtctttgtacttgttacattgatggctgccgcattagcatgtcgggaaggggaattggtcaacctgtcgctggttacagaccgtcttcctgaaaaaatgaaaaaaccgtcagtgattctgagcactatcctgtgtgtgatttttactgccattttattttggtttggcatggataaggtcctcacgcagcttgcaaatggaaaacgtacctttgtattgaactggccggagtggatcttctggtcttttgttcccattggatccggatgtatgattttacattttatagaattttgcattgatttttgtactgataaaaataaaaaggaggataaataaatgataagtgcggttttatttgtttcattttttattttcctgatcatgggcgtgcctattgcgatctgtctgggactgtcttctgtgtgtgcgatcctgtattcaggaacatcgctgaccatagtagcgaccaatatgtatgccggaatcagtaaattcctgcttctggctattccttttttcgtactctccggaaatattatggcaaaagccggaatttccaaaagacttgttaaatttgtagatacctgcgtaggacatagaagaggcggtattgctattgtgtgtgttattgttgcctgctttttcggagcaatttccggatccggtccggctacggtagcagcacttggtgcagttctgattcctgctatggtggaaagaggcggctttagtgctcccttttctacggcattaatggcaaccgcaagttcgatcgccattgttataccaccaagcattgcattcgttgtttatgcttctattacaggcgtatccattgcggatatgtttatggcaggtattgttcctggcatcctgatgggttttgctcttgtgatcgtggttatggtagaagccagaagaaagggtattcagcctgaacagaagaaagcgagtgctaaggaaagatgggcagcctttaaagatgcattctggggattcctgatgccagtgattatccttggtggtatttacggtggtatttttactcctacggaagcagcggcagtatccgttgtatatggacttttcgttggtatggtgatctaccgggaagtgaagctgaaggatctgtttgatatttgtgtggaatcagcaaaaacaaccggcggaatcatgttgattgttgcatgtgcgtctctgttttcttatgtatgcaccaagtttggtattgcagatgcagcttcccagcttcttggcagtattgcacataatcagtttaccttccttctgatcgtaaacattattttcctgattgcaggatgcttcattgatgcaaactctgcaatgtatatttttatcccggtaatgcttccggtgtgcaaagcacttggttatgacctggttgcttttggtgttatggcaactgtcaatttggcaatcggacaggtaacacctccagttggagtaaacctgtttgtggcgattggaattaagatcaaaaaaggtttggaagttactcttcagcagatttccaaagcagttatgccgatgctggcagcctgtgtagccgtacttctggtagtaacttatgttccggctgtatctgtggctcttccaaaagcccttgcaaaaaacggctcttattcaggaaatccggaaacaggagacagcggttcttccgcagcatcagcagcaggagatgaggatcattcttttaatgagatcggggattacagtgatcttggatgggaagaaactacctggaactttgcttgctccacaacagaaacatctacctgggcagacggtggccgtaagtttggcgaactgatggaaaaagctacaggcggaaaggtgaaagttaacgtatatgcagcagatcagctgacaaacggcaatcagtctgaagggatccaggcattgatgaacggcgacccggtacagatttccatgcattccaatctgatctattctgcatttgacccaagatttaatgtagtatctctgccgtttatttatgattctgtagaagatgcagatgcaaaatttgacggagaagccggagagaaattaaaagaaatccttagcgagtacggacttcattgcatgggaattgcggagaatggtttccgtgagctgaccaacagtgtgcgggaagtaaaatccgtagatgacatgaaaaacctgaagatccgtgtagcaggttctaaccttcttatggaatgctataagagatggggtgcagatgcaaccaatatgaactggtctgagacgtataccgcacttcagcagaatacggtagaaggacaggagaatccgctgccggcaattgatgcggccagcgtgcaggaggttcagccgtactgctccatgtgggacgcaatttatgactgtctgtttttctgtatcaaccaggaaatttatgacggactgactccacagcagcaggctgttgtagacgaggctggccagaaagcagtagagtatgagcgttatatcaaccgttccggtgatgaagagatcatgaaccgctgggcagagaaaaatggtgtaacctttactgcaaaagaggatatggacattgattcctttaaagaagctgtggatggtgtagacgagtggtttattgaagaactgaaaggccagggctatgatgatgctgaagaactggtagaagcatttaccggcattggagattacagtgatcttggctggaaggaaactacctggaatttcacatgctccacaacagaaacttctacctgggcagagggtggccgtaagttcggtgaattgatggaaaaagctacaggcggaaaggtaaaagtcaacgtatatgcagcagatcagctgacaaacggtaatcagtctgaaggaatccaggcattgatgaatggagatccggtacagatttccatgcattccaatctgatctattctgcatttgatccaagatttaatgtggtatccttgccgttcatttatgattctgtagaagatgcagatgccaaatttgatggtaaagcaggagaaaaaatgaaggaaatcctcagcgagtatggacttcattgtatgggtattgcggagaatggtttccgtgagctgactaacagtgtacgtgaagtgaaatctgtggatgatatgaaaaatctgaagatccgtgtggcaggctctaatcttcttatggaatgctacaagagatggggggcagatgcaaccaatatgaactggtctgagacatatactgcgcttcagcagaatacggtagagggacaggaaaatccgctgccggcaattgatgcagccagtgtgcaggaggttcagccatattgttctatgtgggatgcaatctatgattgtttgttcttctgtattaaccaggaaatttatgatggactgactccgcagcagcaggaagtagtagataaagccggaagaatggcagtagagtatgagcgttacatcaaccgttctggcgatacagagatcatgaaccgctgggcagaaaaaaatggcgtaacatttacaacaaaagaagacatggatattgattcctttaaagaagctgtagatggcgtagacgattggtttgtagaagaattgaagaaccagggctatgaggatggtcaggagctggtggacgcattcaaataaatttccggttcagattaaaagtaaaatcagaaatcagcgaatgactcagaaaagaccggtgatccgcagggaacaccataccagcagcagagccataatgttgttcataagtttatagtggctgctgtagaagtgcttcagaatgtttcctgcaaaagcccagatcaggtttccgagggcaccaaggaacatcagatataaagcaaaaagaaacagcataaaaacaccggattcgtagggcaggatatatgcggagaacatagtcagcccatagataatgatctttatattaataagctgcagaaaaaagcccatcagccatgtgggctttttttcgtggctgctttgcgtcggcggctgtcttttgaaggtctgccaggcaaggtaaagcacgtaagcagctccaagatatttcattacaggttgaatcccaggaacaatgctagacagagcagtacaaaatattccggaaagacacattaatgtaagggaaccggtccaaatgccggtcataaaaggcagatttttggaaaaaccatatttactggcagtggacaaaagcagaatgttattggggcctggtgaccatacggtcaggatggcagaaagggtcatttcaataaaaatggataatggcatgaaaaaacctccttttggaataataataaaatgataacacaaataatggaattaatcaaaaatcatattgcaaaaattggttataatcaatataatgaaagcggattctgaaacaagaaggaatcctgacgcaaaagccagaagcggagtctgacttctaagcacaaagaaaaggagaatgggaaaatggcaaaaattttaattagcccttcaaaatatgtacagggcgcaggcgaaatgaaaaaacttggcacctatgctgcaaattgcggaaaaaaggcactggttctgatcagtgcaggcggttataaaaggattggaaagctggtagaagacagctttgcaaacaacagctgtgaagtggtttttgactattttaacggagaatgctgcaatagcgagatcgatcgtcttgtgcaggtcgttaaaaataataattgtgaccttaccatcggtattggcggaggaaagatctttgatacagcaaaagcagtggcctattatgccggaactcctgtatttatctgtcctactatcgcatctacagatgcaccatgcagtgctttatctgtaatttatacagcagaaggtgtatttgagaagtacctgttccttccggcaaatcctaatatggttctgatggacacagatattattgcaaaatcaccggttcgtcttacagtagccggtatgggagatgcacttgcaacatattttgaggcaagggcatgcaaaagaagcggggcaacttcctgtgcaggcgggaaaacaacagaggcagccatggcactggcagagctttgttttaataccttgatggaagaaggcgtaaaggcaaaacttgcactggagacgggtgtatgcactcctgcagttgagaaggtgattgaagcgaatacacttctttcagggattggttttgaaagtgcaggacttgcgggtgctcacgccattcacaatggatttacagtactggaagagtgccatcatatgtatcatggtgaaaaggttgcgtttggtactctcactcagctggtactggagaatatcccacaggaagaactggaggatattattttgtggtgtattgaagtaggtcttcctgtaactctggcagagcttggtgcggatcaggtgaccgacgagcagctgatggcagttgccaaaactgcatgtgcagaaacagatactcttcataatatgccttttgaggttacacctgaaacagtatttgctgcgatcaaggcagcagatgcttatggcagatattatctgggtgaagagtaattttatcaaaaaatgtataatgatgtataaaaatacagccttgtcaaaagcagggctgtatttttatttacgcgagcaacgagccaaagtccgtgcttgcacgagaccttggcgactgccgcgataacttgagaaactcgcggagcgtgtttctcatagttggaacagtgcgtgatggaagctgtttgatgcagaaggcaatcttacttgtcagggtttcttttgaaggatttttagaaaagttttgtgagaaaatgattaataattaaaatagatgactgtgaaaaatataacaaaaacggatcgagaatattatgctgaactgtgcgaaaacacaaaatataaagttcatgcaaaaaactatacaggtaaaaatatacaagtaaaataaaaaactaccttgcataatagggaaaaatatgatatccttatgctaaattgggaaagaagtagaacctgttggatatgacagtgcttttcaggggtgtttggcatatggatccggcagggagaaggtattttaaagggtgcatatatggtacagggaatacgtttcctaaggctgagataggtgacgcatgacagcagtatcatttgcaaaatattatataatgggggtggaactaatgaatagttcacttatctggtacgcagtattggttgtagtagttgctgcgttcgtctttgtattcttcaattacgtgaaggttaagaagcttgaagaaggaacagacgagatggtagagatggccgggatcatccgcagtggagccggtacatttctgaaagcggagtttaaggtgatcgccattatcgggatcattattgctctggtatttagtttatttgtagaagcaacaagtggtattacttttcttatgggtggtctgatgagcagtcttgtctgcatcattggtatgaagagtgccacttatgcaaatgtgcgtactgcaaataaagcacgtgagtcactttccatcggtgagaccgtaaaggttgcactttgcggtggaagtgtgagtggtatcgcagttcaggcttttggtatgttcggccttctcctggtgctgatcatctgggggattgatgcagatgctaccggtcatggacttattgcgaacatgaactgtaatccttctattatgagagttacaacatattctctgggatgttccattgttgccatgtttaacagggttgcaggcggtaactataccaaggctgcagatatttcttctgatatccttgctaagatccgtcatgacatgcctgaagatgacagccgtgtacccaacgtaatcgcagactttattggtgacaatgttaatgatattgcaggtaactgctctgaccttctggagagttttgtagctactatcgctgcctccattatgattgctgtcactctgtttgtaaatgatattgtaaccattccggaagaaacattcacacggatgattcttttcccggtaatccttgcgggagtgggactgatcggatgcctgatcggacttacctatgcttctgttcgtaagatgggcgatgacccgtcaagagagctgaatcttgctacatggatttctgcgggacttacggttattctcagcctgatcgcatcctatgtattatttggaaatgttgaactgtattctgaaatgaaagccggatgggcttctccgtggatctccagtattctgggcatcatcagtggtattgccatcggaagtattacagaatactatacaagtgacaaatacaaaccaacccaggaacttgccaagatggctacagagggcgaggcatttgttatcaccaaaggtgatgcgattggttcccgttctgcactgttcccaatcctgatcattggtgttgcattgtttgtctcaggtaagatcagcggtacatatggtattgctatttctgcacttggtatgctttcttttgtaggtgctactgtttctattgatgcatttggtcctatcgcagataatgcaggcgggctggcagagtcctgccacctggagcataaggtcagggtgattacagataagcttgattctgtaggtaatactacagctgctatcggtaaaggtttcgctatcggttctgctgcatttgcaactgtttccctgatcgttgcctatgttggtaattatactgcaaatggggatgagccggttctgaatatcgcttcctttatcgttgttgcaggtggattgatcggtggtgcactgatcgagtatttctcagctatgcttactgacaataccatcgaatctgctaagctgatggcagatgagggtgacaagatgctgtctattcctggcgttttggaaggcaaagtaaaaccggattacaacaagttgatcagtatggctgctaaccaggctttgaagaaaatggtagtgccatctattatggctctttgcattcctgtgatcggtggatttgttttcggtgtacagtttgttggcggtattctggtaggtgcaactatcgttgctattccaagagcactgtttatgggtaattccggtggtgcatttgataatgctaagaagtatattgagagtgaagctctgcctggccacggcaaaggttctgcagcgcataaggcagctgttactggtgatacagttggtgatacaagaaaggacgttgtaggtgttgctctggatatctttattaagagtatgtctacagtagccaatacacttgcttccctgttttcaaccattactttgatccgctaaaagaaaagaataggtgcagggttatccctgaagaagaggccttcatccgtctgggtgggggcctttttgagggtggggaaatacaggaaaataataattgacaaattgagtatgttgctgttgcaggttgcagaaaagatatgtttatatatcagggcttcgttttcggatttctcccgtgcgcttattatctctgtcatttgccaaactcacgcctacggcgttcagacacggcaaataacagagaagctagcccggtcgaaatctgcgaaagcctcgcatgatatataaccaagatcttttctgccctgcaacgaacgatactcttttgtcaattgttgttttcctactcttttttggagactatttgtaacgataatcttggaaagtctacaattttaagatataataaaaataaatatatagatgattgtagaataatgataaaatatagcacattaaccgaatcaagtaagtcccctgcttcaattgcgaaaagtaataagtagtgggtggggacttacttgtatcaggaggagtgcaagctccttctgataaactgcggagcagttattcggttatgagcaagtagc

SEQ ID NO: 138 - DNA, 818 bp, Unknown
  gut microbiota DNA sequence
atacctttaattaaaagcggaggtattgtgtatggatgctaaaactgggttagcgagaaagatacatgaagacattcagtctgaaataatgaagtactataatcgggttggaattacatatcgagcagacgaaaatgccccggaaaaaaccataattgattttttttcttatctttataaaaggatacctgtgctgaaaagaagagtggaatactctaacgaactgcaagccaaaattgacagaggagaactttcggagaaggaaatagaagtcttaaagaagtacaagaatgcctttgaaaaaggaatggatatgaatgcctttttatccaatcaaacaagtgctcctggcaaagtggattttttacgatatacctggcatttatatcatttgcacttaagtgaaaatcttaatgtgaataataaaaacaatcgaagcaataaacagttgctttgtatcataaatgatgattgtacttattttgtggacatgatttcacatcctgaaaaagcagagaattattttaaactgatttatcttaagatcatacagagaaataactggatggagcatattggttttttggagattcctagaatggtacccggatcacaagcattcaaagttacaagtgaaaaggatatttttgaattatacagcaaaggacctataaatatccttttggaagttgagaacaaaggatacatttcattggactcaataacttcaaccagaaatccgcaaagatcaacgaagcagatgaggataataaatagaaacatcagaaaattgaaggatcgggcagatgattataaag

SEQ ID NO: 139 - DNA, 226 bp, Unknown
  gut microbiota DNA sequence
gaccttttgcaataccacccaccaatttaaacggtccaaaagtgtcatatcctttacagccaaattttccaataatgtccgttttcttttctttcaaaataacttccagtgatttatatgctgcatttccaccataagtacagatcataaatacctttttattttccggcagattttctgaagcaaactttaagattgtctgatgaaattttgaaaaataaatacc

SEQ ID NO: 140 - DNA, 62565 bp, Unknown
  gut microbiota DNA sequence
gctaacattttcgaacgctttgaagcccgtcgccaagaggatttgaacctccgacccctcgcttaggaggcgagtgctctatccagctgagctatgacgacacatgtgattttatatattccaaaaccacatcgacaattgtactatatttgcacctaaaaggcaaggtctaaatcaaatttagcttttaaaaatgcagctgtccctgaagccagatgattcctttaaatcttcttcccacctgcggttctccaaatagatcctgtttgttgatgcatatatcaaactgcatatcattactttccactgtcatctgataaaggttttcacctgtaagcacattctggaagcttacaacatctctgatctctcccataatattatactggtcacattcaataccatatggcataaaataggaatcgacgatagtcaaaatatcatcattcacaattcgctcggaaatcattgaataagtgtccatatcttccattgtcaggctttccatggcttcctcgtcaccatttctggcagcctcgatcaaattggtacgatttcttgttgattcctgggccactatcactgcttccttatctttctgaacaggcaggagaattgttccctttttggcaagtccggtaagggtcaatggctgcccgccaaaagttccctttgaactttcaagtatatattctgcaggattttgcaaataaaaaatcaatgttacaccaattctaagatcatcacaagcacctgcaaaagattccttatccgcatgtcgttcaatcgtaactttctcctgtgtggtaatccctgtccccctaaaaaaggggaaggaatattccacctgaaactgattgtcttcatcatactgtccgcagacggtgatcccgcaatcacatccataatttttagagaattcagcaaaagcaccatccggatggttctccacaacatatttttcgtcataagaatcaatcacgtcgcggatcaattcctgcatttcttttctttttgtgatctttgaaaatccgattgatctcaaatagctgtgcacgaaaacacctcctgttttgctgtacgtttaatgacactttattatttaaaatatcaatgcattcttgttttgcttcaatattgtgctggaaacgccttacatatgtgtattatttattggactttttctcgatctttgtcattccacccatatatggctgaagtgcttttggaatattaacacttccatctgcattcagattattttcaaggaatgcgatcagcattcttggcggtgctacaacagtattatttaaagtatgtgcaaggtatttctttccatctgctccatttacacggatcttcaaacggcgtgcctgtgcatcgcccaggttagaacagcttcctacttcaaaatactttttctgtcttggggaccatgcctctacatccagagattttaccttaaggtctgccaagtcaccggaacagcattccagggtacgtaccggaatatccaaagaacggaacagatctactgtattctgccacaacttatcaaaccacattttgctttcttcaggcttacatacaacgatcatttcctgtttttcaaattgatggatgcggtaaacgcctctctcctccagtccatgtgcacctttttctttacgaaaacaaggagaataacttgtaagagtctttggaagttcttcctctgggataatctggtcaataaatttaccaatcatggagtgctcactggttccgatcaggtataaatcttcaccttcgatcttatacatcattgcatccatctcagcaaaactcataacgcctgttaccacattgctgcggatcataaaaggcggtacacaatatgtgaatcccctgttgatcataaaatctcttgcgtaagcgattactgcggaatgaagtctggcaatatcgcccatcagataataaaagccatttccggcaactcttcttgcactatcaaggtcaatcccgtcaaagctttccataatatccgtatgatatggaatctcataatccggcacaaccggctctccaaacttttcaatttcaacattctcgctatcatcttttccaataggaacagatggatcaataatattcggaataaccatcatatctttcagaagctcttcttctacttctttctctcttgcggaaagctcctcaatacgtgcaccagatgcagctacctgtttctttacttcttctgcctcttcttttttgccctgtcccatcagagctccgatctgcttggaaattttatttctctgtgcacgcagtgcttcgacttcctgtttgatttctctgttttctttatccagttccagtaccttgtctaccaattcaagcttattatcctgaaatttattacgaatattctgttttactacttccgggttttctcttacaaatttaatgtctaacataatgtcctcctgatactaatattccttttggtatactttctttttttcatgatcttattgtatagaaaacgtcactttgttttctgtttttcgttttgcattcttttcaagtttatttctttattgttttataacaacaatctacccctgcattgataccacactattttactcctcagtttcaagatttccaaggccaaaattaacagcttttctcaatgcttcaacttcttcctgacttaaaacaacatatgattctccttttactatttctttcaaatacaggaagcaattgtcacggctatgcactgcatttagtataagacctgtattatctttgtcaagtaaggcaagcgcaaaacttaattttccaccgacatcatcaaaagcatcgtacttttctatcccatatttgctgaacatagtttccatattatgcttaataaaactaatgtcatgttcatgatcctcttttgcttcataaagccggtcaatctgattaaattttctcacaaataccttttccagtgattgggcatcgctgcctttcatgaacattttgtacttacgttccaatcgactgagacgcattttgctgcccaacacatttgccaggagaattaatgtgaggatcagcaatataataataatgattcctggatcgattcccatgctgtcaaaaatactgctcatagattctccttatctgatagattcaaacagctcaataattctttccaactcatctcttgaataatattcgatttcaatttttcctttattattcttttttctttggatatgaacctttgtgcccatgattcctttcattttttcttccagactttcatagatcacatcctctgtagtactgcctacatttccctttctttcttttgcaggctcaagaagcttctttaccagtttttcagtctcccggacactaagtttttcatcaaacaccttcattgcaacggaatactgtgtttctggttctataatcgcaaggattgctctggcatgacctgcagaaatcatttcatcaatcagcatttgctgcactttaggagccaattttaaaagtctcattgaatttgtaaccgcagtcctgctctttgatactctttctgcaatctcgtcctgcttcattgaaaattcctcaattagacgcttatatgccattgcttcttcaataggattcaaatcttcccgttgaatattctcaatcagtgaaatttccacaacctgctggtcacttaactcttttataattactggcacttcttttaatcctgccagttttgcagctctccatcttctttcgcctgcaacgatctcgtaatagtcctttttatcggacactagtagtggctgtaaaactccatactgtttaatggactctgaaagttctagcaatgcatcttcatcaaactgttttcttggttgacttcgatttggctcaacctttgaaattttcacggttaacacagacttgttatcttcgccatgtgaatccttacttttcatagatatttctgttgtttctactgaagtattttcttttttaacagttgtttttactttctctccgttcttttcaggaaacaaagcatctaatcctcttcccaatcctgtcttctttgccgccattactcaccctccctgttgattacttcctcagccaggaggcgatagctttccgcacctgctgacttcgaatcgtagattgtaattggctgaccatagctgggagcttctgccagtctgacatttcttggaataatagttttatagatattctgatccagattatcctttacattttctactacctgtaacgacaaatttgtccttgcgtcatacatggtaaatacaacgccttcaatctccagagaattattcaatctgtcttttaccaattcaatcgtatggatcagctgtgacagtccctccaacgcataatattcgcactgaataggtaccagtacagaagtagcagctgtcaatgcattgattgtaagcatattcaatgaagggggacaatccatgataatataatcataattatctcttactttatctataatcttttttaatatatactctttttcatcaataccaaccagttctatttctgcacccgaaagattaatatttgctggtatcagatccacgttctgtaccacatctttcacaattgtattttctatttctgcttcatttaacagaagttcatacaaagtattctctgttgagtttttatcaacacctaatccactggtagtatttccctgcggatcaatgtctattgtaagaacctttttcccccgttcggcaagacacgctgaaaggttaattgctgttgtagacttgcctacgccacctttttggttggcaacagctataattctccccaatgctcttcctccttctagtgttacttctatttaactcccctatttccttttgatcccaaaatcaagaattaattttttgacttacattacagttcgatctgcaaatatatatatgttcacataaactgttgtacttatgttatcatgaatttttgaactcagcaactatatatcatgatactagtacaagtctaactccacatgagtttgctcataagtagatgaaagaccttggcgcacgtcaatataattataaaatcaaaacgtcaagttcatattcaagacagttttaatctttttccagactgctctttttgttctttctgaatctgattcttttctaataaattataacacttttatttttttcatgctacataatgtttcacgtgaaacatagaaaaagatgttttatttgtcaataaacttgtgtaatatgataatttgtaaaaagccaaaaataattcaagaatgcctcggcattcttgctgcgaggtgcgcgtcatgcaattgcatgacatacttctcctgcgcgcctctgcaatcctgccggaggctatatcagctgggggattgacccccaccactgataccagcttgtttctcaccacctatagaggtgggagtcatctcccagctgatatagccaaatcacataagtcacctatttcaattatagaaaacaataagcaatggataggagcttgcggacttgataatatcagaaagagtgccgttccttctgatatattgtggaacagttattttgttatgaacaaacagtgaaacagattgcgaatgtgggtttgaacaaatacgaacctcatgatttgaatcatttaatgaatacgcatatctcaatcagaattacttaatgaatacgcatatcttactcagaattatttataaccaaagtaacagacatcattcatgaaagaaatgaatcttaatgaatctgtcctatacatttcaaagcttcaacaaaaatccagaatgaatttagtaaagcgtgctaaacgataattaatcaaataatgcaagataatttttattcagcaaaaaacaaaattattgatgtagtttagctttatctcaagtattggatatgtatatatgccgcagtgagaaaataagaccagttatttgcaaaacaatgtaccggtaaataattgatatgaataacaaaaatgttttatgttacatcctaataggaaacttaacattgtaaattcgccaaaattggcttataatatgaactataatgtagctaaaaagtattttcatagttacaaagaaaaatggcagttattcagaagataataacccgtaaaatttttgacatgtattttgccaaaattccgagacatacaaagcaaataccatcaccaaaagtaatttggcgctcacttcttgtaatagtggtcgtcacctcgcatccgatataacaggaagacttttgggtatgcatattacgaaacagtccgtatattgtatattcatgctccgtaagtttttgctatttgaattaatttagattattataataatttttaatgagaattttttaatcatcaggagggattgtaatgaaagaacataaccgaaaaattattactcttgcagctctgactacaattgctgccggagttatccatgtagcaaaccgctgtattgctgcatcctcccaaattaagaatttgcttccagcaactgaaaaccaatattatgattggagatttggaaaggttttctatacaaaaagaggatctggaagtccaatattattgattcatgacacaataacaggttcttcaggatatgaatggtcattaactgctgatcgtcttgcagaagagcatactgtatataccattgatcttttaggttgtggtcgttctgataagcctggaatcacatatactaattttttatttgtacagttgctttgtgattttactaagaatgtaattaaagaaaaaacagatgtaattgcttgtggtttttcatgttcttttattacaatggcttgccgttatgacaatacctgtttcaataaaattatatttgtgaatccacccagcatcaattccttaaagcaatatccttctgaaaagaataaattattcaaatatttaattgaattccccgtttttggaacattaatatatcatatgattgtttcacgtgaaacaattagtaatttgtttattgataatctctatttcaatccgttccatgtagatgatcgaacaattgatgcttactatgaatcagctcataaaggtggctattatgccaaatacatgtattccagtcaaaaatccaaatacatgaatatcgacattagcaaaagtattcaggaaatggataatagcatttatattctaacaggcgaagctgaatataaaagagaagctattgttgatgaatatatgcagttaaatcagtctatagaaacatccgttatagaaaaaagcaagcattttccacacatggaaaatgcatcaggatttttaaatgctgtttctgattatctaattcaataatctagatttgcatatattctggattttaacaacataactgcggaatagtgattcggttatgacaagtaacaaagcggattgcaaatatccgttaaattacaatttcaaaaaacaaacaaattggtttcactcctactaagtccctcaatttctcgagggacttagtactttttcatgccagtagtggcatgtttcagtaaacatatttcacttgtatctagtacagtaaaaattaaatatctactatattggcgcagaatgattttctcatatgcaaggtggatggtggaggcgtagtgacgactacagcgactgccgacaacacaacatacggaaaatcaggcaagtcaatatggtggttgcttaatattcactataccagcacatccttgcgaagcaatttatatatactagtgatattactctgtaagattcccattacaactaaaagtgacggtgataaatcacaacactccaaatatcggacttcaaacccaatttgggatgttaaaaatatcaccgtcacttttatcactttttaactcagatgagaaggccccacttctataagtgatgagtaataagaaatactccatgggatagcatagcacaaagtaatccgtagatatcataatttggggcttttaccctatcatcattataatagtacttatcaaaccgaggataagataaactccagattacttgacaagccaaagatttctgataaattttatatgtcttgaaaatttcaatactatatcattcgcttttcagtcgcctaatctacatctacaccatttgtattatctgtattatctgctgaattagaatcttcatcagtagcattctcttcacttaccaaatccgaattttcatcagatgattcagaatctgtttgtcctacaagagttttataactatcaatcaattcttttactgtcatcttatttaccaaatacaccttctgaccaacaacagctgcataaaaattggtatcatattgataatagtcaatctttgtcttttcaccgtctacatcttctaattctacatcaaaatctgatttattgttatgttcatatttttccgtcagtcgtttctgtccggtcatattaatcagcttattataaaatgtagtaaatggagtgctgtcatccaattctgttccatccagctgatagcttaaggttgtagtacttgttgtggaagaatcatcaccactattatcctcagatgtttcacgtgaaacatcaattacatgcgtctctccctgatattctgcctgcaagctttcaagattgtttacagaaagatagcttactgtcatatcccagaaatcttcttttgtctttccaaggaatacagataatgtatcatttgagatagtgtatatttctttactgttatttaccattacatatcttccgtcatcatcagactgatcacctacaagaattgtcatctcacgattcaccattctagtctgagtatctgatgaatccgtaacagaggtatcttcctctgtagaatccgtagcggaggtatcttcttctgtagaatcaacagcagaggcatcatccttatcttctgtagaatcaacagcagaggcatcatccttgtcttctgtagtatcctgctcatctgtggaattttcttcagatgcatctccatcttctgaagaatcacttttctcctccactttctcctgataattaatggtaatggttccataaggtttatccagaccatactctgaaagatctttacaattgtaatttacaaatgatccataagcaatgcttgcaatcgatgaagtaagactgctgacttttgcggagtctgctttctcggccccgtcctgatcctggatattccaaagcccagtattatcatctttggtcaaagtgtaactatcatcattttcatcaactgtaacattgctgatcgttgaagaatctataacagggaatgatccagcttttgcataatcatacaaggtcttcataaatggctggaatactgaatctgctacaacataaatttttgactcatcttcaccattttctacataatactgacttgtagatgcattttccattcccacatgcagtactgtctctttaccatctttatcagttatcgtaatagtatttgtaggatcatctaagccatactccgtagtatctgtaacattgtccagaacacgatccgcttcaacattattcagacttcctatggcctcaatcagtttatcctgatctaccggaaagtccctttcatcgcttttaacccattcatcattatttttttcaaaagtaacttctttcttatcaatcacaaatttgattgactgaacatcctcagaggaaatggagaaaacctgggttttctcctcttcctcttctgcattttctttttcttcctgtttggccacatatgtcttaacacctacatatgcaccgcttaaaacgactaatactgcaactgcagttatcagattcattgattttttcttcatcaggcttttctcctcttaaaccagatcacaaaacctgccactaaaaagataccagggatcaaaccaattgtacaaatcttccagaaacttgcatcataatcaggtattgtcagatatgatacttccaggctcttggacggaatagaaacagtgcttgtttcctctgtagataccatagagttaaggctttctgtcacaagcttctcatttcctccggaaaccagctgattcatttgcgaatccataatataggaagaagaatagtagattatttgagtcttttttccatctcccacatcttctttgatgcttacaccaagagcaaacggcccttctacatctccgtcttccttttccagcgtctcactttgcaggtttgtttttgaataagcactgtcagatgttgtaagaatatcctcaacggttacagtatctctaacatcatcaagcttctggattccctgtgcgtaaggcatgataatataatatccggaagaggctgtttcagaggatgcgtctgtactgttaacagtaggaagcagataatatggcatctgcattccgtaatgctggttatctccctcaaaaacaatgccatcagctgcttttactccgtagttttcaagcacagcagcaaaattggtcaatgtactctctgtataatcggagaagaccattgcttttcctccattttccagataatccaacaatgctgttttttcatcctcagaaatatcgctggatggtgaatcgatcagcagacacgctacatcatctggcacactaccctcactgatcaaatttagagtcttgacctccatattggctttttcaatatcttcttttatggtgctgtccagttctttctctccatgtccttccaatgtataaagaacaggaagattctctgttgttacataagcaatcgcacttgtgatctgtccttctccatcaaatccggttgtttggtaactgtaagtattataatccattgtagattcgtacatgtcattataattcactactttatttctgtcgccacaaacaacgatcagactattagaagatacctgatcactggtatattcagaaacaaatttgggacttacaaccggatccttcaattcaaccttcacatgtttggactcatctgcatatttctgaagcagattactgatagtttcgtcttcagaaccactttgagcaatctgatagatggtaacatccttgtccagattattcaggactttctttgtctcatcaccaatactgtacagctgctgatcactaatatcaatctgcgtatacttggatggcagttttcctacgatcatgttgatcactaccacgattgccacaaaaatcacgatcaacagcgtactgtaagagccgttccgcagatatttcttattaagcggcatcttttccttagattctttttttgtctgttcgtttatattttttcctaacaatttcatttctccacctccttaattccagcgtctcttcacgattgactggacagtaaggaatatacagattgcaattacagaaataaaatatacaattcctgttacatccaaaatattattcgtaaagttctcgtaatgtgcactcaggttaaacacttccaaaatcttttgaatcccgccttcaaaaatactggatttcactatatatgtgacgacaagtgcagcttctccgcagatacagatgattgctgatattattgtattcttaatcatagtataaataatgatacaaaacgcaagaatcaggcaaccaaatgcaatgcatgtagaaagtgctgtctgcgaaaagaatgaagaaatcccactcatcatgtaaaatgcaaacaaaaatacaaaagtaagcactgctgcgatcaactggctttctgttatagatgaaaagaatacgccaatggcaatattggcacatccaagaagaaagaacccaagaatcgctgtgtaagctcccttataggatacacttccaaactttgacatgatcagcggatatgtgcacatcactgtcatcggtattgcaaaaacagttaccaatgccagatattttcccattacaatgcctgtaacagacacaggggatgtaagaagcagctggtctgttttctgctttctttcttctgccaatacacgcatagtaagaatgggcacactaataagaaatacaaacgtaagcgcactcatagtatactcaaactttggataagcggatgaaagctgataggcagaaaaataaattcctgctaaaacaaggataaaaaatataaacaggtatccgatcatggaggtcagatagctttttagttctcttttataaactgctgtcatctggatcttcctccttttctgccggtccgtttacagatccagcacttgtttctatatccacatctgcaacgctttctgtatctttttctgtatctttttctgcagctatatctgtttcagtatctgtatccatatctgcgtctgaaatggctgcttctgacttcttatcagttttttcatcttttgcctgatcttgcttttcattttcggtaagctcaaggaatacttcctcaagagaagccctctttgttttcatctcaaggattgggcagtcagctttaaccatactgtaaaataccgcttctcttatatctttattttcatctagggttagcgatgcattccaaatattttcttcagatgatttttccagttttatctgtttaatgccttccacttcagcaagtgcgttctgaatttcactgcgatttcctttgatcagcatattcagattattagatcctgctgccagtttagccaaattctccggtgtatcactggcaaccagcttcccgtgggagataatcaaaacataatcacataccgcactgacctctgacagaatatgtgaacttaaaatcacagtatgcttctttttaagacctttgatcagttcccggatctcattgatctgtttcgggtcaagaccaacggtaggctcatccagaatgatcacttccggatatcccagcactgcctgagcaattcctaccctctgtctgtatcctttggatagattcttgatcagacgatgtttcatgtccgttattttaaccatatccataacttcttcgatcatggacattttttttgctcttggaatttttttaagatcagcgacaaaccgcaggtactcaagaaccgtcatgtcaaagtaaagaggtggctgctccggaagatagccaatacattttttcgcttcctcaggctcctccagaatatcatgcccatcaataacaacgcttccttctgtggaagcgatatagccggtgatcatattcatggtagtagatttaccggctccatttggtcctagaaaaccgtagattttgcctttttcgatagaaaaagagagatggtcaaccgctttgtgatctccataccgcttgaccagattattcacttcaatcaagttcttctcctcctttttttgctgtgaaagtccaggatgactgctgactttcatatatggtaatgcggctcataggccacatttccacacagcaaaaatgcctcagcatttttgccgcatggatacttctttaacatatattttatgtttaagatgtgaggaaaattgtatgattgtgtgaaaaaagtgtgatagttatgtgtttcaaatgtgaaatttcaggtgttttatccagtatttttctagtattttatgtgctatttttcgcagtattttatctgatattttatctggtatttatgatagtattaccgctcctaatggctctttggaaggaagtccggcctttcttggatacttctttggtgttggttttgccttgcgtatcaccacaaaggatctgtccatatctgtgtctgcaagggaaaaacgcaccacctcttctctttgtcctcccaggatctttactgccttttctgcctggataagctcctggtcaacactaccggacttataggaaataaagcatccgccctgcttgacaaatgggatacaatactcggaaagtgtacttaaattagcaacagcacgggatacacaaaagtcaaaactctccctgtatcccttctgttttgcataatcttcggctcttccatgcacagtattgatctttgtaagccccagcatttctgttacctcattcagaaaattgattcttttattcagtgaatccagcaaaaggatctccagctctgggaaagcaatcttcagcgggattcctggaaaaccggctcctgttcctatatctatcagcctttttccagccagcttttccggcttaaaacagctggtttttaccacagcaagactgtcaagaaaatgcttagtgatcacttcttcatattctgtaatcgccgtaagattcataactttattcttctctacaaggtattcataataggtgagaaactgctgtttctgttccccggaaagggtaatagaaagctgttccagccctttttcaaatgatgtcaaatcataattcatctggatttcctctttctaaataaatgtgatgttgggtgcaaaacacccaactattttaagaatgtttcagtgggacaaatataccagaagtacggaaatatctgcaggagatactcctgaaattctggatgcctgaccaatggatacaggcctgtaaagttccagtttttgttttgcttccagacgcaggcttcctaccttttcatagtccagatctgcaggtatcttcttttcttccaacttcttaaactgctccacctgcttcaactgacgacggatatatccgtcgtatttcacattaatatttacctgttcctccacatccttggacagctttggtcttgccggatcaatagactggatcgcatcataagaaagctccggtctgcggatcagttctgcaagtgttgtaccggattttaatggtgtgcttcctaagctttccagaagctgctgtacctgcggtgttcctccaatagtagcattttcgatcctcttaatctcatctttaatttgctgctctttaacaaggaccttctgataagtggcatcatccacaagccctacctgccatccttttttacgcaaacgcaaatctgcattatcctgccggagaagaagcctgtattctgcacgacttgtcatcatacggtatggttcatggttttcctttgttaccaggtcatctatcagcactccgatatatgcctctgagcggtccaaaatcagctgttcctggccttttacctccatagccgcattaattcctgctattaatccttgagccgctgcttcctcatatccggagcttccattaaactgtcctccactgaacaatccttggattttcttaaattccaaagtgggataaagctgccttggattaatgcagtcatactcaattgcatatgcatttttcacgatctttgcatgctccagaccaggtactgtatggtacatagccttctgcacatcctcaggcagggaactggacatacctccgatatacatttcatttgtatattcgccttcaggctcaataaacacctgatgcctttttttatctgcaaaacgtactaccttatcctcaatagaaggacagtatctgggtcctgttccgtggatcattccggagtaaagaggagatcgatccagattatcccggatgatcttatgtgtctcttcattggtgtaggtgagccagcaggatttctgagggatctgtacatcttccgggtcagtagagaaggaaaacggcactactttttcgtctccgaactgttcttccatcttgctgtaatcaatggtatttcctgcgattctggccggtgtaccggtcttaaaacggaacatttcaattcccagctccttcagggaatcggtaagataattggctgcctgaagaccgttaggccctgtataattgcttatatccccataaatacatcttgccttcaggtaagttcctgtacaaagaactactgctttacaatgataaatagcgcctgaatatgtttccacacctgtgatcctgccatcctgtaccagcagctttgtcacctcgccctgacgaatggtaaggttctcctgattttccagtgttttacgcatttcattgctataagcctgcttgtctgcctgggcacgaagggaatgaacggccggtcctttggaacaattcagcatctttgactgtataaatgttttgtcaatattcttccccatttcgccgccaagtgcatccaattctcttaccagatgtcccttggaactgccgccgatattaggattacagggcataagcgcaatactttccacactgactgtaaacataatggtattaagtccaaggcgtgcccctgccagtgctgcctcacagcctgcatgccctgcacctacaacaacaatatcaaaatcttcttctattcttttcatttgctgtctgctccttttacctattttcccatacagaatttactgaatatctcatttaccagatcttcgcctaccgactctcctatgatccttccaaggctctcataagcgctcataagatctatggaaaagaagtcttcaggcatatcatcaataatactttgttccaccattttcaagcttgccaatgcatctgtaagggcttccttatgccttgcatttgtaatataaacctggtcattaaaagtgatttccccctgaaagaaaagcttccggatctgttcttccagttctcctatcccagtctcttctttagccgaaaccggaattacaggatgtgaaaccagtgccctaatatcttctgttgtaacagccggatccagatctgttttattataaagcacaatggctttttttccttccagcatcttcatgatctcatgatcattttcatcaagaggcgtagacgaatctaccacatacaggatcagatctgcgtcctttgccagctcctttgccttccctacgccaatcttttcaaccacatcctctgtctgccgtattcctgcagtatctgccattttcagggtgatcccatgaagattaatatactcctcaagcacatctctggtagttcctgcaatgtctgtaacaatagccctgttttcccctgtcagaagattcagcatggaagattttcctgcatttggcttaccaaggatcactgtgcggataccctcacggatcatttttccatctgaagctgttgcaatcagatgatccatcttcttttcctgtatttttactactttaaggagctgctccggatatccatccaaactgatatgttccggatcgtccagtgcagattcaatatatgcaatatggtagatcagctcactacggatctgtgtgatcactttttttacagaacccttcagctggctcatagagcagttcaaagctgactgattctttgcctggatcacatccatcactgcctcagcctgggacagatccagccttccgtttaagaatgcccgttttgtaaattcacctggctctgcaatcttagctccgtttttcaaaactgtttccagtaccctgttcatggcatacacaccgccatggcaatcgatctctacagtgtcctctcctgtaaaagtgcaaggtgctttcatgatcattaccagaacctcatctaccaattcctctccatcataaatatatccataatgaatagtatgagatgccgctttgcggatatcctttttcccacctttggatctgtaaatccgactgatcacatccatggattcttctccactgatacggacgatcccaatgccggatgcactgacagctgtagaaattgcagcgatggttttttccattttcattctcctcttgttttttcaataaaaaaatgttactccaggtgcaccttgctatgctggaatatatcccgaataacaaagctgcttttctatctttcacctagaataacatcttttcagtttcatattcaactggattttcggaaaacagatattcttatatctgttttctgagcttttgcaaaacaaaaattcaagaatgcctcggcattcttgctgcgaggtgcgcgtcatgcaattgcatgacatacttctcctgcgcacctctgcaatcctgctggaggctatatctgcgtccagattttccatcctgtaatcttagtaccttttcagtcttacaactacatgacgatatggctcttcgccctcgctgatggtctccacatacttgtttccctgcagagaggaatggatgatccttctctcatatggattcatcggctctaaaactaccggcttcctggtcttcttaaccttgtaggcaatccctcttgccaggttctccagtgtctctttacgacgacggcgatagtcctctgtatcaagctttacacgaatataattactcttgcctttatttaccacaaggctggtaagatactgaagggaatccagagtctgtcctctttttccgatcaggatacccatatcttcgccttcaaaatccacctccagacatccgtcagttgtgttgtacttggatgtgatctctacttctccaagatccatggatgcaaacacatccttcaggaaaacaattgctctctcttcgatctctttgatctcctgtggatctgtgatcacttctacaggcttagacggctttaccggtctttccttcggctgacgttcttttactgtgccttctgtttcttttggctgtctttctttaaccggacgttctttataagttttctcttttgccggcttaactggcttttcctttggttcttttgcaagatccgctttctttggctctttcttttcttcctgtctgggtgcctgtttcttcactggcttcggagcctttttgcggttttcatcttctttgatcgcttccacttttacagtatcaacgatttccttgatctcttcctcatcagaaacggtttcgatcttacgtactttaataattgcaggcttactgccgatgccaaaaaatccagagctgccttcgcttacaacctgaatatcaagctggtcactggatgtaccaagctctatgcaggcttttgtgattgcttcacttttagtttttgcggaaaactgaacgtaatcctccatcatagcccctccgttccttattgttgttcttattttttcttgtttctctcatcaaaatcccttaccatattggcctttgcagtaatactgcctggctttgcatttcttgccttctggtaggattcctcaagtttttttgttttctcagcagcattgccgccgccatttcccttatcaatctttgttgtattaatgttctttgtattttgatttgcctgatttgtgatcttctgtggcggaagcccctgttttgcacgcttcttttccatttttttcatgttttcattaatcaggtcattaatatcaatcttattcagaagacgattgatcactacctgctgtacgcttcgtaccactgcactggcgatccagtaaataccaagacctaccgggaatgtgaaacagaatacagcagacatcaggggcattactgtattcatggtcttcatggatgcattcatggtagaattgctgtcatttgttactgctgcctgaggcatcagtttataattgagtacctgtgttgcccatgcaagaaccgggatcatgatcgctacaatagcaaggatgatagcaccacctgtaaatgcagccttaatataggtaagaggctggtctgcaatattcagcccgcaaaagctctgcatcttggaaatctcgctggctgctccattgatctccttggaaaatcctgaaaactggctcatggaagaaagttccttccactgagatggggaaagtgcatacaggaaatcaatgattgagttgcttgtagcctttgttccatctaaaacaagggatacccttgacatgttgtgatccttgataaaggtctgaagcagatctgtatatccgtttatggaaacgatctttgtcacaacatctgtaaatacttcaccaacactgcttacatatgcaggaatcttatagataacctgccataaagccatcaatacaggaaactggatcaacaactgcacacagcttcctgtaggagaaacgccgtatttctggtaaacagcctgtgtttcttcctgcatcttttgtgcggaaacctgatctctcttaccctgatacttcttctgaatcttctgaagctcaggctgcataaccgcactcagcttggaaaatttttgctgcttaacctgcagcggagtcataaacaaaaaaataacgatactgaaaataatgatacaaagacccaggttctgaataccgaacagactatcaaacatcttgtagatgccattcatgatccatcccatcagagttgccagctggccaatgatcggagtagtactctttgtggctaaaataatatccaaggttttctcctcctagatttcgtactgcttaggtaaaataccttatggtacaggatcgtagcctccatgtgaaaaaggattacatcttaatatcctccacaaagcaagaaggccgcctttccatgcaccgtacttttcgattgcttccaaaccatattgagaacatgtgggaatataaggacattttgttctcttcattggtgacaaatatttctgatagagacgaatcatcttaatcatccattttttgatcatggctttcctccacagcatttatgccgctgacccagatgcaaaagggcgctttcgatttcctgataagaccttccctttgccccggtcctggcaacaactactatatccaaacctctttcaaataatgtttcattcaggcgataactctctctgatcaatctggtgattctgtggcgtaccacactattccctacttttttacttactgatattcccagacgattctccatgtgcccattcttcagcacgtacatcaccagatacctgtttgcctgtgatgttccttttcggtatactttctgaaaatcctgatttttctttaaggagtctgagtattgcatctaatcctcctttttaattctttatagaagaaaagaccacatatctgcggtcttaacgggtcaagcattcttattgctccagcatataaaattggctgctgacagctgtcctgcttaagcagataagcgctttcttccttttaatcttctggcagccagaactttacgtccgccttttgtactcatacgtgcacggaatccgtgaacctttgctcttgatccttttttcggctgaaatgtcattttcataggtaaagcacctcctttatctatttatcattttaattatctatcctaatcagaacatcatttcaattatattcataaaaacctgctacgtcaagcataaaatgggaattttccggctttttttcgtctcattttttttgccattttgggaaatagtggatagtttaaatggtttacgtaatattatccacaatttgtggataacttgtggataacttgtcaataatctataaaactatccacttttttcgacatatttatacacaccttttgctaaaaagccatttttttcaagtggtggacagtggataaacttatacacattattttaaaccattttgtcgctatttcggattttatggaaacctgtgtggttatttccactgttatccacactaatccacagctaaaatgtggataacaacccacctaatccacattattcttctcattacccaccatttattttccatcactgccctattttctcattgcgaaaccaggaaatttattataatatataaaaggatatttatgtccttttatcaatgcaccacgggaggaaaaaatgaacacagtaatcgaaaaatgggatgaaatccttaatatagtaaaaacagaacatgatctttctgaggtttcctttaatacatggctgaaaccccttaaagtatatgaagtaaatggtaatgtagtcaccatcatcgtgccctctgagcaggtagggctttcttatattacaaagaaatataagcttcctctgcaggtaaccatcagtgaagttgcaggcatggacaactgtgatgtgcgttttatccttcccgaagacgtaccagccaaaaaaacagtttcttctggcaacagccatacagcgcaggatatccgttgcgaagaagcacatttaaatcccaaatatacatttgatacctttatcgtaggcagcaacaacaaatttgcacaggctgcagcccttgcagttgcagaatcaccaggagaagcatataatccgcttttcatctacggcggtgccggacttggaaagacccatctgatgcattctattgcccactttattattgaacataacgaaaaaagtaaggtactttatgttaccagtgaagaatttaccaacgaactgatcgagacgatccgtaatggaaacaattctgccatgaccaaattccgtgaaaaataccgtaatatcgatgttcttctggttgatgatattcagtttattataggtaaagaatccacccaggaagaatttttccatacttttaacagcctgcacagcgccaaaaagcagatcatcatctcctcagataaaccgccaaaggatatggagatcctggaagaacgattccgttccaggtttgaatgggggctgatcgcagatataaccctgccagattacgaaacacgtatggccatccttcacaaaaaagaagaaatggacggctataatattaatgaagaagttatcaaatacattgccaataatatcaaatctaatatccgtgagctggaaggcgcctttaataaagtaatggcttccgcaaagctggaacaaaaagatgttaccttagaactggctgaacaggcattaaaggatattatttcacctgatgaaaagagagttataactcctgaatatattatttccattgttgcagaacattataatgtaacaaccgctgatctttgcggcaataagcgaagctccaaaatcgtgattccaagacaggtagcaatgtacctttgccgtgaacttacttccacaccattaaaaagcattggtaaatcccttggaaaccgtgaccataccactattatgcatggtatcgaaaagatggaaaaggaaataattacagacagtaatcttaacaataccattgacatcttaaagaaaaagattaatccacaaaattaacatcgcttatccacatacccggtgtatagtatgtggtttaatgtggaaaacttgagtggtttttttgcccgtttttttccacatttgttttacacaagttattcacacacctaaacctgaattttacacgaagttatccaatgcttaaaccctttgattttggggcttttatgaagttattcacattttcacaccccctacggcgattacttcggatttcttcttttatttaaacacataaaaacccacatcagccagaaaaggagttatacacattatgaaaattatctgctctaaaaataatcttctgaaaagcgtaagcatttcattaaaagcagttccatcaaaaacaaccatgccaattcttgaatgtattcttattgatgcatcagccagtcagattaaatttacaacaaatgatatggaacttggtattgaaaccatagttgaaggtactattgaagaaaaaggtatggttgcactggatgctaaaatcttttacgaaatcataagaagacttcctgataatgatgtaaccatcaaaacagatgataaatttactgcaacgattacttgtgaaaaagcaaaatttacgattcccggcaaatctggagaagattttgcctatttgccaatgattgaaagggatgaacctttgactttatcccagtacacattgaaaaatatgatttgtcagacaattttctcaattgcagtgaatgaaaacaacaaattaatgaccggtgaattgtttgaaataaagaataattgtctgaaaatagtttctctggatggacaccgtattgctattcgtaaaatgccgttgaaaagagattactcagacaaaaaagtggtggtaccaggtaagactctcaatgagatcagcaagatcctttctggcgaagtagatgaacaggtaagcattttctttacaaaaaatcatattctttttgaatttgaccagacaatggtagtatccagactgattgaaggagaatatttcaggattgaccaaatgctttccagcgattatgagactaagctgactattaacaaaaaagaatttttaagctgtattgaccgtgccactcttctggtacgtgaaggtgataaaaaacctatcattatttccattacagacagcagtatggagttgaaaatcgattctgccatgggttctatgaatgaggatattgatatttcaaaagatggaaaggatattgtaatcggctttaatcctaaattcctgatcgatgcattgaaggtcattgatgatgaaaacattaatatttatcttgtaaatcccaaggctccatgctttatcagggatgatgaggagtcctatacttatctgatcctgcctgtaaacattaatcagaaccaggcaagataaaagaagagaaaataactgacacagatagaaagccggatctgtgtaaaaaataatatataaacagtaaaaacatcaggaggcggattattttgattatccatatcagagacgaatttatcaaacttggacaggcaatgaagctggcagatctggtatctgacggtgtagaagcaaaatatgtgatcagtgacggacttgtaaaagtaaacggagaggttgacacacgcagaggccgtaagctatatgtgggcgatacgatttcctataatggacaggatgtgcaggttgaaggagaaagtgaataagcagtcccatgtatattgaatccatcaaattaagcaatttcagaaattacgagaatcttgaactgcatctggatcagggaaccaatattttttacggagataatgcacagggaaagacaaatatcctggagtctgtttatctgtgtggtacaagccgttcccataaaggaagccgagataaagaagtgatccgtttcgggcaggatgagtcccatatacggatgaatgtatgtaaaaacaggatgaattatcaaatagatatgcatcttcgtaaaaataaggcaaagggcgtggcaattaatggaatgcctatcaagaaagcaagagaactgctaggtgtggtaaatctggttttcttttcgcctgaggatctgaatattatcaaaaacggtccttcggagcgaagaaggtttatggattcagagctttgccagcttgaccggctttatcttacagacctggcaggatataatcatatactgaatcagaggaataagctgctgaaggagatattggggaatacatctctgaaggacactctggatgtatgggatatgcagatggttaattatgggaagagggtaattgctaagcgaagggattttgtgacagaacttaatgatattatccgggaaatccataagaatcttacgggcagggaggaactgttggagatcctttatgagccaaatgtaagtgaccaggattttgaagagactttgtttaagaacagagacagggattttcgtatgcgcttaagttctacaggaccccacagagatgattttggtgtgatggtcaatggcatcgatatccgtaaatatggttctcagggacagcaaaggacagcagctttatctttgaagctttcagaaatatatctggtagaaaaaatcattaaggataagcctgtgcttcttctggatgatgtgctttctgaactggacagcagcaggcagtcctgtctcctggacagcatccatgatatacagacattgattacctgtacaggacttgatgattttgtaagcaggcagtttcacattaataaggtttttcaggttgtttcaggtcatgtacattagctgggagatgcctcccacctctataggtggtgagcaacaagctggtatcagtggtgggagtcaatcccccagctgatatagcctccggcaggattgcagaggtgcgcaggagaagttcagatatttattttttgacaagcatgactgcttatgataaactatccgtaattgtgagttggtattggaaagttggtgaaaattttggacaaggaagaatttcgtattaagctggaggagattaatcaccttgttgagaacaaggattataagggggctatgggcgttgttgacagtattgactggcgccgtgtaaagaatgtacgtactctttgtgtagtaggtgagatctatgctgccaataagcggtatgaggacagtaaggagatttttcttctggcttatcacagggcacctatcggcaagaatattctttaccgtctgatcgaggtttctctgaagatgggggacattgaggaggctaaggatttttatcaggaatacaaggaggttgccccaggggacagcacgcttctggttctgaaatataagatcttaagtgcaaagaatgctcctatcagtgaacagatcaaggttcttgaagaatataaagaaaaagaatttacagagaaatggtcttatgagctggcaaatctttattatcaggctggcgaaaaggaaaagtgtcttgaattatgtaatgagatgatcctgtggtttaatgaaggcagctatgtgatgcgtgccatggatctgaagcttcgtatgggagcacttacaggagatgagaagcagcgttatgagcagcagtttgtgcctaagctgtttacacctgaggaagtacagagtctgaaggacaaaggcgaggagccgaaagaaagcagtgaagaaaaagaacagccactgatcgaaagtattccggttggcaatgataaagacctgagcggagtagaaagtcttcaggagaagatatccaaaggaatccgtgacattttcggtaaacgtatggaatcggatgaagagcttttaagcgaggagtatggtgcagaggatgagatgatcaaaaagccttcagataaagaactggcgaatgcacctgcactggagcctgagagcggcaagtccattctggttaaagaggatgctgcagaaaagaaagaatctgcagatctgaaagagaatttcaccatgccggagcttaaaattccggagtccatgaagaattttgaagcagaagaaacaccggaggtacctaaggcagttctggatgatactcctgtttttgccaatcagaaagagggaaaagaattcaatctggaagataccattctggcagcagcaagtgcccagggcatcgatattccagaagaacctgaagtaaaagaaactcctgtttccgaagaagaaaagatttctgaaaaagaagaaacacagccggtgaaagcagcagctcctgttcaagagccggtaaaagcagaagtatcttcacctcaaaaaaagatggtggaacttgaggaagaagaatttctttccgaggaggatctgcaggaagcagaagctgaattcctgaatggtccgaagaagcctgaagagaaaagccttgagaaatcttctgtacctgagatcccaagactggaagatgaagaattatttaccaacgattacagtgcagatgatgagccgatagaagaattaaaagaaaaggctgcaccgaaagtgcctgaagctgcagaagagatacagccattgaaagaagagtcagaagaagagaagccggttctttctgaggaagaggaattagagcagtttattgattctattcagcctaaggatgaaagagatcctatggatattatcccaagagagcgtacactgactgatgaggagaaaaagctatttacatattttgtaaaggttcccggcatgaaggagcagcttctggacgcccttctggacgcccaattggcagcagcagataagacctcaaaaacaggcaatattattgttatgggaggtcatgagacaggtaagacaaggctgatcggaagtcttattcctgctatttgtaaagaaagaaatattgaagcctcaaaagtagcctacgtatttgctgaccagatcaatggcatggatatgtcaaaggtagtagataagctttccggtggatttttggtgattgaggaagccaattcccttactccggagactgtagaagaactggataaagctatgaatttcaggacggatggtcttacagtgatccttgaagatgagaagattggcatgaggaagctgattgccaaatatcccaggtttgcaaagaagttcacatccatgatcaatatacctgttttcactaatgatgaacttgtgaatttcgcaagagtttatacaaaagaaaatggataccgtatcgatcagatgggaatgcttgccctttataatctgattggcatcaaccaaaaagaagatgagccaatgaatatcggttctgtgaaagagcttctggataatgcaatttccagatctcagggaggccttctgaaattcaacaagaaaaaaagagttgacagagacggatacatcgtactctatgagaaagattttgcaaaataaaggagattaaaaaatgcccagaccttatcttggaaatccaaaatataccattgaagtccttcaaaagtatcattttgtattccagaaaaggtttgggcagaattttttaattgatacccacgttctggaacggatcattgaagctgcccagataacaaaggatgattttgtgattgaaataggtcctggtatcggtacgatgacccagtatctggcagaggctgccagggaagtggcagcggtggagatcgaccgttctctgattccaatcttacaggataccttacaggactgggataatgtaactgtgatcaatgaggatatcctgaaggtagatgtatgtaagctggcccaggagaagaacggtggacgtccggtaaaggtggttgccaatctgccatattatattacaacgcctattattatgggattatttgaaaatcaggtaccattggacagtattactattatggtgcagaaagaagtggcagacaggatgcaggtaggtccgggtactaaggattatggagcactgtcactggctgtacagtattatgcaaggccacagatcgtgaccaatgttccgccaaactgttttatgccaaggccaaaggtaggaagtgctgtaatcaggcttaccagatttcaggagccgccggtaaaggtagatgatgagaaactgatgtttgccattatccgggcatcctttaatcagagaagaaagactctggtaaacggacttaagaacgcttctgaattgtcttttacgaaggagcagatcgaaagtgcgctgacaagtgctggtcttccgctgaatatcagaggagaggcactgacgctggagcagtttgcacagctttccaatgaattttccagaatataaataaaataaaaagcatccgttggctaggcggatgctttttattttgtctcaaatatattttttaaaaggaaggagagttaattaccgtattggtaattaacatatgaaaaagaaatttataaaaataatgttggctgtattatttttacgttttttagtatatccataaattgtgatggaatcatgtttatattatgaaaaaacaatgaacgagaaaaaaaataattgtaactgagatttggaattgagtgaaaattataactttcttttggatattacttataaaatgattatagaaattttatatatattttacaaattttaaataccaactgtgttataataaaccgaactttatgatataagaaacggatcgtaaggatgtaatgatttgatgatatcatagagaaattatgagatacaaagatcatttggctatttaacaggaggttattattttgaagaacataaagaaattaacaggtattatgatggctggggcacttgctttttctgtaccggtaccggcgatagcttccggttttgatacttcttctttggaagctctgatcgacagtggagtggatgcagtattcagcgatccggatcagacagtagacattatcatgtatgtgaaggacaagatcggacagcaggatgtaacggatgatcagatccgtactgtgatcaatgaggcagcggatgctttccagatcagtcttacagattcagagaaggacaatctggtagaccttgccagaaaggtaaaggatgccaatattgatgaggatgagcttcgcagtgatgtaaatgcagtatttgacaagatggatgctcttggagttgagaagaatgatgtgaaaggattcctgaagaagattcttaatttagtaaaaggatggttctgatttatcactttaatgtactaaatacacaataaataaaaacattatgaaaaaattgcatgtggtaattttataaaaaaagaatagaaaaacagaaaatattgtgcaaaaaaactaaaagttcactacaggttcatagtttgttcacaagtagctgttatgatgtaatcagttcgaaagaacaataccaaagacgttgtaatgacaccattacacataaaattttttcataataattgccccggtaaaccactaccggggcactcctcgtttttagggaaagtttatctttatttccaagaagaaagcaaaatgttatataaaaatataaaaatccatattttcatcttttcagctagtatgctataattcacttcagataagatgagaattatctgtggaatgcatttttaaaagtaatactataaggatatggattatttacaatgagaataattaatattgaaagatgggagaatagattatgtctgaaacaatgaaagattatgagaaggagctggaggcttcttttaagaaggtacaggagggagacattcttaccggtacagtgatcagtgtagatgagaaggaagtagtgcttgacctgagatattatgcagaaggtattattccggcagaggattacagcagggagcctggttttaacctgaaagaagatgtgcatgtaggtgatgaggtttctgccacagtagtgcgtacagatgacggacatgggaatattctgctttcaagggtggaggctactgatgtgctggcctgggatcgtttaaaagagatgaaagcttccggtgaagtgatcgatgtgattgtaaagggagttgtgaacagcggtgtagttgcctatgtagaaggcatcagaggctttatccctgcatctaagctggcactttcttatgtggaggataccaatgattacctgaataagcatcttcaggtacaggtgatcgatgttgatgaagatagcaagaagctgattctttctgcaaaagagcttctcagagagaaggcagaggaagagcgtaagaacaaaatttcaaatattcagccgggctttgttacggaaggaaaagtagaaagcctgcagccttatggcgcatttgttgatctgggaaatggtctttctggtcttgtccatatttcacagatctgtgagaaaaggatcaagaagccttcagaagtattgacagtaggagatactgttaaggtaaaagtgatttctgtgaaggacggtaagttaagcctgagtattaaagaggcttccgacctgatggcaaaagatgtagaagaagaaacttttgaaattcctgattcaggagaacaggctacaacatcccttggttctctgtttgcaaacatcaagctttgatcagggttctggatcgtggaaggacggtatgaatgggtacacaggaaaaaatatttgtaataggacataagaatccggatacggattccatctgttctgccattgcttatgcagacattaagaatcaaaaaagccttgtaaaaaaatatattcccaagcgtgcaggtcagatcaatgaagaaactcagtatgtactgaagcgttttggggtacagcctcctgcatatctgggaaatataggtacacaggtaaaggatatggatattcgtgtcagtcctgaggcggataagagtatgtccctgaagaatgcatgggatatgatgcaggagaatagtattgtgtcactgcccatccgggacaaggacggagaactggaaggccttgtcaccatcggagatattgcaaagacttacatggatacaacagatagttactttctgtctaatgccaggacccagtacagaaggattgcggaaacccttagcggcaaggtagttgagggtaatgaacatgcttattttgtaaaaggtaaggttctcgtaggcactgccaatcctcaggtactgaaggaatttgtaaaagaagacgatatggtgatcatgggcaaccgtgaagaagaccatatccaggcaatcagactaaatgtaagctgtatcattgtgggtatgggcgttgaggtatctcagaaggtgctatctcttgcacatgagaagaacattgtggtgatcacctcaccatgtgattcttttacaattgcaaggctgatcaaccagagtattcctttaagatttgtaatgaaaagggataatctggtgacttttaatacagaagactttacagatgatattcaggatgttatgattaaacaccgtcaccgtgcatttcctgtgatcaataagcgggggaaatgcgtaggtactatttctcgccgtaattttcttgatatgcataggaaaaaggtgattctggtagatcataatgagaaggatcaggcagttgataatatagataaagctgagatcgttgagatcattgatcaccataagctgggatcattggagacgatgaagcctatcagctttcggaatgaaccggtaggctgcacagccaccattctttataagatttatggggaagaaaggctggagattccgccaaagatcgcaggacttctctgtgcggcaatcatctcagacacgctgatgtttcgttcccctacatgcacgcagcaggataagattgctgctagtgcattggcactgatcgctgatattaagatagaagaatttgcaaaggaaatgtttaaggcaggcagcaatctgaaggacaagtctccggaagagattttttatcaggattacaagaaatttattgcagaaggaaatgttacttttggcgtgggacagatcagttccatggacaaagacgagcttctggagatcaaagagaggctggagccatttatggtaagcgaatgcgggcggcatggtgttaccagggtttattttatgcttactaatattctggacgagtctactatgcttctttactatggagaaggcagccgggaaatggcagagtctgcttttcatattgagcctgagaacggagcatttatgcttccgggagtggtttcaagaaagaagcagatcattcctgcgatgatggaagctgcacagcttatgaccaacgaatatgcataatcttgcagtaagatcattacagtaaagaccattgtataaaaatcgttaggataaagagcattaaagaatacagaaggatagataaaaattatgaaagaaacatggaaacccgggaatatgctgtatcctcttccggcagtgatggtaagcgttacagacggacaggggaatgacaacattattacagtggcctggacaggaaccatatgtactaatccgcctatggtttatatttctgtgcgcccgtcaagatattcctacgaaatgcttaaaaagaccggagaatttgtgatcaaccttaccactgaggaattggcttttgctacagattactgtggtgtccgttcaggaagggatgtggacaaatttaaagaagcccatcttaccaaggagccggcacggtttgtaaaggcacctatgatcaaggaatcaccggtatctattgaatgcagggtaacagaggtgaaggagcttggttcccatcacatgtttcttgcagaggttctggcagtccatgcccagcaggagtacatagataagaataataaatttcaactgaataaagcaaaaccgatcgtatattcccatggtgaatatttgggaacaggcaaaagcctgggcactttcgggtacagcgtaaagaaaagaaaaaaacaggaaaagcgctgatttcacggtgggattgcacatttgatcagaatgtgttaaaatcgaaaggaatttattgagaacatgaataatattacattgattggcatgccgggagtggggaagagcaccattggtgttgttcttgccaaggtactgggatatgaatttatggattcagacctgttgatacagcgtcaggagaaaaggcgtctgcatcagatcattgagcaggaaggagtcgaaggattcaaagccatagagaatcgtgtgaatgcatccattgagactgagaatacagtcattgccactgggggaagtgtggtatattgtgaggaggcaatggatcatctcaaaaaaataggaaaagtcgtttatctcaggctttctctggattcccttgctaaaagactgggaaatcttgaaaaaagaggagttcttttgaaggaaggacagactctgaaaagcctttatgaggaacgagttcccttatatgagagatatgcagatattgtgatcgatgaagaagggaaagatttggaagcaagtctgcaggcagttttggaaacactggtatagtgaaaagaatcagtagctatatgagaatcaaaggggtaaaagtaactgttgacatgaggagagtaaataatagaggtgttttatggaacagtatgttattaaaggcggaaatccactggtaggtgaggtggacatagccggtgcaaagaatgcggctcttgctattttatccgcagcaataatgacggacgagactatcctgatcgaaaacctgcctgatgtaagagacataaatgttttgctggaggctatttccggtattggtgcccaggtagagcgtgtgaacaaatcaaccgttaagatcaatggttctaccattgcggacgtaagtgtggattatgaatatattaagaagatccgtgcgtcttattatctgttaggagcactgcttggcaagtataagcatgcagaagtcccccttccgggaggatgtaatatcggaagccgtcctattgaccagcatttaaagggattccgtgcccttggagcaaaggtggatattcttcatggtgcgatcgtggccaaagcagagaatcttcatggaagccatattttccttgatgtggtatctgttggagctaccatcaatattatgatggctgcatctctggcaccaggacgtacgattatcgagaatgcagcacgtgagccacatgtagtagatgttgccaatttcctgaacagtatgggagccaacatcaagggtgcaggtacagatgtgatccgtatccgtggagttgagaagcttcacaagacagaatattccattattccggatcagatcgaggctggtacatttatgtttgctgcagctgctacaggcggcgatgttaccgtaagaaatgtaataccgaagcatctggaagcaaccactgccaagctggaggaaatcggctgtgaggtacaggaatttgatgatgcggttcgtgtacgtgctacaggaaagcttcaccgtacccatgtgaagacccttccatatccaggatatcctacagatatgcagccgcagatcgcagttgcccttgcccttgcagagggaacaagtattgtaacagagagtatttttgagaatcgtttcaaatatgcagacgagctttccagaatgggagccaacatcaaggtagaaggtaattctgctattattgatggtgtgaggaagctgacaggagctagagtcagtgcaccggatctgcgtgcaggagctgctcttgtgattgccggacttgcagcagagggtattaccatagtggatgatattcagtatatccagagaggatatgaggattttgaggataagctgagaagtcttggagctgagatcgagcgtgtatccagtgagaaggagatccagaagttccgtcttcgtgtaggatgatcttatggatttggcctgatgctatagcatgctgtaaagcggtgttaatactatgaaatgactggcggtcaggcttttttctgaaatctattgacaattgatattaatgagtatattgtattgtttgcaacgatacaattaaaaatagccttttattcagagtggtggaggtacataggacctgagaagccacggcaacccctgagagatcatggaaggtgccctgcctgagcgagcaatcgaacaataagaggactgattatatatagcatttattaaacagtccgattattcgggctgtttttacatttaaagagaaaaggagaaatcatggagaaacttttatttacttccgaatcagtaacagaaggtcatccggacaaaatgtgtgatgctatttcagatgccattcttgatgcattgatagaacaggatccgatgagccgtgtagcctgcgagacagcaacaaccacaggtcttgtgcttgttatgggagagattactacaaaagcatatgttgatatccagaagatcgtaagggatacggttcgtgaaattggttataccagaggcaaatacggatttgatgcagatacctgtgctgtgatcactgcaatcgacgagcagtcaggagacattgcaatgggtgttgataaagcattggagctgagagaggataagatggatgaggatgaactggattccattggagccggtgatcagggcattcagtttggttatgctaccaatgagacggaagaatatatgccttatgccatcaatatggcacacaagctttcatatcagcttacaaaagtacgtaaagacggtactttaaaatatttaaggccagatggcaagactcaggtaactgtagaatacagtgaagatggaaagccgatccgtattgatgcagttgtatgctctacacagcatgatccggatgtaacacaggagcaaatccataaagatattaaaaaatatgtatttgatgagatcatcccaagtgatatggtagatgaggataccaagtattttattaatcctaccggacgttttgtaattggcggacctcatggtgatagtggacttacaggacgtaagatcattgtagatacatacggtggaacaggacgtcacggcggcggtgctttttccggaaaggactgtacaaaggtagaccgttctgcagcttatgcagctcgttatgtagctaagaatattgtggcagcaggactggccgacaagtgtgagatccagctttcttatgcaatcggtgttgcacatcctacatctattcatgtagaaacatttggcacaggaaagctttctgatacaaagcttgtagaagtgatccgtgagaattttgatcttcgcccggctggtatcatcaaaatgctggatctgcgtcgcccgatctacaaacagactgctgcttacggacattttggacgtacagatgttgatcttccatgggagcatctggacaaagttgatgatcttaaaaaatatctggcataagccgttaatagatttggaaaatgcgcttcactgtatggtggggcgctttttttcgtaataggatcgtgcccagtgaagcttttttatagaaaatttagagataaacaatggtatctgtgatataatactgctaacgtacaggatgaataagtaaaggatattgcctatgaaactgaaagcaagaatcatcgtaggatttacgatgatcattttggttccgttactgctttttgctgcagcattatatggttttagagagactcagtccaagcaaaccgttacccagacagagactgacagtgatggagaagtatatgatattgccatttcgcagtccgatgaaggacatgccaggatccatttgatgaccaaggatctgtttttgtctgcatttattattcttatatttacagctctggcaattggtctctggctgtaccggagtattgccactcccttggtaaaacttaaaaaagcgacgcagaacatcaaagaagggaatttggactttgtcctggatgtagagggaaatgatgagttttcccagttgtgccaggactttgaagagatgcgccgccgtctgaaagaatccacagaagagaagaatctgatcgaaaaagagaataaagagctgatcagtaatatttcccatgacctgaagaccccgatcactgctgtgaaaggatatgtggaggggatcatggatggtgttgcagatacaccggagaagatggacagatatgtgcgtaccatttataataagacaaatgagatggatcatttgatcaatgagcttactttttattccaagattgacaccaaccgtatcccatatacgttcagcaagctgaatgtagaggattatttcagtgactgcgcagaagaagttggtctggagctggaaacaaaaggaatcgagttggtttatgccaattatgtggagaatgatgtggtggtgatcgctgacggtgagcagatccgcagggtgattcacaatattatcggcaatgccatcaagtacatggacaagaagagaggtattatacagattcgtgtaaaggatgttggagattttatccaggttgagatagaggacaatggcaagggtattggggccaaggatcttccatatatttttgaccgtttttacaggacggatatttcccgtaattcttctaaggggggcagtggcatagggctttccattgtaaagaaaatcctggaggaccatggcggcaaggtatgggctacaagccgtgaagggattggtacgatcatgtactttgttctcagaaaatatcaggaggtacctatgaaatgagtaagatattgatcatagaagatgaagaagcaattgcagatctggaaaaagattatctggaactttccgggtttgaagtagagatagccaaccggggagatacaggacttgatcgggcactgactgagaaatttgatctgatcattctggatcttatgcttccggaggtggatggctttgatatttgcagacaggtgcgccaggaaaagaatatcccgatcatcatggtttctgccaagaaggatgatattgacaagatacgaggacttggactgggagcagatgattacatgaccaagccattcagccccagtgaactggttgcccgggtaaaagctcatatggaaagatacaatcgtctggtaggatctaatgtccagaagaatgatgtgatcgagatccgtgggatcaagattgacaagacggccaggagagtatggattaatggggaagaaaccacctttactaccaaggaatttgatcttcttacttttctggcagagaatcccaaccgggtatttacaaaagaagaattgttccgggagatctgggatatggaatctgtaggggatatagccacagttactgtacacattaagaagatccgtgagaagatagagtttaatacagcaaagccacagtatattgagacgatctggggtgttggatacaggtttaaggtttgatcctgctggatcggccatacagataggacatgaggacaggatggaacgattatataaaaagctggaagcatacggccaggaagggtcttacccgtttcacatgccggggcacaaaagaaacaaagaatctgtgtacggagattttccaatagagcaggatattacagaaatatatggatttgataatcttcatcatgcagaagggatcattaaagaagcacaggaggaactggccaggctttacgaagtaaaacaaagttttttttctgtaaatggaagtacggcagctatccttgcggctatttctgcttctgtagaaaagggagggcagatcctggtagcccgcaactgccacaaagcagtatatcatgggatttatttaagagatcttgaaccaatatacatttatccacagacagatcctaaattggggataaacggagaaatttcaccttcccgtgtggaaagatcactggaagaaaataaaaatatccaggcagtgttgatcacttctcctacttatgatggagtagtgtcagatattcagaaaattgccaagatcgcacatgagcatcaggttccattgatcgtagatgaggctcatggtgctcatttccggtattcttcttatttccctgtgccagcagagaagctgggagcagatgtggtgattcagagctttcataagaccctgctttctatgacacagactgcagttctccacaggtgcagtgatcttgtagatgggacaaagcttgccagatttatggatatttatcagaccagcagtccctcctatgtacttatggcaagtattgatgcctgtgtagacaagatgaaaagagaaggtacggacatgtttcgcacctttaccaggcagctggagcaggcaaggcgaagcttggcgaaatgtaattatataagattgattcctgagtcaggcaataaagaatatttcgattttgacagatcaaagatcatattgtctacagagcattgttcatttaatggcacgcagcttgccaagatcctgcgtcaggaatttaagatcgaagtggagatggagacagagcagtatgtgatcgctatggcagcagtaggtgatacagaagaaggatttttacgtttgtgtgaggcgatacagactattgatgaaagagaagcatccattttgaaggtggaagataagagggtagagtatgattttcgctgggaagaaaagaagcagtttatgaggatcgcccaggcaatggatgctccgtctgtgccttgtcctttagaagaaagtgcagggaagatttctacagaatttgcttatttatatccgccgggaattccgcttctggtgccaggcgagcagatcactggacttttcataaagaatgtgagaagatacacggagcagggactgaatttccagggtcttgcagacaatacaaatgaaaccatagcagtagtaaaggagttatagggcttatgccctggaaccatatgggaaagattttttatatcatgggaaagagtgcatcaggtaaggatcatatctatgcaagactgatgcagcatacagaactgaatctgaaaaaaatggttttatatacaacccgtcctatacgtgacggagaagaagaaggaaagcaatatttttttacagatgaagaaaagctgaaagaattcaggagaaagggttgtgtgatcgaggcacgttcctacagtactatgcatgggatctggtcttattttaccgcagatgacggacaggtagatctggcacaggatgattatcttggaattggcacattggaatcctatctcaaactgaaaaaatattatggagaggatgcagtccgtccggtttatattgaagtggaggatggagaacgtcttacccgtgcattgaatagggagaaggagcaggagaagccaaagtatgaggagatgtgcagacgtttcctggcagatcaggcagatttttctgaggagaatattctgaaggcaggaatctggaagaggtttcagaatgttgaattggaggattgtgtggaggagattgtaggctatatcaaaacacaataaaatacgaagatacaatatgtgggggtaaattttaaagaaacgatatatcaggccttcgttttcggatctggcgtcttgtgtaaattgtagcattatatccgaaaatatgatatactgaaacaagattgatgagagaggggcgattcctatggtagggtttaataatgtgatagggcatgaagagattatcaggcatttacaaaatgccatcaaaacaggaaagatatcacattcctatatttttgccggagaaccgggatccggaaagcgactgcttgccggcatttatgcaatgacactgcaatgcgaagcaggtggagagaatgcatgtgggaagtgcgaatcctgtaagagagctattggtaagaatcacccggatatcatcatggtgaagcatgaaaaaccaaacaccatcagtattgatgaaatacgtgagcaggtagtaaatgatgtggatattaagccttacagcagtccacataagatctatattattccggatgcagagatcatgacaccgcaggcgcagaatgctcttctgaaaaccattgaagagcctccggaatacgctgtgatcatgctgcttaccagtaatattgacggccttctgcctaccatccgttccagatgtgtacgtctggatttgaaggtagtggatgatggactggtaaagaaatatctgatggagcatcttcatataccggattatcaggcagagattgatgcatcttttgcacatggcagtataggcaaggcaaaggaagcagccacctctcaggagtttgcggatattactcagaaggcacttaagattctgaagtatgcagattccatggaagtatatgagctgacagaagccattaaaaatctgtccagtgagaagcagaatattaatgactatctggatatttttcagttctggttcagggatgttctgatgttcaaagctaccagagagatcgataatctggtatttaagcaagaaattaattatatcagggaacaggccagtcagcgttcgtatgagaatctggaaaagatactggaggcattggataagacaaaagtacgtctgcgtgccaatgttaatacagaactggcactggaattactgtttctgacaatcagggagaaatagaatggcaaaggtagttggtgtaagattccgaaatgtaggaaaaatatattattttaaccctaaaacctacaaaataaaagtaggagatcatgtgatcgttgagacagcacgaggtgtggagtatggcaaggttgtgcttgcaccaagagatattaaagaagaagatgtggtgcatcccctgaaagaagtgatcagggtggcaacaaaggatgatgacgaaagagaagcccagaatcgcatgaaggaaaaggatgctttcaagatttgtcagaagaagatccgtgaacatgggcttgaaatgaagctgatcgatgcagagtatacttttgataacaataaggtgctgttttattttacagcagatggacgtattgatttcagacagttggtaaaggatctggcagccattttcaagaccaggatcgagcttcgtcagatcggagtaagagacgagacaaagattctgggaggcattgggatctgcggcaggtgcctttgttgtcatacttatctgtcagaatttgcaccggtttccattcgtatggcaaaagagcagaacctttctctgaaccagaccaagatttctggtgtgtgcggaagactgatgtgctgtctgaaaaatgagcaggaaacctacgaggagttaaacaagcgtcttcccgggaatggtgatacggtgatcactccggatggccttcatggaactgtacacagtgtgaatgtactgaggcagagagtaaaggttattgttgagattaacgatgaaaaagagatccaggagtttgctgtggaggatctgaagttccgcccaaggaaaaagaaagtgaagatttcagagcaggaactgaaagaacttaagaatctggaagacaaaaagggagactccaagctggatgaataaagatcttgtaaaagaaaatgaacgtgtagatgatctgcagaatggctgttatgtgatccaggacagggaaaagttctgttttggcatggatgcagtgcttctgtcaggttttacaaaggtaaaggaaggggaaaaggtacttgatatgtgtacaggtaccggcattatccccattcttttatctgccaaaacaaagggaaagaattttaccgggatagagatccaggaagattgcgcccagatggcagaaagaagcgtaaagtataacggccttgaggacaggattcagatcatacagggagatataaaggaagctgtcagtattttcggggcagcttcttttcatgttattacctgtaatcctccttatatgatcggtgcccatgggctgaccaatccccatatgccaaaggcaattgcaagacacgagatcctgtgtactttggaagatgtggtaagccaggcagccagggtactaggggacagaggacgtttttatatggtgcacaggccttttcgattggctgagatcatgaatgttctgaccagatacaagctggagccaaagagaatgcagctggtttatccatatattgataaggaacccaacatggttctgattgaagctgtgaaaggcggtaatccgcggatcacagtggaaaggcctttgatcgtttatgaaaagccgggggtttacacaaagtctatcttggaactgtatgggatggtatgaggtaaggatgattatgcagtggttattttacctcagtcgagaagactcccacctctttcaggtggtgagtaacagcaagttcgtctcagtgggagtccaatctccgactgagataaacgctccgcgaggatgcgcagtgattctgtaaagaatatgtcagcttacgctgaccagaatcacgcgccaagtctcgcagctgctcgacttgaatgtatctgaaatgaggaatttatgagcggaaaattatatctatgcgcaacaccgatcgggaatctggaggatattacattccgggttctgcgtacattgaaagaggtggatctgatcgcagcggaggataccaggaatagtattaagctgctgaatcattttgaaattaaaacgcctatgacaagctatcatgaatacaataagattgataaaggaatggtactggttgaaaagatgcgtcaaggtgccaatattgctctgatcacagatgcaggtactccggggatttcagatccgggggaggaactggtctccatgtgccaccaggcgggtattgaagtgacctctctgccaggtcctgctgcttgtattacagctcttaccatgtccggtctttctaccagacgatttgtttttgaagcctttcttccctctgataagaaagagcgcagggcggttctggaagaactgaagaatgaaacaagaactatgattatttatgaagcaccacatcatctgttaagcaccctggaagagttaagggaggctcttggtaacaggaaaatgaccttatgccgggaactgaccaagaagcatgagacagcatttcttaccacaatagatgatctgctggcatattataaggacagcaagcctttaggagaatgcgtgctggtgatccaggggagaagcagaaaagagatggaaaaggaagcccaggaatcctgggaagagatttctattgaggatcatatggagctttatgaaaagcagggaatgccacgtaaggaagccatgaagcaggtggcaaaggacagaggcgtgacgaaaagagaaatttataagtatctgatccagtgaagcagaggactttttgctgcttacatgtggcactgtgccaggtattcttgaagaatggggaaagaaggtgaaagtatggcaggaataaaggacgttgcaaaactggcgggagttggagttggaactgtatccagaatgatcaatgaaagtggatatgtttccattgatacaagagcgaagatagaagctgcgatgaaagaactggattatacacccaatgagcttgccagaaatctttactataaaaaaagcggcatcattgccgtactggttcctaatgtgctgaatcctttttttgcccagtttattgactgtgtagagggagagctgcgcagagccggatttaagatcatgctttgcaacaccttgaaggatgtgaagtcagaagctgaatatctggatcttttgaacagacatattgtggatggggtgatcgcaggcatgtcttccctggatgaaagtgaatattccagaatccagaagcctgtcgttgcccttgatcgttatcttggagaacatatccctgttgtaacagtagatcataaagaaggtggaaggctggcagcagaagttctgcttgccaatggatgcaggaaaatccttcattttagaagtactgctgagaaaaagtccctgtaccatgatcgtcacatagaattccagaagatcatggatgaacgtggtgtggaaacttattgctataatttggactggcgccgacttgatattgagtattatcatcaggtagtggaagaaatatttgaaaaaaggattgaatttgatggtgtatttggagtagaccggctggctattgaatgcatgaatggtctgatcaggcagcataagaatgttcctcaggatgtaaaaatcgtgtcatatgatggaacttatattacagagatcgttgagcctaagatcagtacgattgtccagcccattgacaaaatggctgaagcatctgttcagtgtatgtgtgagctgatcagtgggaaaaaaatcaaaaaccgtcagattattttaaaacccacattccggaaagggggcacaacagtttagaaaattgaaagttttgcacaaaaaacagtctgttttgtgcaaaataaacacctgaaattagatagaatgaacgaaaaatgaaaaaaaatcacaagtgtattgacaaaaataataaaaaaagtataataaatttaaaggaattggaaaacagaaatgtttttaatagatgtggaacgcgttccacataagaaaacagattttccaatttttaacccgtaaatttagataactccggagaagatctaaacggttcaggtgatacgtaaacgaaacgcattctaaataactaaacaaaatgatattaataaccaccaatatcacaggctgaaaaagtaaggagaaaaaagatgaaaaaaagaattattaattcattactcgctgcaacattaactggaactatgatggctggaatggttgtaccatgttttgctgaggataaggacaatgggggcagcataactgttcttgttgaaagtggttcaccggcagaagcactggccaacaatacggctgcggattttgaaaaagagacaggatgcaaggttgtgattgacgcagttgcttatacaggtatgtacgataagctttctacagagatcaaggcaggtcaggctgcacacgatgttgcatgtatggattttgtatggctggcagcatttgcggatgcaatcgaaccgatcaccggagctgatacaagtgattttcttccaacactggaagagagcggaactgttgatggcaaccttctcggatatccaatgtgggtgaattcaaagatccttatctacaggaaagatctgattccggaggataaagtgccgaagacctgggatgaatacaaagcacttgcagaagagttgaaaacagatgacatgtatggaacaaccgtatttggaagtggtactgatgcagtttgttcattccttgattttgcatgccaggccggtgcagaaggacttgtatatgataaagacggaaatgtaaatattactgaccaggcatacgtagatgcattgaacttcatggttgaaatggcaaatgcagattattcaccttcagattctcttgctacagcagcaacagaatctcaggagttatttacaaacggcaaggttgccatgcagctgaactggagccatcagtatccggcagcagtagcagcacttggagctgataaggttggatgtgcaccgatgattggtggaagtgcaggcattggagcaacaacaggtccttggtatgagagcgtgatgaagaactctgaaaacaaagacatggcactgaaatatgtagagtatatgtatgatcataatgctgattacatgaatgaaacacttaagatcgcaggacgtacttctgtatacgaagaatctgccaaagaggctggaaatgagcatacacaggcagttctggatacactgggtgcagcacagactcagccaagaccaatggttgtaacatggtcacaggtagaagaagtattgacaggtgttgtagaatcctgtctgggcggtgctgatgtggaagaaactcttgcagctgcaaaagatgagatcgaagcaatcggcaagtaagatcatatagatcatattgagtgtataattgatccaagggtggtttgacaaaaaaagagttgaatcacccttggttttgagaaagcgggaaatagtatgagactgatatcaaagaaaacattattgctgttctttcttccgggtgcgattttcatgggtgcttttttgatatatccgatcatgaaaatggtatttgacagcttttttaaggttggcatcacaggggaccgggcatttataggacttgataattatattaaagcatttactgccggtggatttatgaagcagttgaaaaatacactggtctatattctgatagcggtatctgtggaaacaattcttggatttatttttgcattactgtttgaactcaactataaaggaagcaagatcgttcggtcttttatgatgactccgcttatgattgcaccattggttgcaggtcttatctggaaactgatgatgagttcaaatttcggtattgtcaatgagatgctgatgagaatcggaatcctatccaacgccagtgatattctgtggctggcggattccagatggtctttgatcgcatgttgtatcgcagatatatggctgaccacaccatttatgatgctgatgattctggctgggcttcaaggtttggatggcagcatgatcgaagcggcaagaatggatggagtcaataagctgcaggagattttttacattaaagtgccgggaatcaagccggttctgctcactgcattatctgtgcgtatcattgatgcagcaaagacatttgatattatctgggcaatgacagaaggcggccccaacagttcctctgagacgatcagtattgttatttataagactcttgtaaaatacaataacacaggatatgccagtgcgatggctgttatctttatcatagttcttgtggtattcactttaatattcatgcagagtttatggaatccaaagaaaaaataaaaactgttgagaaggtattaaacagtaattattaaggatttcaataaggagaagaaaatgaaaaaaggtaagagtatcaaactgaaaatagcaattgttatttcaataattgttacactattctggttgattccatatatttatgtaatctgctgctcatttaaaccgggatcagaagtggttgcagttccaccgtcctttctgcctaaagtattttcaacagagagtttttcacaacttttttccagaatggatgcagcaaaatatttgatcaacagtctgactacagctgtaggcagtacactgatcgcggtaattttgggatctttggctgcatatgccattcaaagatcaggagcaaagttgtctgtatggctggtagttctgatcttgtgtctgaaaatgattccaacttccagtattgcagttccaatttatgaaatcatctgtaacctgggactttatgataccaagattgcactgatcattgtctatgcagctgtcaacatgccttttgttatgtggaccatgcttagcttttacgaaggaataccatcaactctggatgaagcggcatacgtggatggtgcaaccagtcttcagactttccgaaggattattttgccaatctgtatgcctggacttgcaactgcatttatatttacattgtttctggcatggaatgatttcctgctttcattgcttctgacaagcatgaatgccaaaacatttaccgtaggacttgcaggtttcctatctgcatataatcaggatcttggcccaatgtgtgccggtgctttcctgttcagttttccggtaatgattttgtccatgtttgcgcaaagatacattgttcagggaatgactgccggagctgtaaaagggtaatgacatggagaaaatagtgactaaattattaatgaacgaaaaaattgcaaaagcacaaaaagaaatagatgataaaaagaagtatgtggaaaatggaaaaatgcgtcagcattaccatttaatgcctcaatgtggatggatgaatgatccaaatggactgatttattttaaagggcagtatcacgttttttatcagacaaatccatatagcggtttctgggatagtatgcactggggacatgctgtcagcaaggatcttcttcactgggaataccttcctctggcactggcaccaagtgaggtatatgatgattttcaaaagggcggatgcttttccggaagtgctattgaacatgatgggaaaatgtatctgttttatacagctacagccaatcatggacatggaaatgtgcagacccagtgtcttgccataagtgaggatggtattcattttgaaaaatataccggaaatccactgatcactgttccggagggaatcgaaccggactcatttcgggatccaaaggtatggaagcatgaagaaaaatattatatggtgatcggaggaagccgcaaccacagaggactggctctgatttttgaatctgaagatctttatcactggaattacttaaatgtactgtcagaaagccgtggagaatggggatttatgtgggaatgtccggatttctatccattaggagataagtacgttctcacattttcaccgatgggatcaggggatcatacctctgtatatctggtaggggattttgattatgaaaccggcaggtttgattctcatgtaagtggggaaatggattgggggtttgactattatgcaccacagtccattgtaacaccagatggaagacggctggtcatttcctgggcaaatgaatgggaatggatgccgctttttaaggattggggacctacctatcaggagggatggtgtggtttctttaatctgattcgggaagtaaaacttggtaatgatggtacattgcagtttgttccaatagaggaaatgaaaaatatccgtgaagacgggttctgtcaggaagaaatgctgataacagaagatccgaagcagttaaaagcaggagacgggatcagctttgagatgaaatttgtgtttgatcttaagaaaacagacgcagacagtatagaaatgaaatttagatgcggtgacggaaaagaaacctgctgtatctttgatttgaaaaatggagaattgtctgtggacaggcagaattctgatggatggagcacaggtgtatccagaagtgtgctgttggttaatgataaaagcgaactggatgttcatattttttctgatcagagttctctggaaatttttacagatcagtatcggaataatcattcaaacaatatttttgcaggtgatcagcaggatcagctgagtatttcagctcatggcggaaaagcagtgatcagaaattatgaatcatataaattaaaagactgtttcaggaaagagtgaccggagggataaaaatggctggtaaaaattactatgatgtgacagactggcatgttggtaatccgtatacggatattggagaagtgatcaacagcatccttgcagatattaaaagcagacaacaggaaacggatgtgaatgatgagggaaaaccaggtgcggttatttatattccttccggggattatcacctgaaaactcaggtaaagattgatatcagttatctgaagatccaaggctccggacatggatttgtgtcgtccagtatccggtataatgtaccacaggaacagtggaaagatcttcatgatatttggccaggaggcagcaggatcctggtggatctgaagcctgagaaaaacgacgaaaggtcaggagcggcatttttagtagagcgtgaaggagatccaagaatcagttctgtggaatttgaaaatttctgcatagatgggcttcattttgtagatgatgggaatggagatcctgagaatacatatgtaaatggaaagaccgggatttatgttgccagtgcacaggattcatttagaatcacaggtatgggaatcatatatctggagcatggcgtgactctttacaattcagatgcactgtctgtacatgataattttatcgcagaatgtggaaattgtgtggaacttcggggtgctggacaggcatctaagatcacagacaatcttatgggtgcaggatacagaggtcattcaatttatgcagaaaatttcggaggcttactggttgcttccaacaatattttccccaggggcagaagcattgttcattttagaggtgtgcttagatcctctgtaacagccaacaggtttcactctttttatccgggcatgctgatttttgaagattgcagggaaaatctggtatcttctaatcatttcctgagggatcatgagccgtggccgcctatgcagggatatgataatgggctgaatgatgattatggccttattcatatagagggaagctgcaactctgtgatcagcaatcatatttctgaaaccatagaaatgcaatatttaaaaccggcagggataaagcctgtggtgatccgcctggtttccggaacagaaaattacgttgcctgcaatcatattgtagcgactacacaagcagacaaaaaagaaaaagaaggggattcttcctgcttcgatgcacaggtgggggctttgctcagcatgaatgaactggtaagactttctgtggatgctgtgcgcgtagatgcagcgtcttctgataacgttatactggatacatgcagggaaagcgaagcagcaatggattttgacatcaatgtattcagagggattccgggaaaataagaaacaaattaaaaaataaacagattaaacagaaggtttgaaactgaaaacggttgtcggatttcgcaaacaggatttgcgtgatcaaggcaaccgttttttgtttctgtcatttatctgtcaatttggagaagttgattatcctatcttttgggtagaatcgacggaacattagtagtataataaagggaattaaagcagacggatttgatacccgggctgtcacaaatacacatgaagaaaagaagggaaaccatgaagaagaagtttttagcaggtattttaagttttatgctggcagtgcagccggctgcgatctgccaggctgaggaagtggccggcagtgaattcactgcaagcgagacaactgacagcgaaactgctgagagtgaagcaggcagcagtgaagcggatgagagcgagccagaaggagattcttctgccacacctgtaacaggggaagaccaaacatctgttgaggatgttgagaatcaggatgaagttactgacgcagaggagggttacgatgtttctggggaagattcccaggagggagatgtagtttttgaagatgtggaggaggatgcggatacagatctgttttcttccggtgagaacgaaggcaccaaaagctatgatgcaggaaatggcattaccgccacacttgtaaatggagtattcacagtcagtggctctggagcaatgaaggattttgcggattcaaagagtgccccctggaaagatgatgtaggacagatcagtacgattattatctccccggggattactcgtgtaggcgattacagctttatagaatgtggctccctgcgtgagatatctttgcctgaggggcttgtatccattggtgaagcagctttttacaatgcatataatcttcattcagtaacactgcctcagtctcttcaggtgatcggtacagcagcttttgcagactgcatcaatctggaaacattgaatatgggatcacaggttcgtgaagtaggagagtatgcttttcagcagacggcgattacttcttttcattttccagcatccctgactacgtatgatccgctggcatttttcggatccagtatcagccagtatacagcagacagtcagaatccgtcctttaaagcagaaaatggtgttctttttacaaaggatggaagcacattactggattatccaactgggaaaagagatacttcctatgcgattccaaatggagttgtaacggtaggaggttcggcttttatcaaaaatacagccttgcagcaggtatctattccagctactgtgacaaccattggagactgggcatttgccagatcaggtcttacatctcttacaattccggatactgtgacaaccattggatacggcattgcgcaagagtgcagaagccttgtgacagcttatgtgggaaatggggtagctgttcttccatacagaacttttgagcagtgtacaagtcttactacagtaactcttggaagtaatattaaggaatttggcacaagaatcttttttaattgtacagcccttacttctgtaaatcttccagaaggactggaaaatattgatgtagcagatttctggggatgtaaatctcttacataccttaaggttccatctactgtgaaaaagattgaagcaggagcgtttagcggatgtaccaatctgaatgtggattatccttctcaccttacacagatggaagatgggtcttatctgacggtggaaaccttatattattcaggaaattaccattacgatgatgcatatcgggtgttggatattgtaaatcaggaacgtggcaaagaaggtctggcacctctttccatggacgaaagccttttggaatcagccatgctccgtgctgtagaaacatgtcttgatttttcacatacaagacctacaggacaggattgttttacagctaatgcaaaggcaagcggagaaaatattgctgcaggaagtacatctgctaccggagctatgaatcagtggatgaattcagccggacacagagccaatattatgtcatccggatataaaaccatcggtatcggctgctttgaacagggcggtacaaaattttgggttcagatgtttggcacagaagaaacgactgctttttcaaaaccggcagataagaaggtaagggtagcaattccaatagatccaaataattaccagaaaagcttttatttagagtgggaagaccagggcactgccaatatgtctcagggacagaaaaggattctgtgtgcacggatcgaaaatccagggtgggactgggtatattccagaccggatccggattctttcacatggaccagcagcaatccgtctgtggcaaaggtggacagtgaaggaaatgttacggctgtagcgggaggaaaggcagtgattactgtcagtggcgccggattgtccggatctgtgaatgtagcagtaaaaggcaagctggttgttgcagcgaaaaccattcgcctgaacagaaaaacactgagtcttctaaagggaaaaaaagcagttctgaaagcgactaccacgccagcaaaggctaatgaaactccaaagtggagaagttccaataccaaggtggcggttgtaagcaagaccggaaaagtaacagcaaaaagaaaagggaaggctgttataacggcaactctttccaatgggaaaaaggcttcttgtactgtgacggtaagggagatcccggcaaagcggatccggctgaatctgaaaagcattactgcatataagggataccgttttacagtaaagggcagattaacgccaggcaattctacagacaggataacctggaggagctccaataccagagttgcagttgtttcttccaagggtgtagtaaggttgaagaccaatggaagggcaaccatcactgccagaaccaccagcggtaagaaagctaccttgaaggtacgtgtgggaaaacgtaagaaagtggtaaagaaataaaatagcaaacgaaaaaatagaacagtaaatttcagttttaaaaatatgtaaaataaaacaggttctgggctttatcgtgaatgagtgataaggttcggaacctgttttgttgtatccggtcggcgaaattttgcgattttcatggcacgccctttgtttttgtgttataataaattcgagttattgggcttaaaaacagctcaggcctgagatggtctttattatagaaaaacgggaggaacaacatgggcgtagagaatacggaatacggagcggaccagatccagatactggaaggactggaagcagtacgcaaaagacccggaatgtatatcggaagtacctccagcagaggacttcatcacctggtatatgagatcgtagacaactcagtggatgaagcactggcaggtgtgtgtacagaaatcaatgtgacaatcaatcctgacaattccattacagtaacagataatggacgaggcattcctgtagggatcaatcataaagcaggactcccggcagtagaagtagtatttacagttcttcatgcaggaggtaaatttggcggcggaggatacaaggtatccggaggtcttcatggagttggagcatctgtagtcaatgcattgtcagaatggctggaagtgtctatttaccatgaaggtaagatttatcagcaaagatacgagcggggcaagaccatgtattctttaaaagtgacaggagactgtgaagaagaccgtcatggaactacggtcacattcctgccggataaagagatctttgaagaaaccgtttatgattacgatatattgaaacagcggcttcgggagatggctttccttacaaaagggctgaagatcgttctgaaggataccagagagggcatcgaaagagaaaagaaatttcattatgaaggcggtatccgtgagtttgtaacttatcttaaccgtagtaaagaagctctttatccagagattatttattgtgagggaaataaagatggtgtatatgtagaagtagctatgcagcataatgattcctatacagagaacagctatggctttgtaaataacattaatactcctgaaggcggtacgcatatcataggtttcagaaatgcccttacaaagacttttaatgattatgcaagaaagaataagcttctgaaagacagtgagcctaatttaagcggagatgatatccgtgagggacttactgctattgtcagtgttaagatcgaggatcctcagttcgagggacagaccaagcagaagctgggtaacagtgaagctagaggcgctgtagacagtgttgtaagcaagcaactggagattttcctggagcagaatccttctgtggcaaagacaatcatagagaagtctgtgctggcacagcgtgcaagggaagctgcaagaaaggcaagggatcttaccagacgtaagtccgcacttgacagcatgtccctgccaggcaagctggcagactgttcagataaagaccctaagaattgtgagatttatattgtagagggagattccgccggtggttctgcaaaaactgcaagaaaccgtgccacacaggctatcctgccacttcgaggtaagatcctgaatgttgaaaaggcccgcctggataagatttatgcaaacaaagagattaaggcaatgatcactgcttttggaacaggcatccacgaggattttgatatttcaaagcttcgttaccataagatcatcattatgactgatgcggatgtggacggtgcacatattgctacactgctccttactttcctgtatcgcttcatgccggaactgatcaagcagggctatgtttacctggctcagccgccgctttataaaatcgagaaaaataaaaagatctggtatgcatatgatgatgacgagctgaacaatattctgacagagatcggccgtgatggaaataataagatccagagatacaaaggtcttggtgagatggacgcagaacagctttgggagacgactatggatccggagaagaggatcttgttgcgagtgaccatggatgaggctgccacatctgagattgatctggtatttaccactttgatgggtgacaaggtagaaccaagacgtgaatttatcgaagagaatgcaaggtttgtaaaaaatctggatatctgattccagcaggggagaaaatgatttatggaagataatatttttgacaaagtccacgaagtggatttggaaaaaactatgaaagaatcttacattgagtatgctatgagtgttattgcttcaagggcactgccggatgtaagagatggattgaagccagtacagcgtcgtgtactgtattctatgatcgaactgaacaacggtccggataagccgcatcgtaagtgcgcacgtatcgttggtgatacaatgggtaaatatcatccccatggagacagctctatttatggggcactggtgaatatggcccaagactggtctttcaggtatccgcttgtagacggccatggtaattttggttctgtggacggtgacggtgcagcggctatgcgatatacagaggctcgtttaagcaagatttccatggagatgcttgcagacattaataaagataccgttgatttccagccaaactttgatgagacagagcgggagccggtggtacttccatccagatttcccaatcttcttgtgaatggtacttccggtattgcagttggtatggctaccaatattccacctcataatctgcgtgagattattggtgctgttgtaaaaattattgacaatattgtggaagaacagcgcgatacgactatagaagagcttcttgagatcgtaaaaggtccggatttccctacaggagctaccattctgggcaaaagagggatcgaggaggcatatcgtacaggacgcggcaagattcgtgttcgcgcagtgactaatatagagacactgcctaatggcaaatccaggatcgttgttactgagcttccgtatctggtaaataaagcaagactggtggagaagatcgcagagcttgtaagagataagaagattgatgggatcacagacttgaatgaccattccagccgggagggtatgaggatctgtattgatctgcgtaaagatgctaatgccaatgttgtgctgaatcagctgtataagcatacacagctgcaggatacttttggcgtgatcatgctttgcgtagtgcccaaaggtggcagtcttgagcctaaggtgctgaatctgaaacagcttcttgaggcttatctggcacatcaggaggatgttgttaccagaaggacaaagtatgatctgaataaggcacaggaacgtgcacatatattagaaggtcttttaaaagccctggataatattgatgaagtgatcagaatcattcgtggtgcacgaaacgttcagattgcaaagcaggaattaatcgacaggtttgaacttaccgatgtgcaggctcaggctattgttgatatgcgtcttcgtgctcttacaggcttggaaagagagaaacttgaggcagagtatgcggaactggaagaaaagatccgaagatttcaggctatccttgctgacagaaaccttttgctccgtgttgtacgtgaagaaatccttctgatttctgataaatatggtgatgagagaaggactgctattgggtacgatgtatatgatatttccacagaggatctgattcctaaagaaaatacagtgatcacaatgacaaagcttggatatattaaacgtatgactgtagataacttccgcagccagaatagaggcggcagaggcattaaaggcatgcagacattggaagatgattatatcgaagaacttctgatgaccacaacccatcattacctgatgttctttaccaatactggtcgtgtgtacagactgaaagcctatgagataccggaggccagccgcacagcgagaggcacagcaatcgtaaatcttttacagctgatgcctggagaacgaatcacggaagtaataccgatcagtaagtttgaagaaggtcattacctgatgatggctaccagaaagggtcttgttaagaagacgccgatcactgaatacgtgaatgtgcgtaagacaggtcttgctgccattgtacttagagatgatgacgaattgattgaggtgaaagctacagacaataagaagaatattttccttgtgacaaaagatggtatgtgtatccgctttaaagaatctgatgtaaggagtacaggccgtgtatctatgggcgtgagaggtatgaatcttgcagatggagatgaagtggtttccatgcagctgaatactcagggatattatcttctggttgtttccgaaaatggtatgggtaaacgtacttctatttctgaattcagctgccagaacagaggcggtaaaggcgtgaaatgctacaagatcaccgaaaagactggcaatgtgatcggggcaaaggctgtgaatgaagaaaatgagatcatgatgattacaacagaaggggtgatcatccgcttgcagtgcgctgatatttcaattcttggaaggattacttccggagtgaagctgatcaatcttaaagagggcgttactgtggcgagcgtagcaaaggtgcgggaaaaggaagaagaagcttctgaagacaaactggcagaagatccgggagaaagtgcagaagaggaaatgatttccaaagaagtacaaccggattcaggtactgaagaggaatgagaatagtcatgaaaaagggattgcgtcttacggttgcatgtattgcgatgctttttatcctgacaatgaccgggtgcggcgtgaatcacaagtcaccggaaggggtagtggaggcattgatcaaagaatatgtggctggcagtgaaaagaaagtgaaaagctgttatgtgcagcaggacaaagaggacgatgtgcttcaaaaagaaatcactgcaaccctgaagtattttcaggttcatgaggcaagcgaggtaaatatcaaagaatgtgagacgcttgcggaaaaagaagattatgtatatgtgtatgtgatctataatctggttcttaaggataaacaggaatatccctgtatcagcacctatatggttcagaaagatggacgaaagtattatgtacttcctccttccatggtcacaacagatatgagcaaggaagcagcgacagattatgccaaatttatgaccacagattcctataagaattatacaaaggaatatgatgcatttattatgaagaatccgggatatgaggagctcattgccgggaagctttaagcaactgcagattagggctgccgcaaaaagataacatgcggcggcctattttaaaatgattcggaaaaataaatcatatcaaatgatttatattagatgatttgtataaaatgattcataaaatgaaaagaggttcaaatgaaaagaataatcgttatggtattgagaaatctgtatagaattccctatttgtggataaagctgtgctggtacgcttcgcatgtggataagtatacagaagaacaaagatatgcacttttgaaaaagatagatcatgcggctaatacaggtggtaatttgaatgtgcagggctatggagttgagaatattccgaaagaaaatggttttatgttctatcccaaccatcagggattatatgatgtactggcgattatggaatgctgtcctgtgcctttttctgtagtagccaaaaaagaagtgtttcaggtaccttttctaaagcaggtatttacatgcatgaaggcatttatgatcgacagagaagatattaaacagtctatgcaagtgatcatcaatgtgacaaaagaagttaaaaatggaagaaattatctgatctttgcagaaggtacaagaaataaagacaaaaacaatcctcatgagtttaaggggggcagctttaaagccgctatgcgtgcaaaatgccctattgtgccagtagcgctgattgattcatataaatcctttgatacaggatctgcaaaaccattgactgtgcaagtgcattttctggagccaatcccatatgaggagtacaaagatatgaaatctacggagattgccgaggaagtgcgcagccgcattacagatacgataaaaaaatatgaaaataattaaaattaattagaaaaagccattgacaatatagaggttcttaagtataataactaatgcgctttgaaaaaagtagcactccaattgaataagagattatgatttcggagtccggagaagtactcaagaggccgaagaggtgcccctgctaagggtataggtcgtttacgcggcgcgagggttcaaatccctccttctccgttattttttacttttgaattaactttaaagtaaaaaataaaataaaataaaaaacctgttgacaaactgacttatctatgataaagtagtcaagtcgccaacacggatgacaaaacttcatcttcaagaaagtttgaaaaacttcaaaaaagttgttgacaaacaaaaaaagatgtggtaaagtaaataagctgtcgagagacagtaaaaagcaatgaacattgataactaaacagtgaaacacatacgattctcgaaaattcttttacaatcacattcggaagaatgaactttaaaacagtaatgacgagagataactaagctagttggttgtctt

SEQ ID NO: 141 - DNA, 798 bp, Unknown
  gut microbiota DNA sequence
ttacccgtaacctccgaggcgattgccatgtactgtgcaattgtcagaagctcggctccatttatatcaacaattcgatcttcccaatcagacattgccgcacaggccgccgcaagcgcacagtcatccctcgaaacaaatgccattttcccatctcccatgttattgcggatgatgccgtttgtattttcaactgcttccacaaatgtggagaccattgcttccgcatattgggaatcccgaagaatcaaataatggatgggctgttttttgatatacctttcggtccatacatgatcgtttacttcgtaagcattgatatcctcatgtccggctcctacaatcgatgtataaaccagtttgtttacacctgccgccacagccgcatcaattgcaattttatgtgccgctcttcttttcggtccaacgaatggcatggagatcagaataactgtatccgcatctttaaatgcttccgtcagtttttccgcattgttaaaatcggcaattctggtttcaatgcccattgcctgatatttttcaagaccattttttgttggagccgtaaaaatcaaagcttcatgaggatatttttccagcaatacacgggctgatctgcttccaaaatttccgtctactccatttaacaatatctttttcataaaaaataatcctttcaactatatagttataatattaaaaaatcgatacccctttataggatgctccctcagctctttttattgcctccttccttttgtctgaattatattatctcctctctaactgtcggcgcct

SEQ ID NO: 142 - DNA, 5321 bp, Unknown
  gut microbiota DNA sequence
gccatctcccgtcatcagttatataattcatttataccgtcttttttcgtcaaaaataaccaaaggagtttttttgcaatgaaatctatgagcatttctgtcatccttgactggattcctgataaatacaggattttttataaatctacgggcttagatcaattattccggcatgcccgcatgcttgatgattccatggaaataatcgataatgattttctgtatttaacacaagagagctctttccttgatagggaatgggatatacataagccccggttcctgattttctgtaccaaaaccggatcaaaggagggacagataaacccttcctggatggagcatgccgccatcttatatacggacgagccttttcataaggtattccgtgagtttctggatatttttgataagtactatgcctggtatgagcaatgcctaaatataattatcgaaaacaaagacgtttcagatctgcttgattatgcggccacctttctttgcaacccgattgcccttttttctccaaccggaaagctgctgcattataccggaaaatttcaggaaaaaatcgagggaactctctgggacgaggttatcaatttcggctttacaccgacagaatccatatatcctgacgaacaccagagagttatgcaggaaattcacagcggaaaccgcttaatctccagcgtctttcgtcaggatccatcccatcactctctgaccgctccgctttattttgagggaaaaaactttggagcattcggtacgacagatatgaacggtccctttacggaagcacaaaaggctttgttattagaagtcgttcattttacagagcttgctatgaatcaccagattcaggcttttcttttgcaggatgaagaaaactattatgttatacggcttttacagggatatccggcagatgagctttctacctcttattatctccaagccagaaattatacgaacgaggatatttggtatctttatcaattttcccttccggaatctgacgtctcggatacccgtcagtctgcctatattcatcagataaaaaatattctgcctcatggagttgtcctctattttgaacattctattgttgcagtttgccgcaggcgggattttgatcctgattatgaaaaatcatacgccgcactggaggatttgctaaaacggctttcccttaaggtctatataagcacccgtttttttaaattcacggagctttccatggcatatggacaatgcaggcttatgaaatcttaccctttggagcctcaaaaacatattcaaaggtttgatgaagcctttccgcatgttttatatggtgtccttaaggaaaaaaactccttgccgggcttctgccacccagctgttttatccctgtggcaaagccatatggagcaggatctcacgctcattcataatttaaaatgctatcttatcaacggaagaaatatagcggagactgcccggacgcttcatcttcatagaaacaccttgatctaccggctacgaaaaatcgaagacctgctccatatttcactggattacctggatgaaaatatgcttctctatttattaatatcctgcttcatctgcgaaacactctaatttggacatcctcctatgcttgaaatttggcttgcgacagcaatttcattgcaacataggaagattttcatttattttgtgattcttacttttgattgtttccgaactgagggagtaacagcccacagaggaacataattaccatacatatggatgcaagcataaacaacaaactataattatctcccgcaatcggtgttaagatataagttggaatcaaaacagctccaagaagctgtaatgtagagatgacacccgccgcacttcctgcatatttagttccaagtccttctaacaaaaccggtgcggaaaggaaaataggcattgacgctccaagcataattccagtataaagaaccagtatgtgtaaaacgaatatggacggaaatctccaacacataataattccggtaaaactcaacacggcagctcctgatacaaacactttaacatttttgattttagagaatacaatgggacctgtaatagaaccaatacaatttcccaatgtcaacatagatgcaatcgtaccacatactttcaaatctattccatacatggtctgcaatgccatcggcataaaagtggataaagttaccgtactgccaagagccatcataatgcaaatagaaaccagccatatacctttattagaaagtactaccttaagagaatccccaatggaaggttgattttcctgatctatcttctccctttcttccattgtatcctctggcttatctttcacaaaaagcaaccataaaacaaatacactaatacagaatattgctgatacaataaaagcagatgtcctgctatcaaacaaaactgccgtcgttgctgtcgcaaaggctcccggaagttgtccgcaaaatgcaaatatgcccatcaaaattcctagcttttcctgctcaaaccaacttgcagtaatcttggatgcattaatattgacaaacatattggagaaaccggttaatgccatgcaaagaaaaaatggcatatagctatttgcaaaaactctcccaatcattccaattccagctataacaaatgaaatattaatgactttctttgaaccaatcttgtcagaaatcattcctcctacaaaactcaagaaaattgctacaatcataggcgccgtaaataaagatgaaaactgcgatgttgtaagtccaaaagattgtattagttccggggcatacacggataactggtattgtgcataatttcccggcatatatgcaagacacataatcgtaaataccagccattttctattttttttactcatggaagctcccttcattcttcaaagccatacggacaagaactaatatcataatttttattctcaaccagatcatttaatggaaattttgcaattactgcacggatatcctttatacgctttccataatcgccccattttacaatcacttcttcgcgctctttggcatattccatatctatggtacattcagaaatcattttatgataatgggaactatataccgcactactggataaaccaataaccttgccatcccttgtggtaacatagtcctgatgtcctccacacatgcccggaacgcaacagggatactccatctgcttataaggctccccctctccatacaaagatgcctgtacatctaaaatatcttccggattccaaattaaagatacaatcatcttttgaggatttgacatttctttctcaagagcttttcttccaataaagtcatgatccaattttgccatccattgccagccaacctctaccggcgtccggaaacgtgcacgaagattctctggttcaacacttccagtatatgaaatatttgcaggtgacatttctacaaccttcggatctttataggaagcgctctcaaatgataccgtaacttgcggatagcctccaaaagcatgattcaccggataactccgccatccaagcctctttaatcccataggttttccgatctcataagccgcatgatatacattgggaccatcttcttttaaaccacgaatttcatatgcaagtgttccactcatcccaatcctgttcacttccacttcaatattcagtcccggaatacttaccttacgaaattgcaaaaatgctagatcatgaagattcgtattcgtaagtttttctataattgttaatgactttggtcctgaaaattgaaagacaaagatatcacgcatggtcattttcacatcataagcaccagtctccaacagtttcattgctgcaaatggaagtgcagccgtaatccgatatgtattatcgtcgtctttcatactaagacaatgagctgctatcaatccttcttcatcaagcataaccaaatgtttattttttccgtttttccatttgctaatgttattcatacaaagttttgagagaaacgcctgtgcatcttttccttggaatgtaatttcagccccactaatccctgcatgaatataacatgtttctgcccacgatttacaagtttcataccaaggatcagcctcccaagtataaagattcccaatattctgaaaataggttaaaacatctttatacttgggctcataatctactctcgctccaatataatcctccactacactttcctccttattccgctaataccccaaatcattcccagctctgttccctcttttgcatagtccgggttgataaagcccagtgaaatcttgctgttgtaatgataagaaataatcccactttttttaatcttgcatcacaattatttactcaaattttcttaaccgtcggcgcctgaacagtcacatttaatatttatattctaaaacgattgatcatctttgtcattggttatatgattcaactactaatacctttttcgttatttttaacccgatttagataatcttataaaaaatacatttatccattattcttgattcactttaacaatactacaaagtttttatgacctcttcataattgatatatcgtttattcaatcaaatctctttgaaacctcaacaaaaattttatatatttaaccaatggcatatccatactaaatcgtgatcgacgtgaatcagcaccgccagattgatgcatgtcccattcggtctgcgattgctaatcccgtaaatcccatattaatcaataacgatacatgggaatgcctcaaatcatacacacggattcgcttcaccccagatatttttgagcctctattcatttcatgatgcagataagatttggaaattttgaaaatccgttcgtcctctttcggctcatacagcattttcaggtaatcctgcatctcatcacacaaaaactgcggcatcttaatggttcgattactttttaatgtctttggcggtgtaatcacatcttcccggtgcagtctctgataggacttgttaatccgtagtgtatgcgtttcaagcttctcgttttgtaggaaatcctcttttggatgactggtgcgtttctcctgtccaatcagtataacgatagaccactcgccacttcccagtgacattatctttgtaaatactcatacaaattctcctctctttctcttacatttcgctgtaacatacttttttgcggaaataattagtgtttcctctgccagctaccgtaagataacccagcttctgtaattcttcatttgtacacggtaaatagttagtac

SEQ ID NO: 143 - DNA, 471 bp, Unknown
  gut microbiota DNA sequence
tttcagcacgtgctttctctgcttttaaaattttaacttcagcacgcagcttttctaattcactcatctcgtcgggacttttttgtttgccacggttatctcttaaagcttccactccaccagcttcatatttgactatataattacgagcctgttgataggacacctggtattgttctgctgtttgggcataattacgatcatgtgcgatacaatactgtactatttcaacccgttcttcaaaagtagtttttcttcctttggtcatgataatgcttcctcctgttccagaagattttaattcttcatgcccattatacttctttatccagatttgtaacttggcttttgaacggattccgtattttttgcaaatatcattttgagaaccatagcctgctaaataatctaagactgcttgttgtttcaattcttcggaatattttttattccctttcaatgtgaatgcat

SEQ ID NO: 144 - DNA, 7266 bp, Unknown
  gut microbiota DNA sequence
caactatatgattcctgtgccagaggaatgcattgaaaggctgattattaaaaatataaaagacgaaaagtatcgcgtgttattaaataaggaatatcggttttgcatggacaatgctgagcggattcagaaaaaagcaaataaaatatatgaaatggttacaacaaaccgaaaacaaaaattaactgataacagttgtgcttttaggattttggagcaaggctatcgagaatatgttgagaatgttttaacaaatattagaaaaaatcagtgaatcagtagtaaagatataattagtgaaaaaatatggtataaatataattaataaaaatgttaaaccctattgaaattagtagttggatggagtataattctgcatgtaaaaagaaaatttcttcagggcagggtgatcagagaagcgatctgaaattccctaccggcggtatagtccgcgacccgctgcaggcggttgacctggtgagattccaggaccgacagtatagtctggatgagagaagaacacacagatacgtatgaatgttgtacgaagattagtgcgtgatgccccgggagagattccggggcttttctgttaccatggatctttaaagcaggtcattggccggctttataagagacatcttccactggaaattttctttcagaataatttcaaaggagagatttttatgagtgaacaggttttaagaggcggaaacacaatggagaggagccgcacaaggactattgtgcaggtggcgatgctgggagcagtggcaggagttttgatgaattttgaatttcccctcccatttctggcaccatctttttaccagatggacttctctgagatccctgtactgatcggttcttttgctatgggaccgctggctggcgtactggtagagctgatcaagatcctggtacaccttgttacaaggggaaccatgactgcaggagtaggggatgtagccaacttcctgatgggatgtgcttatgtgattccggcaggtcttctgtacagatatcatcacgtaaagacaagaaagcatgcagtggcaggtatggctgcaggtacagtgctgacaacgatcctggcatgctttgccaatgcatttgtactgcttccggcttacggtaaggcatttggtatgccggtacaggctttcgtggagatgggaactgctgtacatagctctgtaaacagccttctgggctttgtagcgctgatcattgttccctttaacttagtgaaatatacaattgtatcagtgatcgtattctttgtttataagaggatccgtgtagtccttcgaggtgactgatacagggaaaagaggtcattatgggcaagatcaaccaggtcaggaagctgacagataatgcatatctgaatctttacaatgtaaaggcaaccagtatccataatacacctgtggattattttgtggcatccagggcaaagtctgaaaaggaaatgaagctttccacaggtgagaatcctccggatggagtgatcatttacagcctttatggggagaaaaaggacaaggttgtactgatccgtcagtatcggtatcccatcggtacctatgcttatgaatttccggccgggctggtggaaaagggcgaagactaccatgacagcgcagttcgtgagctttatgaagagacaggtctgacccttacgcctttgaaagtagatgaggcatatcagaagccttattttacttctgtagggatgtcagatgaatcctgtgctgcagtatacggatatgccagcggcacagtgagcacagatgcccaggaggcttctgaggagatccaggtggtgcttgcggaccgggaagaagtaaaaagaatcctccgggaagaaagggtatccatcatgtgtgcgtatatgctgatgcattttttgaaggatgagaagccctttgacttcctggaggttttaaaataaagccgaggcattcttgaatttaaagtcattcacttacttttgtgcaggcacaggagggtgaatgacttttctgtattgtgatcattaatattctgcatagtcgtcgatcacattatcgccggaagcagcaggatctgcagatgcgtcgccagatgtatcgccggaggtatccggagtgctgatatcaccggaggtatctacgccgccggaaggatcagcagcagggggtgtatcctcagaggtatcatctcctgttacagtatcgtcgatcacttcatcagaagcaccatccggattggaggtatccggttcatcggatggtgtgtcaggggtataggtattatctgcggaagtatcctcacctgagggattgtcctgataattgctttcctggttatagatcgggaaatccgatccggaagatgtgctgccagtggcagcttcagcctcggcagctgttgccggggcttcttttaatgtagtggtggcagtggggatccggatgctctggggaactaccacgtagatcagaagcataacaccgcagaacagtgctgcactaactgctatctttatctcatctgtatgtcgtctcatggaaacactccttttttacaggcttcagaaggaaatccatatctgaaaggttttcttatgccggaatcttaaaatatgcttccggcggtgtctgttttatttctggattatatcataaacaaaacgaaatttgtagtgtgcagatgcataaaaacacctttgaatacatttttgaaaatactttcttgtattataagtataagtgtttttctgcattacaaatgctttcctacattaaaatataaaaattttcctgcaatgcagtaaaaaagtgcttttcatacgtacagaatcgtgctaaaatgaaaaataaattttatctcagtcgagaagactcccacctctttcatgtggtgagtaacagcaagttcgtctcagtgggagtccaatctccgactgagataaacgctccgcgaggatgcgcagtgattctgtaaagaatatgtcagcttacgctgaccagaatcatgcgccaagtctcgcggctgctcgacttgaagatttggtgtcaaaacaccaaaataaggaaaagaaagaggagttattatgacacaggcaaccatttgtattttgatcacgatttttctgtatctactggggatgctggccattggattttactgtgccaagaagacatcttccacatccgatttcttccttggaggaagaaagcttggaccttttgtaacagccatgagtgcagaagcctcagatatgtccagttatctggtaatgggacttcctggactggcatatctgtctggtgtggctgatgtaggatggacgattatcggtctggcagcgggtacctatctggcatggctgctggtagcaagaaggatccgcagatattcccagatcaccggctccattacacttcctcagtttttctcaaacagattccatgataagagaagtattctggcagctattgcagcagtggtgatcattgtcttttttgtaccatatacagcagcaggctttgccggctgtggcaaacttttctcatctttgttcggcatggattatatgaccgcaatggtgatctcagctcttgtgattgtaggatatacagctaccggcggttttctggcagcatccatcacagacctgattcagagtatcattatgacagtggctattatgacagttcttatttttgccactgtacaggcaggcggtattggcgcagtgcttgacaatgccaagtcccttccagggtatctttcctttggaagcacatatcttgaagagactggaaccagtgaaccatatacgcttttacatattattaccactgtttcctggggactgggatatttcggaatgcctcatttcctgcttcgcttcatggccattgaggatgagaaaaagttgaagctttccagaagggttgcttccgtatgggtttccatttccatggcactggttgttgtgatcggtattgcaggccgtgcattaagcagcaaaggtattcttgatacacttcacggagcagatacagagaccatcattgtcaggatttctgatctgttatccggctatgggattatcccggctctgcttgccggactgatcctttccggtattctggcaagtaccatgtccacagcagattcccagcttctggcagcatcctccagtgtttcccagaacctgcttcaggaagcttttcatctgaagctgtctcagaaagcaagtatgatcgctgcaaggacaaccgttattgtaatcgcagttcttggtctgtttcttgcaaagaatccggacagctctgtattcggtattgtatcctttgcctgggcaggctttggtgcagcttttggcccggtagtgatgtgtgccctgttctggaagcgtgcaaccttccctggagcagtagcaggtatgatttccgggggagttatggtttttgtatggaagtacctgatccggccaatgggtggcgtttggggaatttatgaactgcttcccgcatttctggttggaacattgatgatcgtggtagtcagtcttcttacaaagaaaccatctgctgagattgaagcagagtttgagcttgcaaagaaaaagactgacctgtaagaaagtgaaaacatgcagtaacagattttaaagagtttgaagtggtaaaaaaagggtatcgcttaatcatctgatgggatgatttggcgataccttttctatttcaggaaaaatgtacggataccttttgaaatcccacggatcattttctgctggtaagcagctgtctgcatcagacggtcttccgcaggatttgacatatatccaagctcgatcagggtagtgggcaccttgctccagttatttccgatcatggtgtctgtttcccataccttttctttaaaacagcctgtactctttacataggcattaagaacagcctctgaaagagtatagctgctttttatttgctttgaggtgagataaggattggcagctgtcacgcacactgtacgtgcacctgttgcctgatgggaggtgaagctgtttgcgtggatccggatataggcatctgcttttttgccattggcaatggcagcccgctgcctgcagcttttggctgtctgatggtcagttctggtaagggagaccttgcagccctgtttctttagaagaatggacagctttttggctaccgtcagggtcagctggtactcaggtacaccagtggctatgccctgggtgccaggattatccctggctttttgttccagggagcctggacctaaaggctcggttccctgtgcagtcacaccggaatgccctggatccagcacgactacaggagtccagatcccgtgggcatcgatcttacgtccctggacagtcacatttgtacgcatttttccggtttgccgtccgaaataacgataatgtccacggatgtattgccagcctgtaagcatccttccgctggaatcaaaggcatagtaagaattcctgatccggcgaagacctttttgctttttgccgttttgataataatattttcctgtgcggtttgctttccagcctgtaaaaccggctgcctggacctgcatgaccccgggaagtacggaagtattgcctgggacatcagggtttaggaaaagagccagcacaagcagcaggataaacagcgtggaatattttcttactgttttcataaggaaaaacgcacatttcggaagtggctgtgcagtgtgccatctgtgccttgtggatcttgttccggatcaaaatagtatgcaggattttgaaatatatcgttaatggcaatgatggcagcaccataaaccatagagtcctgcttataagagcttaatcggatggaagtggtttccattgtctggggaaccactcttttctgtacattagagatcacccgttccagcatcagggtgggattcacatgagccatctcatctccgatcacgacggctcttgggttaaagctgttaatcacattaataatgccgatagacaggtaatcacacatttccatataaagctttactgcggtgggatctttttttcttaccagcagaacagcatctgagaaagtaagctcatcttttttgccaaaggcttcattcagcttttttacaaaggtaatggaagagcaatagccttccagacagccgtaattcccacaggagcatctggggccgtggatatcaatggtggtatgtccgatctcgccggcagcaccggtagaccctgtcaggagggcaccgttgttcacgattccggcaccaataccctgggcaaaagcaacatataccagcacatcagtattattcgtctctttgctgtaccagaactgagccagagcagctgcattggcatgctcttcaatgatcaccgggatcttgtaatgctccataaattcgtccttcagcggaatgtctgcccatccttccacttcagtaacaacagaaatcctgcctttcacacggttgtaagggccggggatggcaagtcctagtgcaaggatctttttatccggaaattgcctgatcattttgtccattgcatggaacaccatgtccatgatctccctggcattttgtccgtgcttaatactggttctgcggatcataacggcttctccgtacagattgaaaagtcctacagagaaattctgtctggcgatccggatcccggctaccgcaagatcctctgtgttcagggagatagcaatggagcggcgccccttcacgccggtgagcaatcctacttcctttacaagattccaattcataaagtcattgataatatgtgtaactgtcgcctgctttagaccagaatgttctgccaatgtggttctggcacatactttttcacgtcgcagaagattcagcaaaaggctgcggttcagattctggatattcccctggttcaggcctcgcatggtttctttcatcagtcatacctctcagaacattttataggatgaacactgtgatctggattttggtgttctcacactcaaatcataatgggtgaatacaatgttcagatgaataacaaccttaaataaaattattagttcaatttattgcttaattcaattgtattatatagcaaaaaaaagatagatgcaagacaaaaacagatgcaagacaaaaacagatgcaagacaaaaacagtcagaatatcaccagacagacataaaaaacagccaggcagacataaaaaaagcc

SEQ ID NO: 145 - DNA, 2406 bp, Unknown
  gut microbiota DNA sequence
attaaccattgcatttgccgcatcagaagactggatatctacgtctgtccaatcaagattggaaagtgtgaagtttgccttcagattgtaagtaacagtcttgccgctggcaagagtgatatttacttctttctgttttgcagtaatagcaggtttagctgccgcttctcttgttacatggaatgcaacggttacggactggcttccgcccttggttgtaaccgtagccttaacggtatactcaccagcttcctttaccttcactgtaccatcggtagaattaatctctgcatttgttgcatcagaagactgaatatctacatctgtccactctgcatctgtaagattcagaatagatttaagattgtatactctctctgtctctgttgcaccaagctcaatatctacatctgtctggttggctgtgatagtcggtgctgcaacgcccttcttcgtaatatggaagttaatggtaacgctgcttgattcaatataagcccgtacggtgtattcgccggccttcttgaatgtagctgttccgttcagttcaaccttcgcatttgtctcatcagaagactcatattttacatttggaaatagtccattctcaacggaaaggatagacttcagattgtagcttacttcagcatcatctgcagaatccagttccagagaaacatctgtctggttggctttgataatcggtgccgggacacccttctttgtaatatggaagttgatagtaacgctgcttgatccaatataagcccgtactttgtactcgcctgctttcttgaatgtagcagttccatcaggtgtaacatcagcatttgacgcatcagaagactcatattttacatttatgatatctccattctcaacggaaagaatagacttcaaattgtatttcgctattgcaccatctattgaatccaattccagagaaacatctgtctggttggctgtaacaaccggtgcgtccacatccttaacagtgattaccagattaatagttctggcatagctctttcctgtttctgcgtcattataggtggcgcttactttaactgtagctgtgccagccttcagacatttgtatgtgccatcagtctctactttaacgacactgctgtcagatgatgtataactaacgactgcctgtactgcctgattgccaaggaatgcagtacctgcagcgctgccgctttctcctacagtgtgtgttctctgcagctcattgatctcatatgtaaaatcatctgctgcggaagtcttctttgttacctcaaaaacaacctggatgtccttcgttgctgcagtgccatcactgtttttccctgttgcggtaacagtaacaacatacttgccggctttcttaaaggtgagcaccccagcagtatccacaactgctgcgtctgttgcagctgtggttcctgtagctgcatcatttagcgtataagttatattgttagcattctctactgtcacattattcttaatgtcataaacagcaattgcatctgcctttgcgtccagttctatggataccgtcggctgcttcactgtcacggtcagctgcggttctgcatcctttgtaacagtaatgttcagtgtcttaactgtctgataagtctttgttgaatagctgggatccttgtactccacagtcactgttatagcagctttcccctctgccttgcactcgtagaatcctgtagacggatctactgcgaccactgccgggttggatgaagcataggaaatcgctgtgggaacaactacactgctgttcagcatagctgtaccggaaacacttcctgtatctccaaccttcagtgttttctctgtctcgctgagtgtgtagttgaaattcggatccgcactctgcacatctactgatgcttcctcggaaacaacatccgctgtcacctcactgccggatgtaaagtctgctgtctcaacagcatcatccactgcatccgcatcaagtggtgtgatatccgcttcgcttgtctttccgtctgaaaactcttctgcttctgctccataaacagtaagcacatccataggaagagaacctggaaccattgctgtagacaaaaggcaggccaacgcccgagcaggtattttcttcttatttgccatatcgttcctccttttataaaaataaccattttgaccctgatgttatctaatgaatgtgtgaatacatctgggcctatgatcttcaacctaagtaaatcttcacaaaccttccataactgtgcccgaatcacagggcctgattcaatactttgtccaaagatcataattggtctttgtatattataccatataattccaatcttttggcaagtcattcacgtagaaaaacatgttcctaaaatgaaactttaaattccaccg

SEQ ID NO: 146 - DNA, 15030 bp, Unknown
  gut microbiota DNA sequence
ttaggcttttacccacaacatcatatcaactgtaatgcctgccacaaaaaaggtacgaaaaagctgccagaaccgtagtcctggcagccatagatcggtatcatcataaaaattgaacaaaaacagaagctcccaccactgtaagaagtcctgccactgcaatggccagactgctcatggcgccttccacttctcccagctccatcgcctttgcagtaccaatggcatgagcagaagtaccaagagccagccctttggcgataggctcattgatcctggcaatccggcacacagcttctgcgatcatgttgcccagaacaccagtgataatgatcactgctactgtaatggttacaatgccccccagttcctcagatacacccattccaatcgctgttgtaatggactttggaagaagcgtaacatactcctcatgagaaagcccgaataaccatgccaaagcaagtacacttacaaggcttgccagtacacctgaaacaatcccaagaaccacagccttgatattcttcttcagaagattcatctgacggtataacggcactgccagacacaccgttgccggggtcagaagataactgatatatttgcctccctcattgtaggtatcataatcaataccaagcagggaaagcacacccatcacacacagaatcgcgatcagcagaggattaaatatggcaagtttgaattttctcttcagaagcatgcctgcttcatatgccacaaggcttaacactgcacctaaaaacacggagttctctataaaattcgtcatttgctgtcatgtccctttctgtctttttcaattacagtctgtgttactcttccggttactaccatcacgatcactgtagtgatcactgtgatcataacaaccggcacccagattggctgcaacaccccccaggcattcaataatcctacacctgccggtacaaacatcaccggcatgatctcaataagaaaatccgccgtttcctctacctgccctacttttataataccagtcatcagcgcagccagcatcagtaccagtccatatacactggcaggtacaggcaagggaagcaaggcatgaagcccctccccaagagctgataacagtaagataattccaaattgtcttaaaaacttcattctgtgcacactttctttcgtatataatataattttgtaatattcagaaattcacaacagcttattctgttacaacctttgttgatgccataagatcatccacgatctgctgatatggctgggcttcctccagagttgcccgtcccatcctctgcatttttgtaactcctggatactgagcgggtatagatctggtcatcaccgaatctccataaatctttaccatatctccattttccagtacatctccctggatcagctttccattacggttatagatcccctcagatggaatatctgccttgaatacagtctttgtagtcatgtccacaaatacctgctccttcagtccatctcctgcctctacacagatcgcccggattgcctcctgctcctgtctggcctcatcttccttatctttggcggcctgcatagataccaccttccagaaagatccgcacataactgccatcacagccaccaggatcaccattccaacaataaatttcacatcggctttctttttattcacatcagatttctttttatccacattggcttcctttttatccacatcaaccctccttatatctgccacaactttctgcgtttttttattatactccgtcccttttaaattgcaactgtaggaatcacgattttttccacctgatagcttccattttctacaatcattacagccatggtcacatctcctccaaaacgggaatggccacagcttcccggattcagccacatccggccatcaattatttcctggaagtatttatggctgtgtccaaaaataactacctgtcggtctttcagatcccaggccacatcttttttattgtgcaccataaaaaagcggacaccttcaatctcaaaccacaggctttgggcaagcggacgctgccagcttctgtcattatttccccgaacagcatacaaagctcccattacccgcagttgatccaaaattccaggatctgtcacatcccctgcatgcagaatatacctgcagtctttcagattctccacaacttcctgccgcaacaggccatgagtatctgagataataccaatttttaccgccatttccccttatttcctcctggttttaagacataactttacagttacgtattccttatttctgctcagtttccgaattctatagtcccatacgctccatcatacccaggatgacagatcacatttccccttcggatacatccaatactttcactaagcaattcgccgcctgtttttttaaggtcttccagcggaacctgccgtaaaatgtcaaattctgatcccagacttttcaacagttcctggtattttgcctgaacccttttacttgttggtgaaaatcccataacctgactgatcacttccggcaaaggcaccagcttctcaaagtgtctggcattctttggtacaaagccttttttcctatccgccagttcctgtatcctgtgttctacgccaatcgtcagctttttcccacaaaccggacaaagcccatggtattgctcagtttcctcagggcttaagcagatcccacattttcggtgtccatcgtaatggtactttccttcttcaggaaaaaattccaacgttccgtcaagcccctgccccttctggattgcctgatacagcccctcataggatctgtctatatccagaagatttgcctcccgtcccagctttcccggagaatgagcatccgaattggaaatcagctgataagcatccagcgaagataactgccaattcatagccggatctgaagataaccccgtttccacagcatgcacataaggtgtcagatcgccaaaacattcttccatactttgaaatctggtaaatgcaccaaatactgaataatgcggtgtccatatatgtgcaggtaccagcattccctccggacaggtatccagcataagctcaagaagatcatggctgtcaaggcccaggataggtcttccgtctgaatggatatttccgatcttttcaagtctgcttgacagctgatctgctgcttccagccctggaagtataattatattatgaactcttcttgacttcccgtactttttataaacagaactgatctccccggtgatcacaaacctgggcgcttctcctggatactttttggcctccaaagccacatactcctctttcaaacggtacaacccatcctctgcaggaatcagtttttccaaaagttcccctctccatgcaggatgggtaaaatctcctgttccaataagactgatccccttttttcttgcccaaagatccagattttccggatttccgtctttactggttgccatagaatatctggaatggatatgcagatctgtgatcatcttcatcttgctttctcctcttcaaaaaaccgccgcaggcacatacctgcgacggttcttcatcatttctgatacatctgtgaatgccctggcagatcacttctgccttgtgcatctattattttgcttttactacttttgctgcggaataagctgcatatacatctacaccagcctcgtttgccttatacgcacgtactttgtagtagtatttctttccagcctttacagtcttgtctgtaagcttcacagtagagccttttgtgatagtagccagcttagtatatccgctacccttctttgtggaacgatatacttcatatccagctgctcctgcaactttcttccatttcagggtaactttgccctttcttgctttgccggaagtgatctttgtctttgcaactgttacatttgttacagttgctgctgcagctgcactgttgccgcttttgatagtattaccgctgtctttaaccttataagcagtaccattcttaacagcaactacataatagtagtacttaacgcctgccttcggtccttcataccatgtctgctcaatgccgttgccattcacatatgatacttttctgtcagtggtggtggtagctgtcagatcctcatcagaaaccttataaccatatttggaattagcatcaacaacccaattgtccagcctattggcatatccatatgaatatgaatatgtcttggtatccttgttatatgtggatgcagctcttgtagttctgtatacttcatagtaatcagcgcctgctaccggattccatttaacagtaatgcttccgtctgctttatttacagtcgcctttacgcctgtaggtgctgccagatatggatctacctcaaagctgtagtcctcagtgtaggtcttcgggttaccgttcttatatgcacggatcctgtaagtatctgtctgtccatttgctgccgggaaggtaaaagaagaagttgctgcccttgtaatagtcttatatgcttcccatacgcctgtatcctgatttttcttctcaatcagatagccattaccagcataaaccggattccaggtaagttttaatgtaccatttgcattctgcttgctggaaacaatccataatgcaaaatctaatgtacagctatcttcgctctcaatataatatttctttccatttacaactttgtatgcacgtactttaaatctgtaatcctgtcctgcagcaagacgtttcacagtgtaggtctttgcggatgctttcttgatgtcttttacaagtgtccacttttcataggtattggttcttccctgatctgcgctgtagctctttccataggaatctgttacagtacggaatacttcgtatccctgtgcgcctttcagcttattccaggtaagctttacagatgtcttaccttttgcaactgctctcacattcagattgccgccccaggtaagagttgtataagtcttccatgcgccataggaaaccttgcctgtcttctcgcttacatagtaagcacgtacacggtaagtataagcagtattaggtttcagcttcttatctgtgtaaataccatttgtagtctttccaagattctggtatttcttgccaaccttcttctggaactgatatcctgttgcgtaagaaggatcctctgcagttgcagtaagagcaacacttgtagaagcaacctctgcagttacgtttacatcagaaacctttggagatacggttacagtattggagaatgctccataccaggtttcatctgccttattggaatcttcaaggctgctgtcttcactgtatggtctgatacgtacatagtaagtatagcctggctcaaaataactgttatagagagtaaactgttcctcgccatcggaatttgttctcagcttggtcagtgaaggattgtttataaatccaggatccttggagatccacaactggataccgctgtttggaagcttaatatttccagtatatttgaaaacatatccgtcttctgtcttttcagcaagaaccagattggatgcggtaggctcttttgctttgacaatcgtaacgatattggacggtgtaccatactctataccctttgtgccatacttataagtaatagctcttacataatatgttgcacctgtttccatagaatattttgatacataagtgccctcatcgctgctctgtacatctgttacaaagttcggatccttggaccactgaagttcccatttatcatctttttcaagcaccggatcaaaacggaaactgtaggaagatcgttcttcattgtacatggtcaggcctgtaattgttttaagaggatctgcctgttttgcagtataggtaaatgcaactacattagaccaaacgtccttgccctgtgcatctgtgagggaattaccatttacacggttgatcacacggagataataggtctttccgctttcaagatcactcttggaaatagccaatgtagtcttggatgcatctgcatatgcatcctcccattcccattcatacagatttgcataatctggatcggatgtgtactgtccatgaacagatcctgctgtaacagcaccatcatatgcaaaatacagattatcatcatcctcagatgcatatcttaaattggtaagctgtacaggagcatatgttgcaggaactgcgtaagctaccggatcagaccactcaccaacagtctctacagcctctgcatttggagttgcaggatcctgataacggttcactgcacgtacacggatattataagtctgtccagctgaaagagatttaagaagtaccttcttctctgcatctgcatatatactctcgtaatcagagccatctgctgcaatcttatatgcatactgtcctgccagatcagtcacgtcatatgatggcattgcactggcccaacccatagaagcatatctaaacacatatttgccagtcttgctgtccgtggaaacatatccatactcattcccggctgcatctgttacagcaaattcatatttgtatgcaccctctactgtattccagcgaagcaccggcgaagacacataatccttatctgtgtcaatataaagaccagttaccttagcaggtgtgccaggagtaccaacctgtacatctgcagtatctacggttgcctcctcggatacatgatcagaaaaaacatcctctgtttcttccgcatcgctgctgaactctgttgcttcttctgctgccggctcttcctctacatccaccggtgcctctgtctcttctggctcaactgcttctactgccacatcgctgtctgtaaaatcagcagcaaaaagtgtgctaggaacagatgtcatagtcattgctgctgcaatggcaattgccagtgatctgttaagagttttaagatctttcttcattgctttccctcctagaaaagaattctgcataggcatcctcttgcatccaaatctgcggacatacaattattatatgatccacatttctttcatatgtctacaaaatgatcctcctgcatttagtgtaagaataccattttatcccatctatttcaagtattttcatgcatttcaacctatttacacaaagattcactgtgtacatttgtaaattttgggtaaatatctaacatttcttttaatacagtgaataacccaaaaccttcttaatctatgaaggcccggcggatccgttccagtgcctctgtcagagtcgccttgggacaggctacattcactctctgaaatccacgccccagatcgccgaagatcttcccgctgtccagccacagcccggctttgtagatgatccgatactccaattcctccacagatagtcctgtttccctgaagtccagccataccagataggttccttcatggtctgtcatcttcacgcctggcagcttttcttccacatattttctggtaaattcaatattttctttcacatatgcatgcatggcttcataccactgactgccctttgtgtatgcagtttcacaggccaccagcccaaggatacccagctggctcacgccagctgcgtccatctgcttccggaacctgcggcgcagatctgaattgggaataaaaatattggaaataagcatacttgccagattaaaggttttgcttggcgctgtacaagtaaccgtaatatcctcatattcctttttcagccctgcaaaaacctgatgttttcccttgaacacaaagtcctgatggatctcatcactgactaccgtcactccatatttcacacaaagatctcccacacggatcagttcgtcttttgtccataccctgcctaccgggttatggggattacacaaaaagaaaagctttatcctttcatctgcgatctttttctcaaaatcctgaaaatccatatgatagcggttgtcttctccaaggtacagatcattgctgactacctttctgttattatcagtgatcacttcagaaaacggataataaaccggagactggatcagtacactgtctcctggctctgtataggcctttacagccatggcaagtgcaaacaccacgcctggcgtctttaccagccactcttccctggtatcccatccatgatgctccaggatccagttatgcactgcttcaaaataaggtgtcttcacttcactatatccaaagatcccttcttttgcacgttctacaagtgcatcctctatataggaagatgtttcaaaatccatatctgccacccacagtggcagcacatctgctggcataccccttttttctgcaaagtcatatttcagacaattggtgttttttctgttaatgatcctgtcaaaatcaagatttctctctggcatatagttctccttctgtctctttgaacactttttccagttcagcgatcaggtctttgatattttcaataccaacagataaacgcagggttgcttcggtgatcccgttcttttccctgatctcttttggaacatctgcatgggtctgtgtagttggataagtgatcaatgtttccactcctccaagactttctgcaaatttaatcatacggacattttccagaattgcaagagcaaattctttactttccagttggaaagtaagcattgcgccaaagcctctggcctgctttttcatgatctcatatccagggtgctcaggaagtcccggatagatcactttggtcactgctttctgttttttcagccactgtgcaatggcaatggcattttcctgggcacgatccatacgcacacccaaggtcttgatcccccgaaggagcagccagctgtccagcggagccagcccggcgccggttgttttgatcagaaaacggaatttctcacagatgtcttccctgtttgttatcagaaatccggcaagtgtatcgttatgtccgcccagatatttggtgccgctgtgtaccacgatgtctgccccaagatccagcggattctgaaaataaggggataaaaaggtattatctacaataagcagcaaatcatgctttctggcaatctttgaaagcgcctgaatatctgtcacattcatcatgggattggtaggtgtttcaatatatatggcttttgtgttttcctgaatataatcttccacattcaccttatgacagtccacccttgaaaaagaaattccgttcttggaagatacatggtcaaaaagccggatgcttcccccatacagatctgcatctgcgatcaggtgatcccctggcttaaaaatctccatcaacagggagattgctgccattcctgaagaaaaggccagtgcatcaatgccattctccagggatgccaccaccttttccagatgctctcttgttggattctgtaatctgctgtaatcaaaacctgtacttctgcccactccttcatgtgcataggttgctgtctggtaaatcggatagctgatggatccataattgttacaacaaccttcctcttcttctaagtgaagacactttgtttctatttctctcgccattttaatccctcttattcctatcaattttatattatttataagctgatataatgatagcaaaggaaaaatggtttgtataattcattttacctgttattacttatagttttttccttatccctgttggtattgtaaagctttcatcacctaaaaacacctggcagaaaaccgaagttctctgccaggtgcctctgctgagcctactttacagttaccttcacactcttgcgaagtccattctgggcataacagtaaatcgtacacttgccttttccctgggcagtgatcactcccttactgttcactgttgccactttcttattactgctcatataacgcagtacagccacatgttttacgacttttccatctgaattcactacactggccttaacggatgccttcctgccctttttcagggtaatgctttctttcttaacattaacagccgttactttgctgaacttgccgccggttgttggaatatgcatagccggtgttttggaaagaatggtctgtttgccatttaccgtcttgtatgcagtcacataatacttgtaataagtatttgccttaaggcctttgtgagtccatttagtggtgcttccttttactgttttcagaagtttgtaatctttgccgcatttgcttccataaatcttatatccggaagcgcccttgatcttattccattttatagttatagatgtcttcttacttgtaagactggaaagatgaaccggggtctgtaccggtacaggagtaggtgttggaggtgccactgcaggcgtaggtgttggagccggaagtgctgcgatcacctctgtttccttatatccgcaaaccgtacatgtgcgttccttttctcccgtaactgatacagcagcttcctttacaaccttccattcaccgaaggtatggcctttggactctgtcgtctcaccatccagattgcagatctgccaatgtgccttatcatcaaatttccatgtatattcgtggtcctttttggaaatagtgagcactgcatccttcgttgcagtataagtgccgctcttgactgtaaccactactttgtactcgcctggctctgatactttacactctgcctctgtcagcccatcaagtaaggtaccatccttgtaccactgataagttaatgttgctgtgcttatttcatgagatgcccgggcagtaagtgttacaggcaaggtaaagcagctgttctccctgtctgctgttaatgttacagatggagcattcaacgcccaattttcgtacagcctgatcctttcggtgatctccatatccggcgtccagtcatgatcgtcatcatctacccatcctttgaacgtatatcctggaagctctgtctgaaccggaatttctgacggatccactttatttcctggtacgatatataggtttttatttcttcgataatacctgtcaccctgtttttccatccagtagaaagtaacctttactctttctacccatgtcaaggtctgcccgtccagctttaattcggagctaaatcctttgtcaacggtaaaaagtgatgcatccgctgttaatccatccttccatttcactgccaccacaccaggctcacaatatgcacccttcatctctacaggattaactggtgtaaaggtatcatcaaccactaccttggggctgcacgctggatcagaataatccatcagcatcacatatcctttgatctccggtgaaccgctaagatgcagggttgggaatttcacattcttatcaaagtcagaatagcagaccagatccagggtaatggcattttcatccacgttttcgccttcccctgacatattgccgctgatcttaccgccactgatctccagatccatattcgggtgaacgctgctagtataataatcatccggataccacagactggcgcagataccagctcccatacgggctgccccatttcctgtgatctcgccgccggtcatcttcaatgcatccatcacttctgtactctgcgtaaaaatgccaccgcctgtaaacgtctggttattgcagatccgtgcggcagtcagctcaatgctgccattaaaggcatgaacaccgccgcccatgccgccagtagaactcatcacttctccatcttcatcatattctatttgtggttcagccttatttccctgtatggtacccttacccagcagggctcttccatagcctaaataaacgcctcctccctggccataaacataagaataatcaaaagcattattaagagtatctgcagttgcagtattcttctcgatcacgcagggctggccatccggttctgtccgatccatcttaaggtctgaataccatagataaacaccaccgccgtcaccggcttgattatccgcaatacggccgccggaaagcgtcacggtcgcgtcgttttccgcaaagatacctccgccatatcttgctttgttaccggaaatccgtccaccgctcatgaaaaaacgagccttatttaaaaaaatgccgccaccgaaatgtgcagtattcccggtaatcaatccgccactcatctctgctgtcccataccgtacagtaaccaatgcggtctggcctttatagtccgtcctgtcagttccctggatcaagccaccgtttatcctcaaagtagcatacgtatcagattcttcatctgtgtaaattgcatgctcgaccttcgcgtcacataccagcgcagtacctgttcctatggtcagtacaccttcacctgtttttttcagcagagtcttgccaagccaggaacccccggattctttgatattcctgatattcacttcatcaagtgccagtccggtaccttttaagatctgtatcattggtttagaagcatcatctgccaaagtatctgccggacgaatcattactttcgaccaacgatgatcctttttgtcattcagagtaagactgcttatcaaataaatcgttccgttctccttaatcagggataaagcctgatcgatcgtcttaacagcctgatcactggcttctccgctgttggtatctgaaccaccggcaggatccagatataccttgctcagacttccatattgaatatccgttgtcgcttctccggaagagaattcttctataacagttccatcgccaaacagaacatctgtctcttcattctcctcctggatctgctgaaacagctgttcttcatcctcgccaacctcctgaaagatgtcttctgtctcaggctccgccggcacatctgtgacggtctcttcatccgcagccacttcatagacttcttctgcagccgcagaaaaaccacccatggtcgttatcacagctgtacaaaccgccaaagcaatcattttttgaagtcgttttctcttcataccttcacctctttctttttcttcctattccttttcagtttcctttttccggttttcagttgccaggttccctggttccctggttccctggttccctggttccctggttccctggttccctggttcctggtttcagatgcatcagtatatatatttccatcctccgagaaatattactgctactctctgcatgtatatttattatatctaaatctcatccgattttcaatcattttatgtactttatcgctctgtttctgtatttatatttattataaaatcatttttatatacaataagcactttaattgtataatacttgattttcatgtattgtttatatagttaaaactatacttaatattcatttcatttgtacaatatttctgcaatacctcaaaatctgtgaaccattgacaacgcctcagcttctttgcataatatgattacagtggcaagtgcaaagtacggaacaatccatataagcatgattttttatattaccagagcatttgtccccaaaccattcaaaatagcattggcggcaatcgcagatagtattgatgaaaatcgcaaatcatattaacggaaatcgcaaatcatattaacggaaatcgcaaatcgtattggaggaaatctcagatgaatattactgtctatcttggtgcaaataaaggaaataacccacggctgcaaagcgcagtccaggaattaggacaatggatcggtaccagcggaaatgcgctggtctacggcggttccaaatccgggttgatgggtgcaattgccgacagtgtgttgaatgcaggcggtgaagtaacaggtgttgaaccacagttctttattgacagtgagatccagcacgatggattgaccaaactgatcgtgactaaagatatgacagagcgtaagactaaaatgatccagctgggagacgcctttattgcgttccccggaggaacaggaacactggaagaaatctccgaagtcatgtcaaaggtatctttaaaacatctgaacgccccatgcattctctataatctggacggttattataatggtttaaaaatgcttctggaccatatgattgaaaatgggctttcttccagagaacggcaggaagggatttattttgctgaaagccttgaggacattaagcggattttagaatcagaccgtgaaaaagagaacacagaaaccatttatcagtcctgaaaagctgatttttcaagctatataactaccggatgttatggcattgatcaatgatgtatctgcaactgctttaaaatggtgctagaattacgattacgttatatgggattttttcaagtatggaaatagcgttgaaaatatagacaatgaatgatataatttttatatataataataggaggtgcgtattatgtttgctatacaggaagctatcagaccatcagcagatttaaggaatcattataatgaaatttcaaagcagtgccgtgagggaaaagaagcagttatcattactgtaaatggaagaggcgatacagtgtccttgtcttatgaagaatacaagaatatgaaatcaagaatagaattacttgaaatccttgctgaagcagaagatgacgtaaagaatggtcgtgttgagccaatcagcgaaacttttaatgatttacgtgctatgctgcaggagggctaagcttgaaatacaatattgttcgtactgatactgcagatgctggtctgcgaaagattatattatatattgcacagaatttcggcaatgatgtggcattgaaaaagctagacgaaatagaagatcgaatacaacaactaggggataatccagatcttggaattaatccgagatacctggtattaaaacgtcagggttataaggttttggttcttgaaaaagaccttgtattttataaagttaatgaagcccgaaaagaagtcactatatacgctgtcgtagatcagaggcaggattatttgaacattattcgaggtttgtaaggcaaacatcgaaatataactgactaagcaatttaattaaggcttg

SEQ ID NO: 147 - DNA, 7089 bp, Unknown
  gut microbiota DNA sequence
gtaaaaacaacaaaatttaaagtgctgtggaatttacttttgcactggaatttactttttcaagtcacaagaaaaacatgtttttcgcgtatttttatggcccgtatgagaattatttttcattaatcacaactattatctaccaggacgctcagtacgtaagtttgactgacctgctgattttatatataatgattccagtatcaaaaggtctgatcccacctgtgcttgcacaagggagggaaactgaccttgggacacgccctgatatgagcataaaagagggatgtgttgatttctataaggaggtccatatatatgccagcttcatttaaagatattctgaaccagtacatagatgcgctgggctgtacagccagccagctttcccgttattccggcatctccggtgctaccatcagccgttaccgttccggtgagcgcatcccttccccggattcacagcattttgaacttctatgtcaggcaatttctcagcttgctgttgaaaatggtcagagtgaccttacatttcaaaaaattgcagatacattttccactgctgcagatatgaatcctcagttggagaaccgattttcccgtaattttcacgcccttttgtcaagtctttctatcagcgtaactgatctggcccgtgcgttgaattatgattcatcttatatttccagaatcagaaatggccagcggacgccttccgatccccggcttttcgctgaaggaaccgcccattttgtggtaaaacgatatccggaagcctcccaccgtactatggttgcccgccttaccggctgcgatcctcaggagcttatggatgatactgcatattttgaagctctttcccagtggctgatacagggtgaaaataaagagaaagacgatctttcagattttctccgaaagctggatgaatttgacctgaacgagtacatccgtgtgattcattttgataaaatgaaagtaccctctgtacctttccagtttcccatttcaaaatcctattacggtctgtctgaaatgatggacagcgaactggcttttctgaaaaccacagttctttccaaatccatggaagctgtgaccatgtacagcgacatgcctatggaagaaatggcaaaagatccggatttcccgaaaaaatggatgtttggcatggccatgatgttaaaaaaaggactgcatctgaatcagatccactgtctgaaccgatcctttacagatatgatgctgggacttgaaagctggatccccatgtatatgaccggccagatctccccctactatctgaaaactcctgccaaccttaccttttcccatttattgaaggtatccggcagtgcggctctttccggcgaagccattacaggttttcacgaaaatggcaggtattatcttaccaataataaagaagaagttgcttattataaaaaaagagcagagcacctgttatccaaggctctgccccttatggaaatctatggtaaggattcccgttctctttatcatgcgtttttacattcggatattgcttctggcggcagccggtatgggatcctgtcctcactgcctctttacacagcagatgaagccctgctttgccagatcatggatcacaatcaggttacccctgaagaacggacgcaaatcctgtcccatgccagagaacagctggaaatggcactgcagatcctttccagagataccatcacagaagagatgccccttcttacagaagaagaattccacagatctcccatgcggctttctctgtcaggtattttctgcgaaaaagatattttctacagctgggatgactaccagaagcatctgctgctcttagaaggattccaggaatgccatcccaattatacctgccgcctgaccacagaaactgctttttccaatatccagatccagatccacaaaggcagctgggtcatggtttccaaaaacaaagctcctgccatgcactttttgatccgtcatcctaaaatgctgcatgcatttgaaaatatggtcattccgatcagcgatacagcacaaatgcctcataaggcttcagctgcacctgctgctgatcatactgacccggaagattggaaataaggcatttgccatttacaaattcttccggcagctgaatgctttgttctttgcctgaaaaattgcatacaaccagaagcttctccttctccagttccctggtatatacgaaaagatccggatcatcagggagaagcagctggtattttccatatacgatcaccggatactctttccggagctggatcagttttttgtaataatagaacacagactggggatcctgaagctctgctttggcattgatctctttgtaattaggatttacaggcatccagggcgttcctgtggtaaaacctgcattaggactgtcatcccattgtaccggagtacgggcattatccctgcttataaagataaggcatggccagaatatctcatggcttaagcttccgctttcacaccattccctgtatgcattaatgctttcaatatcatgaaaatctgccggggtcttgaaaggataattggtcattcccagttcctctccctggtatatatacggcgttccctgcatcatatgaaggcaggtagccagcatcttcgcagacacttctctgtactccttactgtcattgccatagcgtgatactacccttggctgatcatgattatcccagaaaagactgttccatgcttttccataaagctgggtctgccattttgacaggatctgtttcagctctgttaatggcttgggttcatccgtccacttcccgtatttgcctccgtccacatgttcaaactgaaataccatattcagctcatgctcatctttgccagcatacttcctggcttcctcaacagtaactcctgctgtttccccaactgtcataatatcatatctggaaagcaccttttcattcatttctttcagatatttatgcacatttgggccatggatgcaatatttcccaaagtctccatacttaccgccgtgggtttctccatccggcatctcctttgtcttggaaatcatactgatcacatccatgcgaaaaccatcgatgcccttttcacaccaccagttcatcatatcaaaaacttcttttcgcacctggggattgtcccagttcagatctggctgcttctttgaaaaaaggtgcaggtagtacatctgccgctcttcatcatactgccatgcagaacccccgaaaacggaaccccagttgttaggtggaaggtttccctcttttgcaggtctccagatataataatcatgataaggattatcttctttcttacggctttccacaaaccatttatgttcatcagaggtatggttcaccaccagatccatcaggatccggatcccacgcttgtgagcctctgtgagcatttcatcaaaatcctccatcgttccaaactctgtcatgatcgcctggtaatcactgatgtcatatccattatcatcatttggggattgataaaccggtgataaccagatcacgctgatcccaagctgttgcaggtaatccagtctggatgtgacccctttgatatctccgatcccatctccattgctgtccataaagcttctgggataaatctgataaacaaccgcttctttccaccatgctttttccatttatgttcatttcctttctgttttagtaatctttaagaatgtctttggataagaatcgtactgcaattctcttagaatttcccgctggatcctccatgggttttcccctgggcggaagtatgtgtagtgctgccggaattctcttcctgtctctcaatcggtttctttgtaactatgcaattcaccagatgatcctgtctggtggtaagccgtatgctgcctggcactacataatcctgtgcacttactttttgccttacagacgtcagtttgcttttcttgataagcccaatgatcagtgcgatcaccagaccgatcagaagatctgccggtatccagaaaaggcccggggtctctttgggaaggtggtcggtatcgtatgcctctcctgttttcgcctgtgtcaggaactcatcgcaaagagaggtaaagtcctcaaatgcttcgtaataatcatcatccttcagttctgtggaaatctgttcgatgatatactcctgtcctgcatctgtaaacgcagtgatcccaaagccgctggtactgatagcccagttcctgtctcccatatccagcagaaacagaataccatccagatctggtccctgtccatatccctgcaggtcataataatcatctgcgtatacagaggcttcctttccctccagatccggcaccgtaacaatcactacatcacaggcctgctgtgtacttacctcttcaagtttcttttccagctcttcatactgttctttttccaggattccggcattatctaccagaagggctccgtgttcctgaacctcttctgcattcacaggtataatctgtgttgcactcatagtggtgagaacagtcacaagaaataaagttacagttctacaaattctttttctcattgtcttgtcccccctcctataatagcatcagcagccacataagtccataaaggacagcgccgatggctgcgcctctggacagcacatatttccagaatgcctgtttatcagccggcagatctcctaccatctttcctgtctgaccattcatggcaaaaagatagtgttccccattccatgtggtgcttaaaagccataccggatataacacatacatatactctgcattcagaatatgtatatcactgtgcgccatatttacagaagtataatgctccatatcctgactcatggctgattctgcacttttacggatccgctgtgtaacccgttcctggctgtctttggcttccacatcatacctatctgcaaagtatcctgcaagataagcattctgaaacggaacagcctctgcaaaatcaaatggttctatggattccataagggtattatccattttgcgggatccgtctaccggtaaatgggaaaaagacatattcccgcctcgttttacatcataggatttccgctcggtatattccatgtcgccctgttcccatacccggatcttttctgctttgtaggaaacatctgcatgaatatctgaatcaaaaagccagaaaggaatgtatactccttttatttcatcaatatgattttcccttgcaaatacagaaggcaaaaagcttttccccttcagatggttcttataagattcctttgctgcctttttatccagcttgaaaggtatgatgcggtccggcttcagatctcctgcaaactgaccttttacaacgattttattcccgcagaaaggacaggaagatgctcctgtagtctgttctgcaataatttcacctccacaggactgacacacataaaccttcatatcctgggtttcctcctgggaccaggtttcgttacctgttgatgtccactgagcggttccctggtcttttgcattctgtctttcccattcttccacactgatctgggtatcgcagtatgggcactttaactgctgtgtcttgctgtcaaactccatagccccaccgcaggccgggcacttatattccattacatcactcatccggttgtctcctttccctgtgttagtacatcaaaaaggtctgctctttccgcactcctggcagaatttccctttatttactgtgccacaggagcaggtccactgatcctgtacaaccggtcttggagaaccacattccggacagaatttcccggttgcaatcgtgccgcactggcactgccagcttcctggcgcagtctgctgtgcaccaggcatcccctgctgcatccctgccatgttctgctgcgctccaggcatcccctgctgcatccctgccatatatggctgtgccccaggcattccctgctgcatccctgccatattctgctgtgctcccatctggtaaagcccctgcatattcataccgccttgtgcagatgccatattcatgccggcaaatcccatcatggctccattctgattagaagcagccatcttcattgcctctgcctgtgctcctgccagtgtggctgctgccatcgacggattttgtaaaatagccattctctgagcctgtttgatcatctcagcatcttcttcaggaagtgtaacctgattcatgccgattgctacaatcttcaaaccgcgcagtccctgccatttctcactgaggatcttatccatagcatctgtcagttccattaaatgtcccggaatcgcattcggacggatccccatctccgaaatccttgcaaaaccaggctgtagtgctgtaagaaactccgcctttaactgactgtccagttcctctcttgtgtattcctcagaaacgttgccgcacacatttgtataaaacagaatggggtcagtgatcctgtaggaatatactccattacaacgtacagacacatctatatcaagaccgatatttctgtctaccacccgaaatgggataggagaaggagttccgaaacggttatccataatctcctttgtattaaaataatatactctctgatctttccctgtatctccgccaaatgcaaatctctgtccgatcttgttaaaggtattattcaggctttctcccagatcaccagaaaaaatacttggttctgtggaagtatcatagacgaattccccaggctgtgcacacacctccactaccttgccctgatccacaataagcatacactgtccgtctgcaactgcgatcacagagccattggaaataatgttgtcatctccttttctattggaagatcttttcccagtccgtttcctgcccttcatcacaagaatgtcccgatccatagcttcacaataaaaatattccttccactgatctgccagcacgcctccaactgcacctattccagccttaagtaatcccatacttctacctcccgtaaaaatgttattatttattattttacctcattttcctttttttt

SEQ ID NO: 148 - DNA, 7682 bp, Unknown
  gut microbiota DNA sequence
aagcagaacaaatatctctgctttccttttatgctgtcactgccggataaattccaggctctgtcttttcagatctttttagtcctgtcctgtcaaatgcttttttctgtcagatactattttctgtcaagggtaaaccagaattccactccgttatcaaaattcacaactccatatttctggttcatgccttccatgatcgccttgacaatagaaaggccaataccactgccgccatattccctggtgcgggctttatccactttgaagaacttattccacaacttgggaatatcctcctccggtataggggttcctgtattaaagactgtaacctttactgtactttcttctttcaggatcttgatctctatctcgtgttccccttccagatggttcagggcattgcttacataattggtaactacttcctcagtcttaaactcatctgcccaaacataaaccggcttctcttcctcgaaaatgatctttgcctctttttgctggatcataatatccatggtggacagaaccccctggatcaaagctgtcaggtcaaagcgttccatcacgatctcatccctgccggattccagatgattcaaggtaagaagatttttcaccagcttattcatctttgatgcttcgtccatgatcacatcacagtagaactccatgctttccggatcatcattgatcccttccttcagtccttctgcatacccctgtacaagggcaatgggcgtcttcagctcatgagatacattgtccaggaattctttacgcatctcatcgatcttaaccttatctgcaatatccttctgaagcttgttatttgcagatttaagttctgaaatagtagtctccagctggccggacatccggttgaaattatctcccagaacatcgatctcgttgcctgcatggctttcatactttgcttcaaaattcagatctgacatttttcttgacagctcagtcagttcgctgatcggctttgtgatccttcctgttacgatccagatcacaataccgctggcaataatgatcagcgctcctacaaagaaataaaacttattggatatggcagcgctttcccggatactttccagcgggctccgaatcaggaaataattcccattatcaaaaacgccccaacattccacataatccatacccacaaaacggtcatgtacctgctgtaccacatagtcgtcagtggattccaggatcttgctctttactttgtcatcatccagattgcttgcatacccgaaaaacagcttgtttcgcagctgatcctcattctccggccagcagatatacttggtgttatcgctgttgatcaatacccaggtaagattatttctggaacctgactgtgcgatttgcgaaggcaattcctcttctgtaccgtcatcgtggaccacttcatcaacattgatctgcgccagaacctctttggcttccagcaaaacctctttcttccgtgacacataatatttttcaagaaaaattccattgatcaacgtaattgcaagcacagacagtaaaagaagccctataaaagtaaaggtgatctggtgcttcatagtgtgcagttttggggcttttgcggcttttttatgcttccctggtgttttcattctcccacctcgaacttatagcccataccccaaactgtcttgatgtattcccctttctcacccattttgctgcgcagcttctttacatgggtgtcaatggttcttgcatctccaaaatagtcataattccatacagaattcaggatcttctctctggaaagggcaatgccctgattctccagaaagtatgtgagaagttcaaattctttgaaacttaaatccatagccttcccatctacagtagcaagatgcgcagccttatcgatcacgatcccgcctgctgacagtacatcctgctggctgccctgccctgtacggcgcaggatcgcctctacccttgccaccaggatcttaggactaaatggcttggatatatactcatccactcccagatcaaaacccagaagctcgtctctttcatcacttcttgcagtgagcatgataataggcactttggaatccttgcggatctccctgcacacttcccagccatccatcttcggcatcatcacgtccaggatcaccaatgcaatatccttttctttataaaatatatccatggcctcttcaccatcaccggcttccagcacctggaaattcttctttgacagaaagtcctttaccagctttctcatacggctttcatcatccactacgagaatcttaagtgtatccatttataaacctccttgttatccgcccccaaaattataaatatataatataactgatttgtgggcatttcaaggcgagtttgtgacttttgtgtgaagggatatgattgctatccacaagtttatcggggccaccgttcctcttttggtggcagcggttcataccggttcttcccaccctccatttgataccaatatgccacgctggacacatcatcctgccgctcaaacaatccattatgggacattccgatctgctgtacagttacgcggatatcttcctggaaatatatgggatccggaatgtggaacctgtacattccccgcatgggaggacagtcatcgttatgataaggatgcgtagtcagatcatcatgggcagaataataaggatatccaagaaaaagagtggaataggtctgttctttcattttaccaggttccgggcttgcaaaactccaggaaccgcccacataatcctccattccggtgccacagatagtagggtaatccttatctccatccaaataaaatttcacttctccctctccccaccaataccgttccagtgtctgtagtgcaatataagttcctacataaatgccctttccatgaaccccgtccagaatggtataatccttctttttacaggttacaggctcccggttccattttgcatgaaaataaaatactggatccggcagagaatcatacaaacagtaatcaatctggtaaaaaaaggctggcacaggatttttatgttggctgatcaagcggatctgtgctcttttcctaaatggcatagaaaaatagcagttcagtccacgagacggcactactgcaatgggataagaatttaccatacattctttcccaaaaccacagcagaagaaatcccccaatggtacctctacagctggatattcttcctcatcccagatcatctgaagtatcaggtcccgaagcacaaaacagtcaccctgagaggttttgttatctactgtaatccaaatatgattaatcaccccacacccatgtatatctgccagaactgtagtactgcctggtgcaatatcagtaaggcatggatgaccttttcggcctttgcccaggcttcccgatgccattcctcctttacccttttctcccgtaggattttccccattaatggcacgggaactgccaaacttcccataaggaaaaatattcccaaataaattcatcagcgcctcctgtcatcagaacacatatctgacaatccaattctttggttgcaatctattgttctgttatctgatttcgttctgttcttccccttcgtacatttcaaactgctgtaccagcacgcttccgtattctgcaaaaactcctgcattaccaggtgtaaaaccataacatcttccacaaagggccacatcatcaacataagctgccacaatatcattagatgtaagaatgaaaatctgtacagttctgtcttctttaaaatgaacagggcgggtttcttcaaaaaactgatccttttctgttttcccggatctttccagtaccattcggtcatgccccagttccagacgcagctggcaccattgattcattttatctcctgatacatggaacatgattccaactgcatgagttccttctgtccattgcaatctggcttttatcagacatacatttttcattgcccccagctgtatccagccaaaaccatccttggaaactccttctgtcagcaaatctgccgttcctgtttttgaactgcatttccaaaatccagatttaggaatctgttccagacttattcttttagaaaaagactgaaggatcgtatccggtatttttacacccagttctccattttctcttggaaccagctgatggacgatcacatttccgccccatacgtacctgccatcattggtacagtccttccggatagactgccatcccaccagatatcggttgatcccgtcagaaactgtttttgcagcatagaaatccctgccgtcaaatttttcatcccagagaggcggtacccatggacctttaaaggaatcagccattttatattttgtttcccattgtttttcataggaggaatacgtcagataccatcttccattcatctgaaaaacgtcctggcattccaaagtgggatctatccgcggcgaacagatggtatcataatatttccagcttcgtatatcctctgaaacatatactgcggtacagccgctgcgattcttatccccatccttttcacaggcagtaaccagcatacaatacttaccaagaacaggattccagaatacatggggatctctccaatgtctgcctgcaaaatgctcctcatccgggtagaatatgtaatccctgtctttttcccatatctgcagatcccagcttacagcccgaaggattgcctgctcatatttgcctgcttttcctctgtttccttcgcaaaatccggtataataaaaataatatttttccccatcccagcacacactgcctgttgcagcatgccagtcctgctcctgtggtgttccattttgaagcaccagtctgaaatggtcataatgcacaaaatcttttgtctctattgcataaatgcaatacttataaagataaagaaatgtatacactccgtctttgtaaaaaggcatcaaatccccacacatttccccatgaggcattccttcatactgatattccggtgtataaaaaatgtaattacatcctgtcataatctcctcacaatctcagccttttactgctcctgccacaacgccttcaataatatgtttctgcaaaataaagtacaaaatcagaatcggtatcactgacataaccattcctgccatcatcaatccatagtctgacgaaaaatccccatggaaggactgggctgcaataggaagtgtgtacaattccttttttaccagcaccaggcttggaagcagataatcattccaaattgccagcgaatcaatgatcaccaaagtgaccaccgtaggttttaataggggcagtaccacagacctgtaaatcttcattctggaagcgccatcaatcttagcagcctcttccaattccaatgggatagaacttacaatagcaccatgaaacataaaggttcccatactgaccccaaatcctacatgcatgcagattaacgtaagccggctgttcagaatatgaagcactgatccatacactgaaacaataggaatcatcaatacctgaaaagggatcaccatagacaggatcatcagggaaaagaacagcttattgatcttccatttacaccttgcaaacagataggctgtcatgctagaaaacagaacgattaaaagcacactgactaccgtgatcagcagggaattaagaaaaacattccagaaatccattcttttcaaagcaagaagataattttccggacaaaagccttcttccccaataagcgacagcggattcttaaccacatctcttttgcttttgaaggaattgatcagcaccaggaaaaagggaaatatgtaaaccagcaataaaacagtaaggagaaaagaacttttcccgtatgtttttttctttctcatgcctgaacctccttcttctttgtaaaatagatctgcatcaacgaaacaaaagcacaaaccacaaacagcagaatggcttctgtctgtcccaggccatagtttttctctgaaaaagcttttctgtaaacatacatggaggccattactgttgaaccaaagggatttccttctgtcaatgaaaagttcaggtcatatgtcatgaagcatctggtaattgtaaggaaaatacagataataaatgaagaaatcatcattggcataacgatatatttcctgcaggctttttcatcacagccgtcaattcttccggcttccagcagttctttgggtacgttcatcagaccggcaatatagatcagcatcatataaccggaatactgccacacagttaccaggatcagtgcagccatggccagctttgtgtcagacagccaggactttgaaaggaatccaatatccagggacttgccaaaagccaccaacacccttccaaaaataaactgccagatataccccaggacaactcctccgatcagatttggggtaaaaaaggatgcacggtaaaaattctgaaaacgtactcccttcgtcaccagccttgccaaatgaaatgctatgtaatttacaagaagcaccgcaattcctgtaaaaataatggttaatagaagggactgccagaatttcacatccccaaaagcctttatataattttccagtcccactatgttcttttctctggaaatcccattccaatccgtgaacgttagataaacgccgtaaacaagcggaaccaggatcgtcatcacaaaaaagaatagcgatggtccggcaaatacgagaaatgtacctgtattctttatctttgtcctgctttttttagatatactcatgctgctctcctatgtttgtctttcatttattcccataaatcctgcgtcttaagatcctgtattccagggggccgacacttgtttcaaaagagatgctgtataatcccggcaccagactttcatctatatatgcacaagatctgtacagcatctctttctcagggttcaaccaggattcttaagttctctggctgcccctggcattatcattcatgatttttccagtaatcgctgacttcggaaatcaattcatcacgatccattccaccagagatatatttctgaagaatagcaccaactactgtattatgatcacttggcattgcctgataccaatatacagaagatccattctttacaaaggatgcaacagatgcacttaatgcagcctcaggctcctgtgtattattggaaaatgcagtaatcagagaacatgtatttaccatgaatttctggccataatcgctgtataccagccagttcaggaattcaagagctgccttctgctcatcttcagaagaatatgctgcgtcaactgcgagcatcttggtagctccgctgaccagattatgggcattcacctcatccttggtatccatcgggtatggcataattcccacattatctgtaagttcgcttacatctgtggcccagcttccatttggccagaatgcaacggttccttctttcagatactcatcattcatatcataggttgcagaaagaggatcatctttgttgatgttatactccatatatacatcgatcagatccattaatgcattaaagtcctcatcatccggtgaaaaggtatccataaacggtttatctgttgcgccggtattatactccaccgcccggtacagt

SEQ ID NO: 149 - DNA, 9317 bp, Unknown
  gut microbiota DNA sequence
attttatgagcatttgagggctttttcttattttacttgggtatggaaatatttccatgaatctggtataatatataggtccacgtaaaattggttttatctatgtaatagaatgggaaaaatcatgaaagaaaaattaaaattcagagggccattgaaacaatatatgcggacccctatgtacctggcaattctgcttcttggactgaatattctggtatatatggttaatatcagggcaggacttttagtatccctgggactggctgtgtacttactgatcgttctgctgatctatattcaccacaagccaatgattctcaacgccctggttgcatttaccacacaatacaatgccctggagaaacgtatgctggaggatctggcactgccctttgccattatggataccaacggcaggatggtctggtccaatcggctgtttgcaagcctgatggggaaagaccagttgtacaataagaatatagctacccttcttccggatattactcaggagaagctgccagtgccgggacagaaggacataacagaagtaaccaccggcttagggaacgagatctacagggtatctatgcagtgtatcaccatgaaggatgtggttgagcatacagatattctggagaagctgcagaatgatttgagtctgattgccctgtatctttatgacgagacagaattgcaggaatatatccagaagaatgaagatgacaagctggttgtagccttggcgtatctggataattatgaagaagcgctggatagcgtggaggatgtacgccgttctcttttgatcgcgttgatcgacaggaagatcaccaagtatttttcaaattttgatggcgttgttcgtaagctggaaaaagacaaatatttcctgatcatgcgtcagagttccctcgaagcattaaaggaacagagattccatattctggatgaggtaaaaacggttaatatcggtaatgaaatggctgttaccttaagtatcggtattggattgaacggatctacttatctgcagaattatgagtattccaggattgccattgaaatggcacttggccgtggaggcgatcaggtggtgatcaagaatggcaataccatcacatactttggcggtaaggcacaacagatggaaaaggcaactagagtgaaggcacgggtaaaggcacaggcccttaaggaatttatgagtaccaaggaccgtgttgtggttatgggacataagatcacagatgtggatgcattaggggcagccattggtatataccgtgccgggaagacacttggaaagccggtgcatattgtggtgaatgatcctaccacatccattcgtcctttgatggcaggttatgtgggaagtccggattatgagccatctatgtttgtagatgcagatcaggctaaggatcttgtggacaataacacagttgtggttgttgtagataccaacaagccaagttatacagagtgtgaggatcttttataccttacaaagaccattgtggtactggatcatcacagaaggggcagtgaagtgatacagaatgcagtactctcttatgtggagccgtatgcttcttctacctgtgagatggtagctgagatccttcaatatttttcagacgatcttcgcctgcggagcatggaggcagactgcttgtatgccggcattgtgatcgataccaacaattttaccaccagagcaggtgtacgtacctttgaagcagcagcgtttcttagaaggaatggagcagatattaccagagtgcgtaagatgctgcgggatgatattgattcttacaaggcaagggcagaggttgtgcgtactgccagcatttataggaaatgctttgccattgcaaaatgcccaagcgaaggcttggaaagccctaccgttgtaggggcacaggctgctaatgagcttctgaatattgcaggagtaaaggcttctttcgtacttactccatacaacaaagaagtatatgtaagtgcccgtgccattgatgaagtgaatgtacagatcatgatggagcggatgggcggaggcggtcatctgaatattgccggcgcacagctgaaggaaagtcttgacgaggcggagctgatgctgaaagcaatcatagatcaattatacgaagaaggagaatttaaggaatcatgaaagtaattttactggaagatgtaaagtcccttgggaaaaagggcgaaatcgtaaatgtaagtgacggatatgcaagaaatatgatccttccaaagaagcttggagtagaagctacacctaagaatctgaatgacctgaagcttcagaaagccaatgcagaaaaggttgcacaggaaaatttcgaggcagcacaggcttttgcaaaggagcttgaaacaaaagagatcattcttactttgaaagtaggagaaggtggaagaacctttggttctatttctggtaaagagatttctgaagcggctaagaagcagctgaatcttgaaatcgacaaaaagaaactgcagcttccgtcccccattcgtaaccttggcgttaccaatgttccggtgcgccttcatccaaaggtaacaggaagcctgaaagtatgggtaaaagaggagcagtaagtatttcatggaagaagcattgatcaaacggatacttccgcacagtattgaggcagagcagtcagtgattggcgccatgatccttgacagggatgcgatcctggttgcctctgagatcctgacaagcgatgatttttatcagaagcagtatgggattatttttgatgcaatggtagaactttgcaatgaaggaaagccggtagatctgatcaccctgcagaatcgtcttaaggaaaaagaactgccgccggatatcagcagcatggaatatgtgcgtgatcttctgactgcagtacctacctctgcgaatattaaatattatgcaaatatcgtcagcgagaaagcggttctcagacgtctgatcaaagccaatgaagaggtggagaatgcctgctatctggaaaaagacagcacgcagactatcctggaggaagcagagaaaaagctgttcaatattttgcagcggcgtaccagtgaagaatttgtgcctatccagcaggtagtgcttaattctatcagcaatattgagaaggcgtctaagctgaaaggtactgttaccggtattcctaccggttttgtagacctggattacaagacctctggcatgcatgggtcagatctggtgctgatcgctgccaggccttctatgggaaagactgcttttgtattgaatattgcccaatatatggctttccgcaaggatataacagtagcaattttcagccttgagatgtcaaaggagcagctggtgaaccgtctgcttgccatggaatctcatgtggattcacagaatctgcgtacaggtaatctgaaagatgaggattggacaaagcttgtggaaggcgcagacattatcggacgatccaacttgatcatcgatgatacgcctggtatttccattgcagagcttcgttccaagtgcaggaaatataaactggagcataatcttgggattgttatgatcgactaccttcagctgatgagcggatccggcaaaacagattccagacagcaggagatttcagatatttccagatccttgaaggctcttgccagggagctgtcagtgcctgtgatcgcattgtcacagctaagccgtgcagtagagcaaagacctgaccacagaccaatgctttctgacctgcgtgagtcgggagccattgagcaggatgcggatgtggtaatgtttatttacagagatgactattatcacaaagatacagagaaaaaggatattgctgagatcattattgccaagcagagaaatggccctatcggtacggttgaactggtatggctgccaagatatacacagtttgtaaatatgaaaaagtaaggcggattttgtcaatcgctttttcttgcaatctattacccctttgttataattaaaacaagatgcaggtgtgcgatacaaaccatattggacacaggtgcattacaaaaaggaggggtagcgtggataagcgatatacggtagcacagaccgtccagatcacaggcttaaagccatatgttcttcgatactgggaagaagaactggatctgaggatcggaagaaatgagcttggacacagatactacaccggatatgatattcagttgtttatgaatattcaggaacttaagaaaagaggactgcagcttaaggccattaaggaactggttccccagattgccaggaatgctcctgggatgagccagagtaaggtcaggcttctggaagatacttctgttcaggtgtatactgatcaggaaaaagatcaggatacagatcaggaggaaagacagagatgtaaagaactgccgccagccagcgaggattcagggaagatcctggagttccaacaaatcctggaaagactgatccaacaggaacttcacactcagaatgacggagaggcaagatgccgctctattgatgcagctatccgcagacagcagcttgcaaggaaggaagctgccgtagcaatagaaaagaagaataaaaagaaacataaaatacatatgtgatcagtgagacttgtctcagatcataaatgaaaaatggctgccgcatatagcgacagccatttgatcgttcttaggaaattattcctggctgatagcgcctgtaggacagacatcagcgcaagttccacactcaacacatgcatctgcatcgatcacgtaatgatcatcaccctgagaaatagcctcgttagggcattcgctttcgcatgttccacagcttacacattcatcagaaattacatatgccatagttatatcctcctttaatctcttttgtacccttaaccgggttctgaatctattctaatatatctatcgttggattacaagtataaaattataaacaaaattttagaactgtaaatgttgattcctgtaaaaaatcgtattataataggcaagggtggagactctttataaggactgcagatgtggttcttttacagataatgattctctccagatttgcgaataaaggaggaaacagatcatggcacaggtgacaaagcagatgctcatcggcgaactgcttcagttagatcctaacattgcaggggttcttatgagagccggtatgcactgcatcggctgcccgtcttcccagatggagtctcttgaagaggctgctatggtgcacgggatggacgtagatgtcctggtagagcagatcaacgattttcttgctcagtaatttgcacactatatagacgaatgtgcatctgtttatagaggagtctttgtagacagagtgaacaggtaaagagaatgccgtatcagttacagttttttagaactgcagcttatacggcatttttaatgtattatattaatgtttgtactttaaagctgttccagactctggaccgcatgaagggtgatcagttccccgtgctctttcaggtgtgcttctcctgacatggtgaatgcctggccctgcccgtattcggaaagaatgttgcacaccttattgaattcctcaggagtgcagtcagactggtggatcaccagacggtaaaatccctgtgctgcatctttgtataatgtattctctcctgtgaaatagcctcccagtccgtgggctgcttgaatcacttcatccagggtgtggaaagagaaaagacggataaggtcaatatcggcttcattctcctgtggtgccttttcttgtgtgggggcttccttcttctctgatggcttggtctgggactgaaccttagcttcacacagcttctggatcaaatcgataatattgtctgcaccatccaactgaatggtatccttacggtcgctgcctttgtaaggagagaacttggaaaaacgtgtatctaactcctccggatcctctactttggtaatgatcaggacaatgctctctgtacttaccggaatagcctcgatcatcagtggaatattatcagcttcaaatccaaactgcatctgggcctgctgcatcatatcacgaaacagctgcttggctttgtctgtaccataggccagttcgctgatctggatatggtgtgtctccagatcttcttttgtcagggtgcagcgaatctgattgtcattaatcttttctatcttcatatcatcacatcctattcttaagtgggaatgattcctgcctaaagttcattatattttatattatatagcataaaagtgcaagagggaagctgcttctatttctttgtttataaaatatttagaaacaaaatgaaaaaaatttactaactggcaaaaaagacttgcatatgtaaatggaaactgtataatagaactcaggaaagacggccggacgatccatacaggttcagttactatgaaacaaggtatcagcttaaagtattaacattatttcactactgtggactttgccgattttgtcatgcagcgttcttgctgtggcagggtacatatttccccataagatgaaatgatctgccggaagtgtcttttcagaaccagttggtgttttctgaaataatcaggaaaggaggttaaggcacggagaaggatatatcacgtaaaagaaagaaaaaagcccgtaaaagtctggaaaatgaacttctggaataccagaatcagggaatatacctgtatctggaaggagaaccaagtacgccgaaatccattgcaaaagcctgtcagattgcagaaggcggaggttatatgcgggattatacagaagatgagcggggacggatcgccagagtggactttgactttgtactggatgatcctgacttacaaaagtaaatagaatgcagggtaatccctttggcagcaggctccccctactcaaagccgtggtccgaagggatttcctgccgaaatgaaacgatctgtgaaatataataatatgtggaataaaacaatacgtaaaatatagtaatctgtgaaataaaaagctggaaaaatgaacttactgttaaatgctattaaaaaacaaatttcttaatgcaatttataatggatatgatataatgggcggtagcaaactcgaatttggagaaaggttttactgaaaggataaaagtatggatagaaagaaaaaaccagtaatactggtatgtgtactgattctggtggtggctcttgtaggagtggctgttcacgtgatcatgaagtatgttcctaccagacagagaatggatctgaatgaatattacggacaagtagctgacgggcagtgtgccattattgtgggcacagagcgtctggagtcaagaggccttgtttccgataataagacatatattcctatagatgttgtggattcatatattaatcagcgatactactgggattctgagggacagcaggtactgtatgctactcccacccagctgaccagccagccggcacaggttgattcgggcagtgaggtatggcttaaagatggcgttgtttatttaagcgttgattatatcaagcagtatacagatattgacgcatacgtatatacagatcctgccaggatcactattcagaagcagttttcagggatccagactgtacaggtacagaaggatacatatgtaaggtatcagggtgggatcaagtcaccggttcttacaaaggtaagtaaaggggattctctgatttttatgcaggaactggagaactggacacaggttgctacctgggacggttatatcggatatatagagaagagccggatcagtgtgccagaggatactacactggagagagatttccaggcagagcagtataattacattaccatggatcagaaggtaaatatggtatggcatcaggtgatgagccaggaggctaacagtacatttgcagaggctacccagaatatgacaggtgtcaatgtgatctcgcctacctggtttgcagtgcaggataatgcagggaatatttctaatatagctactgcagattatgttgcacaggctcatgagaaaggactgaagatctggggactggttgataatttcagtgaaaatgtgaatacttcagagcttctggccaagacaagtgcaaggcagaatctgatatcccagctggtaaatgctgctgtaggcgctgggatcgatgggatcaatgtggattttgaatacctgaaggaagatgtaggggttcatttccttgaatttttaagagagctttctattgagtgccataagaacaatctggtgctttctgtggataatccaccgccagcagagtataccagccattatgacagagcagagcagggcagagttgtggattatgtagtgatcatgggatatgacgagcactacgtaggctctgaagaagccggttctgttgcatcccttccttgggttgagcaggggatccaggatacactggcagaggttccggcagagcgtgtgatcaatgctatgccgttctacacaagattgtggaagaccgaggcgggtacattgtccagtgaggcaattggcatggacgcggcagcagaggtgcttaccaccaacaatgcagagacatattgggataataccaccagccagcagtatggagaatatgagaaggacaactgctcctataagatctgggtagagaatgcagattctattgctgctaaggtacagcttgctgtgaagtacaatctggcaggtgtttctgcctggaagctgggctttgagaacagcgggatctggcaggtgatttctgataatctggcagccgctcagtaagaaagcaggattttaacaggacgataataaatgcattcctttaggcatataaataacaggaatatgccaaaggggtgcgttcatgaaaaaatacagaatggaactgatcatggcctgtctgatgctggtaagcttttacctgctgtcaagacaggccgctgttgtatctgtaagcagcaagaaagtgccaaaaggacaggagaaaggtgttattgtaatcgatgcaggacatgggggttgtagataacgcaagtaatgaaaacaacgaaaatacaaggagaaaggcaactgttgtacctactaaaatagaatatgtgtgagaggacaagcctttccgtaatgtagacgttcagaaatgagcgtctattttatactaaaaacacaataaaaatctgattatccgctaaaacacagtatctatcagcattttcaaggaaacaaacacatcaatttactacttatttactattaacgaatgag

SEQ ID NO: 150 - DNA, 14852 bp, Unknown
  gut microbiota DNA sequence
tgcgttcttctcagcgattgctgcctgagctgctgccagacgagctaccggtacacggaacggtgagcaggaaacataatcaagaccaatcttgttgcagaactctacagaagacggatctccaccatgctctccacagatacctacatgaaggtttggattaaccggttttcctaatttgatagccatctccatcagcttgccaacgccaacctgatccagttttgcaaatggatcgttctcgaagatcttagcgtcatagtaagcgttcaggaacttaccagcatcatcacgggagaatccgtaggtcatctgagtaaggtcgtttgtaccgaagcagaagaagtctgcctctgttgcaatagcgtcagctgtgatagctgcacgtgggatctcgatcatagtaccaacttcgtacttcagatcaacgcctgctgctgcgatctcagcatctgctgtctcaacaacgaatttcttaacatatttaagctcttttacatcacctacaagcgggatcataatctctgggcagatgtcccaatcagcgtgtgctttcttaactttgatagctgcacggatgattgcagttgtctgcatcttagcgatctcaggataggtaactgcaagacggcatccacgatgacccatcatcgggttgaactcgtgaagggaagcgatgattgtcttgatctcctcaacgctcttgccctgtgcctcagcaagcttcttaatatcctcttcctctgtaggaacgaactcatgaagcggcggatccaggaaacggatagttaccgggttgccttccagagcctcgaacagtccttcaaagtcatcctgctgatatggcagaacctttgcaagagctttctctctctcctctgctgttgtggagcagatcatctcacggaatgcatcaatacgtccctcgccgaagaacatatgctctgtacggcaaagaccgataccttctgcaccaagctcaactgctttcttagcgtcagcaggagtatctgcgtttgtacgaaccttcatagttctgtatttgtcagcccaagccatgatacggccgaactcaccagcgattgtagcatctacagtcgggatgataccgtcatagatgttacctgttgtaccatcgatggagatgaagtctccctcatggaactcttttccgccaagtgtaaatttcttattagcttcgtccatagcgatatcaccgcatccggatacacagcactcacccataccacgggcaactactgctgcatgagatgtcataccaccacgaactgtcaggataccctgagcagatttcatacctgtgatatcctctggagatgtctcaagacgaacaagaacaaccttctctcctcgctcagcccattcaacagcgtcatcagctgtgaatacgatcttaccgcaagcagctccaggagaagctccaagacctttgcccatcggtgtagcagctttaagagccttagcatcaaactgaggatgaagaagtgtatcaaggttacgaggatcgatcattgcaactgcctcttcctcagatctcattccctcgtcaacaaggtcacaagcgatcttcagagcagcctgagcggttctcttaccattacgtgtctgcagcatgtataactggccatgctcaacagtgaactccatatcctgcatatctctgtagtgtgtctccagagtatggcaaacttctgtaaatttagcgaatgcttcagggaacttctgctccatctcagcaatgtgcataggtgtacgaacaccagcaacaacgtcctcgccctgtgcattggtaaggaactcaccaaacagacctttgtttcctgtagctgggtctcttgtaaatgcaacaccagtaccacagtcatcacccatgttaccaaatgccatcatctgtacgtttacagctgtaccccaggaatatgggatatcgttgtcacgacgatatacgtttgcacgtgggttgtcccaggaacggaatacggctttgattgcaccaactaactgctccttcggatcagatgggaaatcagcaccgattttctctttatattcagctttgaactgcatagcaagctctttaaggtcgtcagctgtaagctcaacgtcaagcttaacgcctctctcagctttcattttgtcgatcagctcttcaaaatatttcttaccaacttccataactacgtcagaatacatctggatgaatcttctgtagcagtcccatgcccaacgtggattgttggatttctcagataatacagcaacaacgtcttcgtttaaaccaaggttcaggatagtatccatcatacctggcatagaagctctagcgccagaacgaacggaaacaagcagaggattttctttatcaccaaatttcttgccggtgattccttccattttggtgattgcttccatgatctgacccatgatctcgtcattgatctgtctgccgtcctcataatactgtgtgcaggcctcagtagtgattgtaaagccctgcggaacaggaagacccaggtttgtcatttcagcaaggttggcacctttaccacccagaaggtttctcatatcagcgttaccttctgtaaacatgtaaacccattttgccattttacattttcctcctaaataaattgttctttcaacatgaaatatgttttttatacgcacatagctattttatagagttatccggcaatagtcaaggctatttttcgctgtgtctgtatttttaccagtcttttttgtctattttcgtttttttcctgcatttttatttaataccaagtgtctgggcagtccgtttaccatcatcggaggatagtctccctggatcaaaggcttgatataatcaatgaaatccttggtaacattgttggcctccttattcatccagcttcttggaaccagcttctcctcattggcgatcctgtgcacatcataaatccctgtggcagccatgtaaggatcatctgatacacggtcgatcacgatcatcttgcctgtatctccttcgtctgctgctttcactgcagcgccgcctaccataaatgcttcgtcaatgtccaccctggacgccatatgagatgcacttctttgcaaagtggaaagctctactgcgcgggtcttgcagccacactctgctgccaggaaattagccaggtaagtagctgtaccctgcagctgcttatgtccaaaagcatctacatagtctcctacatttccaagctcgcatacataacgtccgtcagccagcttgatgccctcagagactgcgatcacaatagaggatttctttttcagcagttccttcacctttacaaggaacctgtcaatatcaaaagccacctccggcagatagatcagatccgggccctcacattcttctgtcttggcaagagcagtggcgccggtaagccagcctgcattccggcccatgatctccataatagtgatcatatttttcttataggtaaggccttccgcatcccggatcacttcctttgtggatgccccaatatatttggcagcactaccaaaaccaggagtatggtctgtcagcgccagatcattatcaatggtcttaggcaccccaaggaacttctgagtctggccggtaaggatggcatagtcagaaagcttcttaatggtatccatagaatcattaccgccaatgtagataaatgcatcaatatccagcttgttcagaatcctgaaaatcttctcataaatatctctgtcttcatggatctccggcagcttgtacctgcatgaaccaagaaaagcagacggtgttctcttcaacagttcaatatcaatctcggaatggatctgtgtggacagatcgatgtactgttcatccaaaagtccctggatcccgtgaagcataccataaactttgttgaagcctcgctcaatggcattcttatatacgcctgcaagactggagttgataacagaagtaggacctcctgactgacctacgataatgtttctttttttccccatagtgacatttcctcctctacattggtttataatagtaaattttaacaaccaaagtgtaggaagtcaatgttttattgtaaaattttaatcaatatattttttacgccaaataaaatcatggaaataatagctgtacatgcaaatatcagcacaggtgcatatgtgctatatgccatactccacggatctgtaccgtctttcagataaagatccatcactgtgatcacagccggatgaaggatatagatcattgttgcgcaattcctgcccagccatgcaaaaaatccggtaagaatccttcttttgtaaaagcctgcccagcaaaggaacacacaaaacacacacatagtaagaaatgtagtactgatataatgctcccgtggtgcatttgcctgcacagactccagatatcttctttcgcaaaagctggtccaggtaaatactgccccacctgcaagaaacaaaagtcccttccaccagcggcttttttccagctttttctctttatggatccctaatgcccagccaatggcaaaataaggaatccctacaaacagataatttcttacgtaaatataatcaatctcctgattccataaaagtagggaatactttccaaagatcagatctccggcaagaagaagtggagtcaggatcagcatccaatactgtttttctttttttacaagccaggctgccaggatcagcacatacaggatagcgccaagataccacagatgggaacgaaaaggagattcattggtaataagcagatcacggatcttctcaggggtaaaaagcttctgaatctttccctgaatattgcctgttccatagtaatacacaatgaaaagatcccacgcaaaatagaacagattcgccaggatccctatcctcaggatcttaaggatctgttttttttgtttcccttttcttatggtatcactgtagaaaaaacctgtgatcataaagaacacaggaactgcaaacctgaaaaagatcttcagatacatcccggcgtctcccggaaatccccgatgtatgctgatcacaccaaaagcacatatacatttcaggatatccagtgtttcccatcttttttccataaaataaacaggggtctgccctttcacaggcagacccttttacctccgattatttacctacctcaaaagtgaacttatctgcaaaatatgcatccagctcatcgatcttaatacgtacctgctccatggaatcacgctcacgtaccgttacgcagccatctgtttcagaatcaaagtcataagtgacacagaacggtgtaccgatctcatcctgtcttctgtagcgcttaccaatatttcctctgtcatcatactcacaattatatttcctggaaaggctgtgataaatagcctcagcaccatcattcagcttcttggaaagcggaagtacaccaatttttacaggtgcaagtgccggatggaaacgaagcacagtacgtacatcattcttctcagcatccagaacttcctcatcataagcgctgcacagaaatgccagtaccatacggtcagcaccaagtgatggctcgattacgtatgggatgtatttctgcttcttctcatcatcaaaataactcagatcctggccggatacgttctggtgctgtgtcaggtcataatcagtcctgtctgcaatcccccacagctcgccccatccaaacgggaacaggaactcaacgtctgtggtagccttgctgtagaagcttaactcctccggtgaatggtcacggtaacgtacctcatcctccttaaggccaagggcactaagccagtcaaggcaaaacttcttccagtatgcaaaccactccaggtctgtatccggctcacagaagaactccagctccatctgctcaaactcacgggtacggaatgtaaagttacctggtgtgatctcattacggaaggatttaccgatctgagcaataccaaatggaatcttctttctggaagttctttgtacattcttgaagttaacaaaaataccctgtgcagtctcaggtcttaaatatacagtattcttagcgtcttctgtaacaccctggaatgttttgaacatcaggttaaactgacggatgtctgtaaagttgtgcttcccacaggtgggacacggaatggaatggtctttgataaagtccatcatcttctcctgggaccatccgtcaacggatccgccttcgatctccaagcctttctctgcacagaaatcctcgatcagcttatctgcgcggaaacgctcatggcactctttacaatccatcagaggatcagaaaaccctcccagatgtccggaagcgatccatgtctgagggttcataaggatggcacagtcaacgcctacattataaggagactcctgaacaaatttctgccaccaggcacgctttacgttattctttaattccacacccagattgccgtagtcccatgtgttcgccagaccaccataaatctctgaaccgggatatacgaagcctctggcttttgccaatgctacgatcttgtccattgttttttccataacagttctcctcattttctcttcatgatattccgcctgcaagcagcggttttatttattcaggaatgctgtcattcctgctgcaagatgcgcatgtcaccttacatctgatgttcctaattatactagcatcccctgggtttttcaaccttgaaattatttcatcacttccaggacctgaagacttttaaactttctgtctgtatttctttccacatatgtatggatgcagtgctccagttccttaagtacctgttcattcacagtaaaggtatacagcttattcattggctggcttacaataaattccatggcatatactgcagcaccggagatcctgatggcatccggtgctgtcctttggtccacacattcccggcagacaatgccatgaaggctctgggaaaagaaaagctctttcatttctcctgctctgcgtccgcagctgccacaggaaaaaacttccggcatcagtccctgttccgccatagtacgcagttcaaatatgcaccgcaccagtctgtcatcaatctttggattcaaaagcgcacgtacagaaagatataaaagattcatcatttctttttcatctgtgccttcctggccaaaataatcagccaattccaggaaatagtaaccataatagatacccggctgctctcctgcaagctccacaaaatggtgggtaactgatacctggttcaggttgtagctgctgcgcccttcataaagggtaaagctgccaaaaacgaagggattggcagctgccataaacggactgttctgccgccttgctccttttgcaaaagctgaaatcttccccctctcccgtgtaagaagaaggatccgtttgtcatattctcctacaggcattgcagacagaacgactccctgtactgtgatcagatcactcattttcagatttccttcttgtcataaccaaaattcttgatcataaaatcactgtcgcgccagtctttctttacttttacccaaagcttaagatttacctttgcctccagcatccgttccagctcatatctggcattgctgccgatcttcttcagcatggcaccgcctttgccgataatgatccctttatgggaatcccgctcacatataatggttgcttcaatatcatacatcaggttcttcccgggacgttccttcattctgtcaatggccactgcgattccatgggggatctctgcatccaaagcatgaagagccttttcacggatgatctctgctacgatctgtctctggggctggtctgtaacagtatcctcatcgtaaaacatggggccatagggaagatacttgaaaatactgtcaataatgtcctctgtattctgtccgcgaagtgcagagcagggaatgatctctgcaaaatcacagattttacggtaagtgtcgatggcaggaaggatctcttcttttttgacggtgtcgatcttattgataatcaggatcaccggaacccctacctgctgaagctgctcggcaatatgcctttcgcctgccccgatgaaggtggtgggttctaccagccacataatggcatctacctctttcagggtacgttctgccacggcaaccatatactctcccagtttatttttggccttatggataccaggtgtgtccaggaatacgatttgtccctgatcacaggtatatacggtctggatcctgtttcttgtagtctggggctttttagaagtaatagcgatcttctggccgatcagatggttcattaatgtggattttcccacattcggccttccgataatagccacaaaaccggatttaaaattttcattcataaaatacgtattcctctctaacaggtgatcagtgactttgtttccatgaaaagatccctgttcttttctacttcgctttcgcttcctaccacgcagatctggccgtcagacagcacagcctccacaacaggtgccagattgtggatgtcttctacggttgcatccaggatctgatcacgctccctctgaagcatttcctctgtaacatgagaaaaataggctgttttggaaatcgccccctgcatcattggagtccttggcacatccttgccactgatggtaccgataatatatttggtcatttctctttcatctgagttgaaatgacggatgtattccggaacccctttatatacatccagagtacgtgccagatgaggatccctgtaagaaacaaaaaagctttctccatttctcttaaatccgctcatacagccgtatgcgccgccttttacacgaagattgatccagagatagtcataacttaatgccactttcagaatatccagagcacctgtataagcaaagcccttttccacaaaattacctgtctgggctacatactgtacctgcccggctgttttgaagccttcgtttttctttgtacaactgatctgctgttttctgtctgtttcagtcatatgtgccataagctttttcagggaaacaaactgtgtctttaccatctccacagattctttttcaccggtatagctaatgctcatattttcctggcaaaggatctgtcccatcaccagctgcaggttctgcacgatctcatctttctttgcttcaaaatccttttccagattttcgataaagtgataataaccgattcctgccatttcatcctgaaatgcagccatccgggatccataggatgagcctcgaagcacagctgtctgatgtcctgctgatacaagagatgcctgtgctctggatttgatctgggcaatgatctcatagagccgctttgtatctgtaagctttgaagtacacaaaatctcacggatcatagaaaacagaaattcatacttaggataaagagctttacctcttactgaaaacatcgctgtgaatttctgaggatcctttgcatcatcaaaaacttccacaccgcacatgatcccgcctgtgttttcattgatctcattaaacaatgcaccgtaggtataattctctgtatctaccaatccaagcacagactttaacaatccaagataatggatcttttctatttccatatcctgtacctggaacatcagatctgtatatccgatgccattagtacacacatcatggtaaaggaacagacttccatccacctgctggggatcgttggtcagctttgcagcttcccttttaatgtctgttcgttttaacatagggatgcactccagaaaagccggatcctcctcagcttcctgataggcttccagttcctgtgtccttttaaccatttcagccagttctttttctgacagactcttgcggtagttctccagcttatctgccaattctttttcacgctttgctgccagcccttttttgggaacaagacaaagcacagccccatgaggattctcaagcaggcagtcgcggatcagctgttcaaaatatccctcatctacagattttttcaactggtcaaagacggccagctgctgaacctgtgcaaaaggcttttcatcaccatacagccagtcacccataatgtccagtccgtacatcagccccttaggataagagccaaagtctgcttctctgtatcggaactccatataattgattcctgccaggattgcttttttatctacaccattgtgaacgatctcacctaaaacctgacggatcagacctacaaattcctcttttttatcaagattagatccttttgccacaattgtaaaatagggctgtaaaatcccatcctcaaaggaaccgtaaatgtctttaccgatccctgcatccagaagggcttttttcaaaggtgcccccggtgcacttaaaagggcataatccagcacctcaaatgccaggcatttcacattatcagtagtatctcccacaaccatattgtaagaaagataagagttgtcctcttctccttcattctctgccacaggatattccttcacagtatccctgcaggctttaaatgcaggttggggagcaatgtgggaatccacatccagtgcttcaaacccggacagataatgtttgtcaataaattccagcttttctgccatatccatattaccatacaagtaaatatagctgttggaagggtggtaataggttctgtgaaactgaaggaactgttcataagtcagatccgggatatactccgggtcaccgcctgattctaccccataggtagtatccgggaaaagagtattcatgatctccctttccagtacatcatccggtgaagagaaagctcctttcatctcattataaacaactccattataggtcagcggtccttccggcttttccaaatggtagttccagccttcctggcggaaaatctcttctttttgatatatatttggaaaaaatacagcatccagatatacatgcatcagattctggaaatcctgatcattacagctggctaccggataacaggttttgtccggatatgtcattgcatttaaaaatgtattcagggaaccttttacaagttccacaaatggatcctttaacggaaactccttagacccgcacagcacgctgtgctccaaaatgtgaggaactccagtgctgtctttgggtgtagtgcggaatgcaatggagaaaaccttgttctcatcatcattttcaatcagcattacccttgcccctgttttcctgtgggaaagaatatatcctttagaatgaatatctgtcagatcctcttccctgatcagtttgtaggctgttaatttttctttatccataaatgcctccagttatttaccattgatcttttttatgcactgattataaatacgcttataggtagtactatcatagtgaagaccgtcatcataccgtacagtctttcccacaccgcctaaagtactgtaacctgtacgcatcagaaagcggtatgtatcaatataagtaaagctgtcactaagtccggctttcagtctgttattaaagtcccggatcttggtctcgtttttatatacagatcttcgcatagcattattcattggattcacagacatgtaaaaaagcttacatcctcttgctttcagcttttctgccagttgattcatataggtaatgtatgcgttacagtaggacagatcatttgcaccaaggttaaatattacagctgcaggccgtttctctgaagcagggcagcgaacctccgcaaacaatctttgcactgcagtctgcttcagccagtataacccctgtcctcctcttgcgatcatggatacgcccttaggcacctttccaaaatcaaccagaaaggttttctccatgccccgtgttctggaatcccctacaaaaatcaccttacggtatttggacaggtttactttctccagctgattttctttcagatccggctccctgtttcttctgaacatcactgcataaagcttctgatttctattaatccgtatcctctgaccagtttcatattttggtgctttcgtctgccccggtttgtccgaccagcccataaacgtgcaggcagatgtattcttcatccctggcagggtaatataaccttccttatctacggatactgttttatatagtgtgccgttttttctgtaaaaagatactttgtttgtatttttgctgtctgaaactgctggcggaatatccttgatctgtatgccgttccctgaggaaactgctggtctgctgtatacagtctggggcatgcaaagacaaagcacacaaactgctgctgccgtttttttaacggccttgccccatcttccctttatccaatctgtaaactccctcatattaataatcagatgcctccctctccgggaaagtagagttcatacacctcacgggcagctctggtgataagactaagttcttcttccattttgatggacattgggagatgaatggctgtttcataaatatccttctggatcttctgctttgctttgtccttgctaatgcttacgatcccgcaaagagtggtattgtaggatctgtctgtctggcaaagatccacatacatctgtacaagatgacagcattctctgtacagaatctcctcatacagttctcctttatttctcagctgatcaaactgaaggcggcgtaaatgcttattgatctctttctgtgcacctttaaatccaaacagtttcttacctgcttctttattgaattccatgaccatccacagtgaaaggaaaccgtctgcacgattctccttgtctactttggatggctctgcataacggatctcccacagttccttacggatctgattctcctcgggacactctcctgctgcaatggactgttccagcagctcttttcttttcatggggtcatgttccttataatactgtgcaataataggtgtatccataaattcaatatcctcctggttttctctttctgttgttacgattggcggcaggtcactgttcctcataggtcagttctgtctctgccatattcagggcttcttcgattactttatccatatccatataacgatacatacccagacgtccgccaaacagtacatttttctcttctaaggctctgcgctcatatttgtcaaacagttcactgttcttcatgtcgttgataggataatagggctctttgcccttttcccatgctgccggatattctctggtgatcacagtcttaggctgtgtgccaaactcaaaatgcttatgttcaatgatcctggtataaggcacctgataatctgtgtaattcacaactgcattgccctggtaattgcccatatccagaacctcagtttcaaagcgaagtgaacggtactccagttccccatagcagtaatcataaaattcatcgatcattcctgtaaacaggatcttgtcagcctgtgcagacagctcctgacgattggcaaaaaagtccgttttcaggcacacctgcactccttccagaagtttcttaatgatcttggtatatccacccactggaattccctgataaggatctttaaagtaattgttatcataaatgtagcgaagcggcagacgtttgataataaatgcaggaagatccttacactctctgccccactgctttctggtatagccctctaccagtttttcgtatacatcctgtccaaccaaagcaagagcctgctcttcaaggttctttggatgggtgatatgcatacggctgatctgctcctggatctttgcctttgcctctgccggagtctttactccccacagctgatggaaggtgttcatgttaaagggcaggttgtaaagctcatccttgtagatagctaccggagaatttacaaaatgattaaaatctgcaaactggttcacgtattcccacacattcttctttgatgtatggaaaatatgggctccgtatctgtgtacctggatcccttctacttcttctgtataaatatttccgccaatatgatctcttttatcgatcacaagacaagttttccctttttgggccgcttcatgtgcaaacacagccccaaacaaacctgctccaacgatcagataatcatatttcttcatttaaaaagcccccttttgtaagtttgttatttacgaagatatacatttttaatataatgaagtgctttttcttccccatggtcactaaggatccgaagaagcgcttccagatctcttttggtctttggatgtacaaaccataatttatttttgcttttcagataatactgtaatggagcctgacaggtataagcatctcccatataggttctggatgcactgatcctgtccatcaccatctccgcaatatattttctgggcataggcgcacccatgatcacatgtgaatcatcaagggaataatctacccaatgctcataatgatgtttattccttcccttatggtgaagccatgctgtggaaactccggtggcctccctttctgcattgtttgggctacggtctccctgataatacctgcatcctacaagaaattccgcaggcgaatacttggaaagatcatgaagaaggccctgcttatatagtccgatacgaaagcaataacccattaccatcagtttatgctttgtgattgttttgaagtgaagccacggatgcatgttttacctcctgccctgcattttttgtatcacgtattttcttttttcttttgctgggaacaggaagccgttctccaagaagcactacaatgctccttggctggatctccacagacttggtatactccctggcattc

SEQ ID NO: 151 - DNA, 363 bp, Unknown
  gut microbiota DNA sequence
cagatccggtaatgccaaagaacgcttttcccagtagaaattatatccaatgtaaatattctcatcggctgtttgatctcctgcatatgcaccgcagtacagaatgcccagcatgcggctggtattctctgagctgcaaaaccaggcacgttcgccgtggaaggacatatctggaagccccattgccagataatctgactctcttagctgcgttgccccgtgaaggatgggatgctccattcgaaaacggatcagcttctttacaaacgtatggatcccctgatttctcttttggcctttccagtctacccagccaatgctgttatcctgacaataggcattgttatttccttcctgggaatt

SEQ ID NO: 152 - DNA, 159 bp, Unknown
  gut microbiota DNA sequence
gcttgaccaaaaagcaggatttcacgattccaaaggatgtcagcatgtatgtggttttgaaggtacaaaatactttcaggttattcctccttagctcagtcggtagagcatgcggctgttaaccgcagtgtcgttggttcgagtccaacagggggagtt

SEQ ID NO: 153 - DNA, 142 bp, Unknown
  gut microbiota DNA sequence
cacatacgattctcgaaaattcttttacactacgatcacttgacgaagcgaagctgagtttagtgagagtatggttcggtttttaaaaaccgaacttcattgtttgagtgaatgaactttaaaacagtaatgacgagagata

SEQ ID NO: 154 - DNA, 4479 bp, Unknown
  gut microbiota DNA sequence
atcgggaaaaaatcaataaaaatatatcagttcctgtttttcctagccttctttttagttcttctgtaaatttcctccataaaggccgtatcctctttcgtcagctcacggaaaccataattggcatcaagaaccagctgcttcattttctctgcctcatcagggtctgtaagaacaccggcctccaacagatactttgtgacctggccctctgtctccgtataatcctttggcataccggcacgtatcagcagctgataggtagatctgtacaatgcctgtactcttcctgctggaggcagtccgatgccaagcctgctcctccgcctttttctcagtctggtaaacaaaatcccacatgcagccagcaaaaggactgtagctcccgcaatcagtatctgatcaaagtgatctgacagccaggcaagtatgatggtgcctttgccctggtcctttgtatcctctgcagtagtgtcttcctctgacacagcagcctgatcctgtacatctgtatcagcctcttctgccacctctgcctccataccaggagtcacctccaccggcgtccagcccagaaatggctggtagatctccacccaggcatgggcattgctgtcttccagcacagctgtataattgccctccccatctgctgtgaaaatctcttttggagcagcatacccaaccacatacctggcaggtactccaagcatccggaacatcatagtggcggctgctgcaaaatgcatgctgtaaccttcctttgtatcgtataagaaggtttccacaaaatcctgcccctcaggaagcttatccacatccagctcataggaacactggctgaccagcctttttaccacatactggcggatctgctcatattcatctgcaatgtcccagtccggacgtacatctcccatgtccgactgaccccaatgctcttcttcttttttttcggcacattcctttttcagctgctccagcccctgatccggcacctgaaggtcgcgggtgctgcagtaagccctgtaggaagcctctgtctcattcagcacgccatctgtcttctcaccgtcacgatagccttccatggtctctttgtaggcatcccgccagtaaaaagaaaaaatatcatcctgggcagtctgtcctcccacataatcgtccccgccataaatctgataattgtcattcaggaaagcattgtatggcacatatgtatattgtgtattggcatttttattttccacagtgatctgggcggctgtcaccggctgatctgccgttgtttcataatacatcatccgcaaaaaaggcagattctgaatatataccgaaggcgccccctccgtcttccaggccagcacagtatcctgaaagctttctccgtcaccaggctcaaagctgctgcctgtataagtttctcctacaaagcctttcagataaacggtttcctccggcttctggctgcaggtcaccttcagtgcatccacacctgtgaaaaaatagccatccacagcgcctaatgtaccgttttccacacctccgcctacaccttcaatggacagattcaggtttccgccggagattttaggcaggatctgccataatgactggagtaaacggctttgtatccttgttcctgccctggacaactgggggatggaagtgccggacaaaggtcttgccatacaccaggcaggcacagacaccgccaatgcgatcaccacagctgctgccccacacttccatcccatcagatggcttcttgcagcagtaaaaatcagcaaaaggaccatcagaagcaaataaagccacacacttcccggccttccgccggctgctgcggtaagagcaaacacaggaaaaaacacagtcagcactggcaaccatttctgctcttttaccataaaggctcccaggatccctgtgatgataaaaatcagcaccatgaaaaacaaaacagtaccgccggaagcttccagggtattcagattgcctgcgtaaacctgattaatcttccggatcacactgttggcaacgctgtaaaagccacggatcagcgaatcctgccaaaagaagcagaagccccccaaaagcactaccagtccaagccctgccaaaaaccttttcccatccaatctctgatccagatagaaccaggtaaaaaacaggctgaaagcagccaatcctgcagccaacacccaaaagactgtggaaatggaaaatgcagaaatgactcctccaacaagagcaaagccagacagaaaaagtgccagaaaagaaaatagaaagttctttttacttgtattctttttctttctatcctgcacataagaagtatcaaacaccaagatttccatacatctgatctcccacatatatttctccggtagtcacgatccgtaccggcagaacatctttttcattctccggaaaagtcctttctttgccatcctctgtcttgaaataggggatcgtgagaagctccctcagtccatagtacaaggaatcaggatcttccaccataaacctttccatatgatcctctgtcatccagcaaaactcaaaggcaacctgatgttccacaaaataatagcccaaagaagcagccagatccaggaaccggtctttatccgctgctgtaaacttttccggatcctttacatgggtatccagaaaaaccggaacccgaagatccataggcatgctgaactccttgaccataagctcttctgcctttgcgcttagcttccagtggatatttttcatagcatcgccacgctggtagactcttgtatcaaaaatctcctgactgtcagagcctagccctgcaagcacattttcccgctgttcgccctgccctgccccggtttcaggctctttttcaagaacaatagggtggatcctgggaagcacagcaaaagccccctttaacaaaggagctgatattttcccataaaaaactcccagataatcatacagccgcaggtcacggatctgtactttcacaatcccacaatgcacaggctgtacctggaactgccactgatcccttccttttccgtcggcagccacatgcactgtttttttgctttcccggccttcattcacaggatcggacaatataaccccggcctgtatatctgaaaccggaaaaacggcaggattttgaatggtcagcactgcttttgcctgatcacccctgaatatgaaagcctgctccagttccagccctgtttttattttttttgctgtcagatgtgcccacactgccatagcaatggcaaacaggatctcaaaggacaaaagaaaccaggaaaatccgctgccattcataagcactgccagaaatgtaagtaggatcagcaaaaaatagaaaatctttctcttcatcagcctttctccggacggggctgcttcacagaggcaagaatctcctgggtgatctttgcggcagtcccatgattcatgccggctttggagcttgttttcaaacgatggatcgctgcagccggaaataccttcaccacatcttccggaagcacatactcccggccttccatgtaagcattggccttcgctaactttgtcactgcaagggcacctcgtgtactaagtcccagtgttaccagctcgtgtcttctggtggcatttacaagttctataatataagagcagatggtaggatgaacgaaaatccttgcggtggcttcctgcatctttttaagttctgccccatctgtaacagcgcggaccgcttccaagggacggatctccgattgagccatcaggatctccatttcatcctttggtgacggatatcccatctcaatacagatcataaaacggtccaactgggactctggaagcatctgggttccggcagagccaatggggttctctgtggcaatgaccacaaagggatccggtactttcctggtaacaccatctactgtaacggtgccttcctccatgacctccagaagagcggactgggtcttggctgaagtacggttgatctcatctgccagaaacaggttacacatcacagctcccggctgatacatgaatttatctttttcttttatgtacatggaaaatccggtaatatctgatggcagtacgtcaggtgtaaactgaacacgattctgcttaaggctcattgcctttgcaaaggccagggccatagaggtcttacctactcccggaatatcctcgatcagtacatggcctcctgccaaaatagcggtcattacctgccggatgcattcgtcctttcccagaattaccttgcctacttcctgcaagatcctgtctgcattggtatttttcaacgtattgttcctcccgttttgttctttttcgtaatacgattttttaatgattgatcataatgatacttgattttaaccgctgtttatttctgtttatgtctgtttatttctgtttatgtctgtttatgcctgtttatttctt

SEQ ID NO: 155 - DNA, 1067 bp, Unknown
  gut microbiota DNA sequence
ctgagtaggatcacaaggatcaggagcacctctgcggccactacccctgccatcataaacaggaaccagggccatacgtccacgatccgtcgtgccattgctgcaggcctgagctgggatacggttttgctgttttcttctcccgtatattctatcctgtgtccccgcaccagaagcctgtgactgttgatggcgtatggggtacatgtaaccagggtcacataatcctgcccttctacaatatccaggtctctggtatcatccggatccaccaccttgatctggtctacctgataagccaggatctcatccagtacgtgaatgtagaagggatctccttcttctactttgtccatatctgtaaaaagcttggcttccggcagtcctctgtgtccggtgagtacgctgtgagtgctttcgccgcccaatgggaaggaggtttccggaacatagcctaccccttttgcaaggacttcctgggaagttccgtagtaaatcggcagattcacatcgatcaccggtatggtcaggtagccgatcacgtctccgatctccatcatggtcgtatgtgtgctgccctctgtgtctgtgccatctgcggctgtattgccatcgtctccggcagcttctgcggcttcttttactgcttcgcttgtttcgtcctgaaccacagcgtgtcccagctgctggttgtattgtttcatggattcttttactgcatctattttttcttcgtccatatcctggatctgatcatcgtagtcctctatggcttctgatgcgtttttctgggcaaggatattgctgatgataggatatgcagtcaggccaaggcctgccaggatcaggatcaggctgaagatcgtgaccaatcttggttttttcatcgtattcaccgtccgtctcaggtttctgatggtttatcttttagatcttcgggtcagaaaaccttttgtatttgtttttgctttacacattttagattctaccacaagtcgcttgttactgccatgcaacatattcgtgaataatgttaaaaaacccatatatatcagctgggagatgac

SEQ ID NO: 156 - DNA, 9884 bp, Unknown
  gut microbiota DNA sequence
acttacaaaaaacacccaggaaaaaaactccctggatgctttttaaaatctttataaaaattttctcagatgcttttgaaagtcttacctgatctgtcagaaatccacgatctgattgatcttatggttaatattatagctgccgctgccgtatactccacgataccagcctgctgcatgggcttccggatcataataagctccgttaatgatcacccagcaatgacgggtcaaaccatctccggcaccgtctcttgtaccggaaacacggccggctaccaccttagggcgaaatccggcttcttttgcaagagctgcaaaagcacaggcataaccatagcagtttcctctgctggtagccagtgtatttaatgcacaccttctctgccatcctgccgcagtgcccggataccatccataataataaatgttatttaccacataattccagcaggcattcagtttctgataactggtcatgctgtcatttgtgatcctggacaagatcttcatggtctgcatcttcagctgggaattggtatcgtttactgcatagcctttcttcccaaaggtaattccgtcatatacacggttcttacacagtctgcccttaggatcacctctgtaaagacggttgttcagcacaaaccagcccacagtggcatgacccttgcggtccacatagtacaggttctgccctacctttacaacagatggcttcttagggcgcatcagcttaccttccagattaaatacatacacataccggcctcttttcatgctgtttgtcactgcatgacccttcgcattaaagaagtaacggttagagccaatattcacccaccggttccggatcttttttccttttttgtaatagcagtagtatctgccttcttttaaaagccccttctttactacaggtgtttcctgggaaacggtttcctggggagcttcttctgaagcataaacctggccggcaccaaggggcagaagaactgccccgcaaagtaccataaaacatctcttcaagcttctgtgaaaatcaatagttctcatatgtcacacttccgtcagaccaggtgatttcataatatccgtgcccgcttccatcgcagtcatcatatgcctgcctgcttacttctgttttctgagccggctgtgctgccgctgcggctgcctgctgttgtgctgcctgagctgctgccgctgcggctgcctgggctgctgctgcatctgcttcctgttttgcttttaccagtgcatctactgctgccttgtcctctgtcagatagctgtggaatacatagcctgtatcatccccattctctaccttgaaccatcccggaactgctgcaatcactttaaattcatcgccaagtgctgcaacctttaaggattcagactccttgtcagcctctttacgtacatgcacattggcagatacgtacatggtgataggctcatcaaaggtacgctcgtctgcagtctctgctgcttcctgatccttgccgctttcatccttataattgatgtacagaaattcataggaattcacaaggactgcatctttccatttgtctacagttacatcctggaaagtatgctctgtaccatcttcctctgtaagcacaagatccatctttgcttctttggaagcatctgcagtttcttcgctgttatctgcttctttgctgtcatctgctgcagcttctaccagctttgcttctttgatggtctgtgttgtctgattggttactgataactctcctccgtcaaaagcaatcgtaaaatcctctgcggttgcttctccatcactgtcctgtgcctccgcttcctgtgctgctgcgtcctcagcaaatacggctgccggtgcagaaacagcaaggaaagcagctgtcacaatacttaaaaatgctttcacgcttttcatcttcatgatttgttcctcctttagagccttatttttgcaggcttaatcctttaaagccctatgctgcaggctcaaatgtgtgactgtaaataatatgatatccctggtcatccttggtcacaacctccaggttgttttcgcccggagccagtgatgcagaataaagatacagacaaaagcctccatcatccagtgtgccgtcctccagcttcacatctacaggaaaagcttcatatacccctgcctgattgatccgcagataaatctgtgtatctgtatccagatattccggcttgatccttcctgtgatctgtaccatatttccaacggtcttggatgccagatcagtagctccgtcctcagcatcctggttcagcaggctttccggtacaaccgccggtccggccatcaccggtgctgacacagccatctcaggcaggaatctttctgcccgctccacaacaactgtatctgcccctgtagtatcaatatcactaagctgatatgggatacctcttgaaaaatatgcattggcataagcatctgccataaacggcagcagtgcatttccaaaagaatccctgtacatcaccagacttccggatttcacaggattgacagtagtgatcttaggatcaaaattgctgcccacctctcctacatacgcataagtggtctgacggtcataataaacctcatcctcaagctgaggcatggagggatacagcatagtatccagatccccttcaaagtctgtacgtacctgatatggctcctcatcccaggaatcatgctccttttcaagagtatccaaaagcaggtctgaagccatggcagctcctttattattccaatgggaatccctcttatgatacaaagtttcatcctgtgacaaaagcatatggtacagatctgcgtaatggacgccttcactggaaagccagggtaccagcctgtccagattcttctcatctgaaacctttaccttatcatagtaaggcatatgttcatcatacagcgaatttttatttggtgcaactgtaaaaagaaaatccacatttcttcctgccagatagttctgcatcatggaaagagtatgtgcaatattaaaaagacttctctcagaaagcgggtctgtgcccagataatcagaaagggaatccttataataaagccatccgtcagtaccctggatcacaccggacgcggtggatacgccaagaactttgccatttaccacagcattggctgtaaccagctcattacggaatgcaaaatgatcctggaagtagtctcctgcctgggaaagccagtcaaaattaatgcttccatcctctgtcttgaaggaaggaaattctgccagggtacggttctctgaagagctttcctggtgggtaaaaaacatgcccacagaaggaacaagacagattccaaaaaacagaatactgtataatattttacttttcttcatttgtcatgtcctcctagaaacggaaataaataaatggattataggtaccgccagcaagacttaaaatgcaaagaagaagtcctgcaaagctaagcagggaaacaagcacctcatagcccctgcatttcttcagggaagcatttacaggggtagctgcaataaccgcacacaccagtgttaccagataaaccggtgtcagctgctgaagtacaaggcttacagcggatgttgaaaaagaaaatcctgtaaacatctgcttaagccagaaaacgccctgtcccatagtttctgccctaaaaaatacaaatccgatgcacactaccagcagagcatatatatgctggaaaaagccttttaccttaccaccctttttcacaatggctggtacatactcttccagcataaggaacaagccgtgataaacaccccagaaaaggaagttgatggctgccccgtgccatataccggtagccagaaatacgatcatcttattgatcactgtcctggtgcggcccttacggttgccgccaaggggtatgtacaaatattccttgaaccatccggaaagagaaatatgccatcttcgccagaactctttaatgctgctgctgatataaggataattgaagttctctttgaaatgaaaaccaaacatccatccaagaccgatagccatatcactgtatccgctgaaatcaaaataaatctgcagcatataggaaatggcacctgcccatgctcccaggatattgatctgagacgctgcagccccgaaaaggttatctgccacaagtcccatggtattggcgatcagaacctttttacaaagacctgctgcaaacctgcggatccctgtaaaggttccctccagtgtctgagtccttgtatttacctcaacctctatgtcatggtattttactataggtcctgcgatcagctgcgggaaaaaggatacatagagaagtaccttgccaaaattcttctgtgcctttgtggtaccacggtatacatcgatcacataggacaatgcttggaaagtaaaaaatgaaataccgataggcatacgtatctgcggtactggaactgccgcacctgtaatagaattaaatgaactgattaaaaatcctgtgtatttgaaaatgataagaactgcaagattggcaagcacagctgccacgacccaaacctttttgtgacccggatcccgctctacaagccaggcaaacagataattaaaaaaggatgaccctataagaagcagtacataaaccggctctccatatgcatagaaaaggagactggcaataaccagtaacatgtttttggcccgcatccccggaagaaggagatgcagaccaaaggttaccggcaaaaaaatacacaaaaaaatcatagagctgaaaaccatattttagatctccacgttaatgtaatttgtcggtttgtattttttattcttcactgtagaaagcttaaccttggaccatttggtaccattgatcttctgcttggatgctacagctgctgcattggcatcgtaaacataccaggtgcgcccgatcttcacttcaacccatgcatgaggctgccagttggtcttcttaatgaagttgctggtaccaaagccgatacgtaccggatatccggttgctttctttgcacagaatgcaagagctgcagcataatgataacagcttcctcttctggatttcagcatctgctttgcaaaattaatctcccatttcttagttgtggcaggcttgaatccaaggggtgctctgccatatttaagctttgatacataagtaaacactctgttaagtgctactgtcttggatgtggaagatgtgatcttacggttcttcattaccttggcaactgcagtctgaagctgcttgtcagccttggatgtacgggtcgcagcagatacaggtaccagtgttccaaacaccatgcacagtaccagaaccaatactgcaagtttcttgctgaactttttcatgttcatttccctcctgaaaatttagttatcgattacagaatgcctggcataaagcaataaacagcaaaccatggcatatcttttatgaattatagcacagggttttctcaaagtctatactggttgcaaatttattgtgtactatattactcttgtatttaatcacctgtttctgtatcatatgtataaaaaatgctgaaaaggaaacccttagaaataaatcttatgaatagtaatatttgtaactgtcacctgcttattacagtcagattctttcaggctgctcgacttgaatttttcaggaggtatatgcatgctagtgtttctttttctattctttctgctgcagtccctggttctgtgctgctgccttgcagccggcaatgacctagattcccagcttctgtcagacagagaacaaatggaatttctgtctgcatgggcaaaaaaacacgccccccgctaggggcgtgccacacagagaaaagcctttatataataatgcagacaattccgcctttgctgtcgttgacgatcttctgcatggtgtcctgcagctttaactgactttcctgactgatagaagaaatcttactgcgaataccatcctgcaccagctgttcaatggatttgccgaatatatttgtttcccagatcccatcttcaccggatgcattatcgccaatataggtgatcagatcctttgcctgctgctcagttcctacgatgggggcgatctcggtttcgatctctgcccggatcatatggatggatgggcttttagacctgatctttaccccgtatttgtttccctgacggatcacagccggttcttccagacggatttctgaaagctgaggcactaccaccccgtagccgcagctgcgtactgattccagtgcttcttttacttttacatattcttccctcatgccggaaagctctttcatggtattaaccaaatcatactggctttccaggggaaccttgcaaagctcacttaacatctgatagtaatatttatcatccacatctacccgtatagatacctttccgttggaaaggctgcattcttccagaaatgtatctcttacataaggcccatccagatgaatgcctccacacagatcacggatatgggtcatctttttcatcaactcccggatctgtgccagaatctggctttttaccggatgatctaatggcagcatttcaacccatttggggataaaaaaactcacctcactaactggaaattcatacagtatcttttccagtattctggtaatgtcttctttccgcagctgttcacaattggcaggcacaacgactgtctgatacttttccttaagatcttttgcaagccttatggtttcttctttatatggcatctgggaattcaggatcactaggaaaggtttcccctgatttttcaattctttaacggcagcttcctctgcttcccggaagttttcccttgggatctccccaaagcttccgtcagcagtgaccacaagtccaatggtagaatgctgctggatcacctttctggtaccctcttctgctgcctcatggaagggaatcggcttggggaaccatggtgtttttaccatccgctctttaccgtcctcaatatggccggaagcatcttttaccagaaatcctacacagtcgatcagccgtacccttaccttctgatctccttccagtgtaacttccactgcgtcctttggaataaatttaggctccacagtggtgatcattttacctattccgcttaatggcagctgatcccgtacttctgcctgctttttttcctccattccaggaagtgccaccagttccataaaccttcgtataaatgtggattttccagtgcggacaggtcctacaacccctatgtatatatctccgccggtcctggcctggatatcccggtacacctgaaaattttccatagaaaaagcccccttgcacaaatcattcacacacagtcccatgtactgttataatgccgggggcaaatgcccccaacgataacacctgcagattgctttgtactatccgcttccacaatcctggtatcttgttacatatttatgcaaaaaggcttcaatctattcttttattttgtttttctcattgctgcttctacaacatgtcctacaagtacagaagtagtcacgcttccaactccgccaggaaccggtgtgatggcatctacgattggctcaacagccgggtagtcaacgtctccgcaaagctttccttctgcatttacgttaatacctacatcaataatggtctgaccttctcgtacatactcagcgccaacaacacctgcacggcctgctgcaacgataatgatatctgcttctcttgccacagacggcatatctacggttcttgtatgacaaatggtaaccgttgcatttttctttacaagcatcatagctgccggttttccaacaacaaggcttcttccgatcacaactgctttcttgcctgtgcagtcaataccataatgatccaggatctccatgcatgcctgtggtgtacatggcgggaagccaagcttcttgcctgtaaatacacctgacatggaaagatctgtcatacagtcaacatctttctccggtgcaagtgcgttctcgatcactgcctgatccagatgctttggaagaggacggaataacagaacgccatgaatcttgtcatttttgtttacatcatcgatcactttcagcaattcttcctgagccacatcctccggaagaaggatcttctcacatgcaactccaagagtttcacacctttttgttgcgcctctctcgtaggaaatatcacttggattctcacctacacggataatgcacagagtaggatttacaccttttgcctgaagagctgccacatctgctttaatacgctcatttaatgcagcagttacttctttacctaataactgtttagccattttgattatctccttgtattatataaataattataaattatttcagtctggcaagcacactgtcaaaagtctcatctgcaagctttgtatatttctcaagcattgcatcggcttttgcgttcagctcttctgcatatgcacggtcagccatggattttgtattgatatacacattcaggcttgccccttttaaagctgccttgcagaaggtagctgcaacaccagcatcactgatcgccagcttggaaccttttgctgcaaactctttgatcagatccagtgcctcacagcatttttccatgatctccataggtacagaacaggcatcctttaatacgatggccataactcttgctttctcagccttttcttcttctgtttctttgggcatgccatatgcttttgataatggctcaaaaacctctgcatcacgctcgatcagacgaaggaaatccttctgaagctgatcgcatttccctttcagctcccacatttcctcttctacatctgcatatttcttcttgcctacagtaagactgcccaccatgttgccaagagctgtaccaacagctcccacaagggctgatgctccgccgccgcctggaaccggagccttggaagctaatacttccacgaattcagtacatgtactggttgaaaaacccatctttttgttctcctttgcctttaaaatattcccaaattatttcattttgaccttagaataatccggtgatctttcctgtctcgtctacatcgatcttctcagcagccggtaccttgggaagtcctggcatggtcatgatctcgccggtaagtgctacgatgaagccggcacctgcagaaatcttcaggttacgtactgttacctcaaagtctgtaggagcgccaagcttggtctggtcatctgtcaggctgtactgtgtcttagctacacagatggggcagttgccaaagccaagagcctctaactgttttgcctgtttctgggcatttgctgtaagaacaactctcttaccgccatagatcttctgaacgatctggttcagcttgtcttcaatggagccttccagctcataggaatatgtgaagtcgtttggctcatcacacagacgtactacttcctcagccagcttcagaccgccttcgccgccttttgcccatacttcggaaagtgctacgtttaccccaagctctttacattttgtttctaccaggtcaagttctgccttggtatctgttgggaatgcgttgatagctactacgcatggcagtttgtatacgttgcggatattgcttacatgcttcagaaggtttgggagacctttctccagagcttccaggttctcattgttcaggtcagcctttggaacgccgccattatatttcagtgcacgtacagtagctacgatcactactgcgtttggcttcagtcctgccatacggcatttgatatccaggaatttctctgcaccaaggtcagcaccaaaaccagcctctgtga

SEQ ID NO: 157 - DNA, 212 bp, Unknown
  gut microbiota DNA sequence
tcatgccggatcatatccacatgcttgtggattgtcggccgcagttttatatttcagatatgatcaagatcatgaaagggaatcttgcgcgtcagatgttccttttacatccggaactgaaaaaagaactgtggggaggacatttgtggaatccgtcttattgtgccgtcacagtcagtgaccggagccgtgagcaggtatctgcctatatc

SEQ ID NO: 158 - DNA, 539 bp, Unknown
  gut microbiota DNA sequence
aaaagaccggcatggcatggttcccactggtaagtttcggccttccggacagcactccggactctttccactgccccagccgggtctcatacgaagatacacttccaagcgcatgctggattgcggacctgcggaggtaagacggcatcttcggaaaacgaagatcaaaatcaaaccgggctgtgtttttcttcgtcatgtgtaccatatgctctgcagtattaaaacgcttttttgtctccgggatcttcctcagttcttcccagatctgtgcgtagatctctgtcaggtaactgactgcctggcgatagacctccattgtctgacggaccgggatattctgttttcgtatctccacaccatagctggatactgtccgcatcttcttccacctttcccgtaaaaacaaacaattctggaatgacccctgtactcagagctttctcttttctttttccttctggccttcgatataggcagatacctgctcacggctccggtcactgactgtgacggcacaataagacggattccacaaa

SEQ ID NO: 159 - DNA, 2931 bp, Unknown
  gut microbiota DNA sequence
actacataacgtatagctagtatccagttttcatttattgtggtgagattttctcatgattgtctgtcgggaaatagacagttctaagagagggagggtgtgactcataccaagtcacaccctcccaaaattatggactttagtctgttgagtccattggagtttttcgttgatccgaaaaatgtagatggatgaaacaataaaccacccgctattgtgacagaggcgctttttcgttttccggcactttcgttattacctgggcatagaccagcccatgagtagaggtgttccgcagttttaaatggctccatatcaataccgatttcagcaataattgcacaggaagcagttgtgcttatcccatagatgctattcaactgctcaacttataaagtaaatggagccatatcttcctcgagattcgtttcgacttcggtaagatgctcttttagagaattgtaatgagtcatgagaatttttaaaaatgtcttttggtgttctgacaacgttccgttcacagacatgagaatttcaccaatacggtttctggtcttggttttgagacaagaatctaaagtggctttatcaatctgcccatgttccattaaatgcagaatgatgtttctacccgaagcaccaaaaatctcagaaataaaggatgacagacggaagccggaactttgtaagaatttctcaatcctgttcttctgtgatgtaatattgcggataacgctcttacggtaacgatttagatcgcaaaattcccgaattcttttttcgggaataaaacttccgttcagaagtccggcgcgaagcaaggtagaaatccattcggaatcccgcatatcggtctttttgccagaaacatttttcatatggcgtgcatttacaacgagcagggtaatatcaccagagaaagcatcttccagtatttcataaatcggcatccaatagataccggtgctttccatagctacatgatgacagttttgagaaacgatccaatctcgtaatgctatcatatctggaattaatgtagtaaactcacgaatttcagaacgggttggcttgcccagaggaccagtcaggatacatgcaacaattttttctttgtggacatccagaccacggatctttatgtaagtttcgtcagcagtgaagacattatttttctcgtaaggatactggtcaacgaatggcttgatacagatcgcagcgattttacagtagttggcaatctgctgatgggaaatgctgatgttatacaggtcttttaaagcctgtgatgtctttcgcagggaaagtcccagattgacgtgcagcgtcaggcataaggacatgacatgggcattgtgcttattgaatttaagtgaagaagcattttcaggcagggtatttaaatccatgctgaaaaaatccatcgtgaactcacggcagatatagtgaagcttatatttgtttttgccataatcctctgcgaggtctgctttgtcaacttttttgagattgtggaggtaatacggacatttgggattaacgcacttatggacaatgaagtgttttctgtcctttttaggaaccaggctattgccacagtgagggcattgcaactttacggaagaaaacctgctttcatcgggtgagaacctggtatcacagattttgcacatgagctgtcctttgaaaccattattcttgtagaggaacggttttggtgcatcacaacgtgggcaggtacaggagtcaggggtgtcacactctgaacgtcgactgatcgggcggatcttcttgctataatgtttttcgtagtaaggaatgagttctttgtaagtccagtcctgacggaagtccgtaatcagagggagttcatcaattttgaacttttggtactttggggagtgggaatcatcaaaagcccactgcttgaggggaatatatctgcaaataaaatttaaaagccagcagatttgtttatgttggtattgaataagttggatcaaatacattataatgtccataggtgattacctttctatacggataattgtgttgtggtgattcaattatactggttaattagggggtaattacttttttgtataaaaatgtgagaattccttgaaaatataaggtttataaaaataaaaaaggtagttgacttgacactacctagctgacatggaggaatgatagatggtaaaaccgataatgaaagatgtgttttttttaggacaaaagtcagaacctgctacaaaggcagatctgcaagtgggaaaggatctacaggataccctacaggcaaatcgtgccgggtgtgtgggtatggctgcaaatatgattggtgtgaaaaagagagcaatcattgtaaatatgggattcgtagatgttgtgatgtttaatccggttcttctgagcaaggatactccatatgaaacagaagaaggatgtctatcgcttaccggtgtgaggaaaacaacacgatatgaaaatatcgaagtggaatattatgatatgaattggaaaaagcagcggcagaaactgagtggatggccggcacaaatttgtcagcatgaactggatcatctggaaggcattttaatttaagttttttgaaattacgggggtgatcgattatggcatcggaacgaaccgatgaattatacaagcttttactgggcagaggatatcctaaagagttctgtgcggaaattgcctataaaaatatgaatacagattacactgccacccggatgcttggctatttgtaccgggtaagtgatccccgaatggaggatctggtggatgagatgcttgcaatcttaagtgacagagatgcaattattcagaaaaaagaaatggaacatgcccaggctgtgatcaatgagatttacagaaatggattgtaaaaaagtttagtaattatggtat

SEQ ID NO: 160 - DNA, 805 bp, Unknown
  gut microbiota DNA sequence
cgaggatctggtggatgagatgcttgcaatcttaagtgacagagatgcaattattcagaaaaaagaaattgaacatgcccaggctgtgatcaatgagatttacagaaatggattgtaaaaaagtttagtaattatggtataagaaaaatgattcgaagatttgaaacaagagatctgaatgagataatggacttatggcttcatgcaaatatagagagccattcttttatagaagcagattattggaaaaagaattatgatatggtcagaaaattgatttctgaagcagaaatgtatgtggcagaagaaaatgaggagattcaaggctttattggtttaatagatacttatatagccgggatctttgtaaaggcaaaagaacaatcaaaaggaatcggaacagagctgcttcgcaccgttacgaagctaaaggatcaattgaatcttaacgtgtataagaaaaatatgagagcggtagtgttctatcagcatcgtggatttaaaattgtgaatcagaaaatagatgaaaatacatcagaagaagaatatacgatggaatggcatcgttaggcgggggtaaaaatgaagacagtaattgtttatgcgtctgtacatcacggaaatacaaagaaactggtggagaaaattgcagaggaatgtaaggttgatctgattgatgccgtgcagcagccaaaggcagatttggcggattatgaccagattggttttgcatccggtatttatttttcaaaatttcatcagacaatcttaaagtttgcttcagaaaatctgccggaaaataaaa

SEQ ID NO: 161 - DNA, 417 bp, Unknown
  gut microbiota DNA sequence
tagaggaatgtaaggttgatctgattgatgccgtgcagcagccaaaggcagatttggcggattatgaccggattggttttgcatctggtatttatttttcaaaatttcatcagacaatcttaaagtttgcttcagaaaatctgccggaaaataaaaaggtatttatgatctgtacttatggtggaaatgcagcatataaatcactggaagttattttgaaagaaaagaaaacggacattattggaaaatttggctgtaaaggatatgacacttttggaccgtttaaattggtgggtggtattgcaaaaggtcgtccggatgaaaaagatctggaagcagcggtctccttcgtggctggattgcagtgatcaggacgataagaaaatcaggatttgcggaggataatattcacagaat

SEQ ID NO: 162 - DNA, 14644 bp, Unknown
  gut microbiota DNA sequence
atccggatgaaaaagatctggaagcagcggtctctttcgtggctggattgcagtgatcaggacgataagaaaatcaggatttgcggaggataatattcacagaatgaaaggaaaaaaatatggaattaaaattttgtgcaagaattcttcaaaatgagaatatggatgctgcctatgtagaggttccttacgatataatggtatcgtaatttaagacacttcaagagacatttcttaatgaatctgatatactgtaaacactacagaaagaaggattattattatgtcttgaacaagaagaaatttctccgccaaattcaattccaatttataagaatgacaatattgtggcatcgggggttcagatggaggcatattcgatagaagattcaggtgaaggaatttgttttaattgatattgctataatgttcaaccaggagttcgcattaactatatgaatggaaaaagtgagatttctgatgtgacatttgaaaaagataatgtccttccatttgtaacatataacccaagtgaacagaatccagatttaatctatgaaatgaaaaagcacttgaagattttatttgatgaccctgatacaaaaatgacatatgattctatgattagccagattgatgcaatcgcaacagatgcaagaaaggtagtaacaaacgatgaaaatcctgccaaatgttaccttgaaacaaagaaactagaatatgaatattttgaagtgttgaaaacgtatgttccaatgatgctagaaaaactggaatttttcaaatcggcattccaataaaaaaatggttgatggcaaaagtgctgtcagccattttttatgaccagtcaaaaaagaagcaactaattagctctttcttttatgaaccgaatacgatcgagcatctgtaaaatagaatatcggacagtttggaaagaccaaccggaaacggctggtctttttgtcttttcagaggaaataggatgtcgttttaacggtatcagaaaatgtcataaccattctataataaggacatagaagggaggatgacgaaattcatgaaagaaaaattatggacttatcagtatacggtgcttgtattagccaatacactcaacagtttcggattttatatgattacgacaatcttatctacgtatcttacagaggcgggaattaccctgtcagcagcaggggtgattgtaggaatgttttcggtgacatccttggtgattcgacccttctgcggaattctgtcagacagggcaaataaaataaagctacttcttatttcatttcttctggccagtatgggaaccatcggttattctattatccctcgcataggaccgattgttgtattccgtattctgcatggtataggttttggtatttcaagtacagtgcttataacaatagctgtgcattttgtaccggagaaacgtatgggggaaggaatcggatatcttggaattagtcaggtgatagcttcggctgtggctccaggattgggtatcgccgtagcggggattactgggtataagccagtgttctggattgccgggggatttgtattggctgcagttttgatgatatacatctgccggagcgggctgggagaggaaaaatcagggaaagtaatcaaagaaaagcgtgacaaacaatctttttgtttacgggatatcatagcggtggaggcccttggatatacgttgatctccggtgtttattcctttaccaatggggtaatcacagcttttatcctcctgtttgcacaggaaaaaggcattaccggcataagtatttattttactgtatgcgccgcagtgctttttatctcaaaacctgcatcgggaaagctggtggacaggaaaggactggcagtggctgtctgtcctgcatctgatcgatgaattggaaaaatgtggcacgcagatgtatggtctgatgattctgcggcacggaaaggtggcggccgagggatggtggagtccttttgctcctggcatccgccatggatgtcagtcattgacaaaaacatacacatctaccgctataggacttttatatgacgaaggattagtatcacttgatgagaaggtcgcggacatttttccggaatatctgcctgaaaatgtacaggagggaatacgtagaatcactgtgagaaatgcattgtgtatgagttgcggaatgtatcggatgccggatatatcttcgcctgcctggttgaaagaatattttaatatagaaataaaaaaggaaccgggcaatgggtttttctacagttccgcaacatcatctatgctggcggcaattgtccggaaaaagacgggattatctttactggagtatctgaaaccaaggctgttcgataagattgggattgatgcggacaatctgcggattttgtccatgccagacgggctggataatggtggaggcggtatgttcaccactacagaggataatgcccggctgatgcagctttatctgaataaaggcgtctgggaggatgaaagggttctctcagaagaatggattaatatggcaacctcttatcagaactccacagaagaagaccagggtattcatgattgtcatctgggctatggatttcagatgtggatgtgcagacccaaaggagtatttcatgcggacggagcctacggacagtattctattgtttttccggaacaggatatggttatatctattaatgaaacggcagaactgggagtatggccgcagaaagtgcttgatataatttgggatgaatttatgccccgggttccgttaaaagaagtgggcagtattcaggaaaatcctgagatgcaggaaaaactgcggatcaggcttgttggacttaaggctgatcatgccgtatatgcgccaattccggaatgggccaaaaaggcggaacgggtgtcatacatgcttgaggagaatcagataagcattgttccaggtgtttatcatcaacttacaggtgtaaaaaaaggaaagacggatgtgataattggaatattgaaaatgaaaatccagcgataaagaaagtttattaagcataatgtagacggtgtgctataattactgatagtagacatcagaaagaagggacaaaatatgcaaatcagtttattactaatggaagaaatcgcaaagctttttgcaatcatgcttatgggatatgcggttgtaaaagctggacttatgaagtcatcggacagtaaaagcatatctgtagtcatggtttacctggttattccatgcgtgattatcgacgcatttcaggtggactatacgccagatgtacaaaaaggactgttcctggcatgtgcagcagcagttcttgtacatattttatttctggtacttaccgcaatattaaaacaagtattgcggctggatacgattgagcgtgctactgttatttattcaaatgctggtatactggtaattccgcttgtacagaatctacttggacaggaatacgttatctactccagtgcttatatcgcagtacagttaattctgatttggacacactgcaaaaatatgctttgtgaagaagatagattagaatggaaaaaagtatttctgaacgtaaatattatttcaattatagtaggagtgatattgtttatctgcaaaatccagttgccttcaggcgtgcaggatgtcatggatatgatgaacaatatgattggtccgatcggtatgctgcttgccggaatggttattgcggatgtacctcttaagaatgtatttactaagaaaagaaactatgtttcgacagtattgagattgattgtttatccagtatttgtattgattttaatgaagctgatttatacatttgcgagactaaatgattccaaacagattctcctgactgtgtatattgcatccataacccctgcctgtgcaaccgtaacatccatggcgcaactatatgataaagatgcggcatatgcgagctcattgtatgtacttacgacactgctgtcaattgtgaccatgccagtgatggtgggaatgtatgagatgtttgtgtgagagaatagaaagattgaagaaatgacagaagagacactgactgcggttggtgttttttttcgttcactttacggaaaaaatggcaattgcctgcctttaatcagcaattaaaggagccatagaaccggttggttgtcgggatttttgcacagccatttattgtaagatgataacatcaaaaaagaagaaaaaatccaaggaggactggcaaatgaaaggttatgacacaagcaacggatatatggggtatgtagaaggcaaatacattttatttgccagtgaacaggaatatttcgagtttatggaagattaagtggaggaaggacaatgagtaagatttatttcacactgacaggaacaaatcattatttcggaaaagaatttctgaaaaaaggaacgaagatctgcttagaaaaagaaccagacaatgagtatgacaaggaagcaattaaagtaacttatgaaggtctgggaaaaattggatatgtagcaaatagttcctataccgtgatcggcgattccatgagtgctggacgtttgtatgacaagattggaaagaagacaaaagcaaaagtggtgttggttacagatcacggaacaatctgtagcatcagcaagaagagccttctggagaatcagaagaagattaagaaatctgaaacagaaattgaagaataaagaaatctgagggaggaaaaatgtatctttcaagttttaaatttgcggatgagttaattgaagagttatttttaaatggcataatgcgtacctgctatcagtcattctatccatttggagtattgtcggcgcaccatttagaaaggctcgattttgagccagtaacaatactgtatggaggtaatggaagtggtaaatcaacggctctcaatattatatgtgagaagcttgggctgcaaagagacacgctctataacaggtcgaatttctatgaggactatcttcagatgtgtgattatgagattgaatctacaattccaaaagagagcaggatgattgccagtgacgatgtatttgactttatgctgaatcttcgttgcataaacaatggaatcgatgataaaagagaggaactgtttgaggactacctgaatatgaaatatagcaagttcacgatgaaatcactggatgattatgaaactctgaagaaggtaaatcttgccaaaagcaagacgcagtctgaatatataaggcggaatttgatgggaaatgtgccagaacacagcaatggtgagagtgcatttatatattttagcaataagattaaggagaatgcgctgtacctccttgatgagccagagaacagcttaagctcacaaaagcagctggagcttcaaaaatttttgcaggacagcgccagattttttggctgtcagtttattatagctacacattcgcctttccttctgtcaatgaggggcgcaaaaatatatgacttagacgaagagagatttgatgtcaagaaatggacggagttggggaatgtgagggcatattatgatttttttatggaacataggagggagtttgaaccataaactttttagagagttaagaagatgattagaaggagacaaaatgtcccagaacaccatttttaataaagatttttttacactggaaaatgattgggcaatcagaaaattaaatatctttattcaaatcaaatcaagattagatagtcagaaacgtgcggcacaaaaaggtgatataatatccagagacacaacaagagaatgtcgcctgatatgcgactttaaagacagaaaaaagtagtatgcttgtatggaacaagatgttaatgaaggaggatggcatttctttcttcagacggaaacgtatacgatgagtatcttgtgaaaaattccaatgaagaagaaagatataactgggtgaaatttattaatggagagcatatacaggaaaaagagggaccatttaaagattatattgatggaacgtgtgaaataaacgagtgttttgaaaaacttgataaagaatttgatgataaaaaagagatagctttgtcacgtccaaagaaaagacgggaaaacgaaatggttcaaatatatagaaatatccaaaatgttgttcaaataatgaaggatcatgataaatatagtgaccagtttctaaaccgatataaaacagatttagacaatattatttctaaattggaaccaaaatcttttcttgaaaaaattctgttactatattgcaatgaaatagaaggggcttgggataataaaaattttgataagatttgtaaacttagcgaggaatccactgcattacgtaattatgtttggaatcggattccagagtaaaagtaatagttgtgaattgccagggttcttaaaattggtagaaaaaggtgatttatgagcagaagaaataattcatatgtaaaaggcggtacagatatggcagatcagaagctgattgatgaggtaggaaaatacataaataaatattatgagccggtaaaggacgatatcaaaatggataaggaaatgaaatctatttttgataaaattacaaaatttcggaagaagagagctgaagaaaaggttttgcaggaggagccgttagaagaaagcagtttggcagaagatcagagtcagatttgattgtatttgatactgtagaaagttatccaaaagcaggtgtaggatatttgatgggcaaagaatcgaataatattataaggttaattaatgtagcaatcacacatgcaaaaggaaaactgattacagtcgcaaatgataaattttggagcaatctttataaaggtacagatcatgtgttttacaaattattaagttatattaaagaagggcataaagtggtggcgcaaagtaataaaacattattgtcatatatagaagagataaatccgggaagtatgatgcaaatatacacaaatgaagatgctgctatttttatgttagaaaaatgatctagaaaaatccaaaggaagagtcatagtatcattaccaagtagtaatttaagagaaacacaaggtcaaattattcaagcacttgattatgcacataatcgtggagttgatatctggatgaaatccaatgaatatagtggactgcctgatacatggaaaatgtattgtgtggaaactgaaaatgctacattcccactgatagtgattgatgataaaatagtctggtatggtttgccaactgctacgtggatctttaaggtggataagtcctcttctttattgacagttttacatgctatggtcagaatcaaagggagaaatacggttgaaatgatcaaggcactaacagaattagatgttattcaggttggagttaataaaagaccattgtcagataaagaaagcagcttaagaagcaatagaacagagggaaagtcaagcagatccattggaaaggatctgcaggatacgctgcaggcgaacagagaacgttgtgttggtatggcggcgaatatacgcggtagcaacgagccaaacagacatgcttgcatggatatttggcgactgccgcgactgagtgcgtagcacgaagtgattggtgtaaagaagaatatcatcattgtgaatatgggattcatagatgtagtgatgttcaatccggtgattgtttcaaagcatgatatgtatgagacagaagaaggctgtctgttcctggatggtgttcgtaagacaaccagataccaggaaattgaagtagaatattatgacttcaactggaaaaaacagcgccagaaattgtcaggatggacagcacagatttgccagcatgaaattgatcatttgtctggaaagattatttaacaagaaaagtgattttatagattggatgatacttacttatattggtttgcttgatgccacaaaggattagaaagttgtcttaaatgagaaaggaaattatgaacactacaattaattattacaacctaaatgcaaaaaatttcatagaaaacactcagaatgcagatatgcatctggcacaagaggcgtttctccaactattgcctgggagtgcgtcaattcttgattttggttgtggttccggtcgtgatacaaaatatttccttgagaaggggtaccaggtggcggcaactgacggatccgcagaactctgtcgattggcaggtagctttacagggattaaagtaaagaaaatgctatttcaggaattgaatgaaattggagtgtatgatggcatctgggcatgttcctctattttgcatttgccaaagcaggaacttcttcccgtaatccaaaaaatgtgtattgcacttaaagataacggggtgatttatacgtccttcaaatatagtaattttgaaggggaacgaaatggtcgttattttactgattttatggaagatacatttcgggaatttatcaaggtgataccggaacttacggtagaagatcagtggattacgttggatgtgcgtccgggaagaggagaagaaaaatggctcaatttaattttgcggaaaaatcagaaatagaggaactccatatagaaccaacagatgttatgaccggagacagaaacaaaagcagatatttgctgtatcagttaaagcttagcatggcacgggcaaaacagattgatattattgtctcattcctcatggaatcaggtgtaagaatgctgctctcagacttaaaagcagctttgcagcgtggtgttcggattcgcattcttactggcaattacttaggaattacgcagccttcagcactatatctccttaaaaaggaattgggcgataaggtagaattgcgtttttatagtgataaagggcgttctttccatcccaagtcatacatatttcattatgacaacatgagtgagatttatattggttcatccaatatttccagaagtgcattaacatctggaattgaatggaattatcgttttaataataatcaggatagtcagaattttaatttgttttatgaaacgtttgaggatttatttaaaaatcattcctacgtgattgatgatgcagaattgaaagcgtattcaaagaactggcataaacctgcggttgcaaaagatcttgcacgatatgaccaggttgatccgaatacaaaagttgaaatgttgtttcagccaagaggggcacagatcgaagcactttgtgcactggagaatagcagagcagagggcgctgtgcgtggtttggttcacgctgcaacaggtgtgggaaaaacatatttggctgcatttgattctgcaaagtatgagagagtcttgtttgttgcacatagagaagaaatcctgaagcaggcagcagtatcttttaagaatgtacgtcattcagatgattatggcttttttgacggaaagcaaaaggatactggaaaatctgtgatttttgcttctgtggcaacgcttggcagaagcgaatatttaacagaggagtattttgctccagattactttacttatttggtgattgatgagtttcatcatgctgttacagaccagtatcagagaattgtgaattatttcaagccacagtttatgctaggacttactgccactccggaaagaatggatggaaagtctatttatgaaatttgcgattataatgttccatatgagattacgttgaaggaagcaatcaataaaggggcattagttccattccattattatggtatttacgatgaaacggattattcgacactcaaattggtaaaaggaagatacaatgagaatgacttgaatgataaatatatcggcaatgtaaaacgatatgatttgatttataaatattataaaaaatatcgttccaaacgtgccctgggtttctgtagttcaagaatgcatgccgaggaaatggcaaaggaattctgtaagcaaggtgtaaaatctgtagctgtatatagtaatgctgacggagaattttcagaagaaagaaatcaggcaattgagcaattaaagaatcaggagataaaggttattttctctgtagatatgttcaatgaaggtgtggatattgcttctcttgatatggttatgtttctgagaccgacggaatcccctacggtgtttttacaacagttaggtcgtggtttgcgtataagcaagggaaaagaatatgtaaatgtacttgattttattggaaattacgagaaggcagggcgtgcaccgtttttattgaacggtggtgcttgtgtcggagaaagaacagcatatgactattctgaaattgaataccccgatgattgtatcgtggattttgatatgcgtttgattgatctcttcagagaaatggacaaaaagtcattgtctattcaggaaagaattaaacaggaatattatcgcgtgaaagaattgcttgatggaaaagttcccacacgtatggaactttttacgaatatggatgataatatttacgaatactgtatgaaacattcgaaagaaaatccgtttaaacgatatatggattttttatatgaaattcatgaattatcggcggaagaacttcaggtttactctggaattggaagagagtttctgcagttgattgaaacaacggatatgcagaaagtgtataagatgccgattctgtacagcttctataacgagggagacgtacggctggctgttacagatgatgaggtagtggagaactggaaaaagttctttgatcgaggaacgaattggaaggattttccaaaagtaacttcatacgaagagtatcggaagataacagacaaacagcatttaagcaaggcaaaaagtatgccgattaaatttctaaaagcttcaggtaaaggattttttatagataaggatggctatgcactgggaatacgagatgaattggcagatgtaattaaagttgatgcatttaagaagcagatgaaagatattattgagtatcgtacgatggaatattatcggagaaggtatgtagaaaactgattcttaatattatctccagaggaattgagctatgatgtacacagtaaaacgaatcgatgaagacctgaattttggttgtgaagaacgaccggatgatgcaccagtcatggcaatagtgactcttgtggattcttcaggaaaagaagtgacagtaaaagcggaggacgccaggctctatgagcgtaatatcaatgaaggagacaaagtttgtttcgatgtaaataataaattggaaaaagtagaatgaaagctacagggagaaaaaatggtaaagcaaattgtaagagatgttttctttttaggccagccatccgaaccagccacgaaagctgacatccaggttggaaaaaacagtgccagaaattgtcaggatggacagcacagatctgccagcatgaaattgatcatttgtctggaaagattatttaaccgcatgcggattgcgaatattcgcttgactcaaagcggattgtgaggtgacggatatgctgaaaagcgtactgatcgtggtggatgatatagaaaaatccatagagttttataaagacttatttggactgcaagtgattcttaagaatgaagggaatgtgatcttatcggagggacttgttttgcaggatgtcgacgtatgggggaaaacattgaatgaaacttctgctccattcaataacaggatggaactgtattttgaggaatttgatatagatggattgcttgcaaaatatgaatcaagtaagtatttcgtccgatatgccacagaattaacagaacttgcaggtggacagaagcttgtaagactgtatgatcccagtggtaatcttattgaggttcgcactccattcaggtgcaattaaaggagagaacatgcagatttttgttgatgcagatgccgtggattataaactgatcagcatttgccataggggtgatattgttgtatcacaggattatggagttgcggcaatgacacttggaaagggctcacaaggtccagtggaccttggatttgagccgaccgaagcggagcgtagaccatatgcgattcatcaatccgggaaacggtatacgaatgaaaatattgaccagatgcttatggaacggcatctgaataagaaggtacgaagggcatccggaaagaaacatttaaaaggacctagaaaacgaacatcggaggatgatgagcatttcagagaatccttcgagaaaatgatatatatggcgatggacaaggagaaataatttgaatatacagatttttggaacaaagaagtgcaatgatacaaagaaagcagaacgtttctttaaagaacgtgggatcaagtttcagtttattgatatgaaagaaaaagggtgagtgtcgtccagtggacgacgtgctacgaaccgaccgagccggaaggcgagactgagtaagggcgaatttaattcagttgctcaggcaaatggtggactggaaaatatgatcaactgggagggcaaggataaggatctgcttgcactcattaagtacattgcagaggaagataaacttgagaaggtactggaaaatccgcaggtaattaagacaccggttgtccgtaatggaaaacaatccactcttggatatcagccggatatctggaaaacgtggaaataagagtaccggtagatttttgaccaggataaaacaaatgattcaactgaaaggtaattaaatgacattcaattttgacagagaatttcaatctatgatgcaagtgcatgatttaaataccgtgattcttctaggacacttgaatccagatggtgatgtcgccggatcggtgatgggacttgcacattatataaaaataaattatccgcagtacaaagtgctgccatatctggcagacactttggataaaggatcgaagaagcaggtaaaacaggacaaggtttttaatccatttgaaaagccggatataaaagaaaaatatgcggttatcgtatgtgatactgcagttttagcaagaatgatcggcagggaatactacgagggcgcagaagcaagtatagtaattgatcatcatgcgtcaaatgagggctacggagatgtgaactatacaaaaatatcggaagcctgtgcagagaatgtttattatattttagatccggtcaagttgaaacgtacagtcgattgcgaagtaaatccgactgcagcagattatatttatatgggtatcctgcatgatacaggatgttttacccgagcgaaagtaagcaccatgcaggccgtaactgaattgctcgagatgggagtagatcatagttatgtaatgcaaaccatgcataatgatacgctggaaagtctgcagaagaggtcggagctgttgaagcgggcagaacgtctgctggatgggaatgttgcctgtgtgtgtatcaatcgtgccgagagcgaggcagaaggaatcagctacgaggatatccacccaatcagcggatttctcagagactgcgaagatattcagcttggttttaccatgtatgaggaagaagaaaatcgctggcgttgttccttccggtctgatggaaaatggatcaatgtaaatgaactcctgcaggcatttggcggaggtggacatgctgcggcagctggtgtgcgcaaacggacgaatgatgtagaaaaattcaggcaggaaatccttgaacggattgttatgatgagaaagatttccgattaggataaataagaattagaaacagaacacaggagaatcgggaggtgtagaatgatggaaaaggaaagaacctatattgcaatcgatcttaagtcattctatgcgtctgtggaatgtaaagaacgaaatcgggatcctttgacgaccaatcttgtagttgcggataaaagcagaacagaaaaaaccatctgtcttgcggtatctccagcattaaagtgttatgggatatccggaagggctcgtttatttgaggttgttcaaaaagtaaaagaagccaatagtgtgcgcaggtggaaagcactgaacagaacatttagtggttcttctgatgacagtacagaattaaatagcaatcctgcactggagattgattatattgttgctcctccccggatggctctttatctggaatacagcaccagaatttacagcatttatctgaaatatattgcaccagaagatatttttccgtattcgatcgacgaagtatttatggatgtaacggattatctgcatacttataatatgacagcaagggaacttgccatgaccatgatacaggatgtgctgaaaacaacaggtataacagcaactgcaggaatcggaacgaatatgtatttatgcaagattgcgatggatatcgtggcgaagcacattaaagcagataaagatggtgtacgaattgcggagttggatgaaatgtcataccgaaggaaactctggagccacagacctcttactgatttctggagagtcggaaagggatatgcaaagaagttggaagaatatggcctctatacgatgggtgatattgccagatgttccatcggaaaagagaatgaattatataacgaagatctgctatataaactgtttggcgttaatgcagagctgctgatcgatcatgcctgggggtatgag

SEQ ID NO: 163 - DNA, 483 bp, Unknown
  gut microbiota DNA sequence
gtactgatgttggaatcgatatgcatggctttatgtaaaagaaaagcaatcagcagggaagtagaaatggtgcagatgataataggcagggactggcttccagtgcgaagtaccacattcaggtcaaggccaaagcccagaaggattactgccagctgcaaaacttttttggaagtaaaggtaatgccggttttcagattcccggaaggtgtccataccagtgccagaagcattccaatgataatggcgatcaccggaccgcctattaccgggaattttttgccgattagccaggaaggaacagcaatcagcaggcagatcaatatgccgggaaggttttgttttatagctttcatggtgattttgtctcctttgataagttggatgtgaacccacgtatgagccagatttgattataaaggaaaaacagaaaaatataaagaagaaagtgagagaaactatatacggagaatgaatatatcc

SEQ ID NO: 164 - DNA, 37366 bp, Unknown
  gut microbiota DNA sequence
taaaaagtgtatgtggtgaatttagaaatgaaggcatagatcctattgcatgtggaatggctgacaaatgggcaggagcgcagctagtcaataattttatgttacaattgtgtgggttggaattatataatgatatgtctgaggtgcgacagtcaatgaataatgataaagtgattcaggcagcacaggcagttgcggaccttttggggcaaggggcattcagtgaaaatatgatgtctatgaactccggagatggtgaggaggaatttctgtcgggcgaggcagccatgatttacaatggaagctggtttgcgcggactgtttcagacaagcttggagataaagtaacagcagttagaatgccaaaactatttggtgctgttgaaacaaatgattatcatggtggttgttctgccggatgggtagtttcatcagcaacacaggaaccagaactttctgtaaagatagcagaatggctttcttataatattggaacctttcagcctgaaaattcaactttcaatatagaaaagaaggatatcagacagaaagaaaatacacttagtcagcagatacagaaattatataaaaataaatcagatggtgccatgaactgggatgtactactgacaccggaacgcgctaatatatggcttgatacttgtactgaacttttggcggggtatacaaatggaataggattttcctggacaatggacgtgcatttatattgagggggtgatttgatgaaaacattatttaacagaatgcatttcgctcatcagatcagaaccttttcagttgtagtgtctcttgtgatttttcttctatgtggatcgttatatctgattatggcagataatatgacatcgtcatcagaaaacaatacattggaatataatatgcaggttattgaaaacaacatggacagactgatatctacggtaaatgattattcgaaaattataagttatagtgacagtgtccagaatgcgttaaaagaggagtctgtcacagattatattaatattcaggaattgcaggaagctgtgatccgaatggcatccagctgtgaagggatatcatcggtatatcttcttaataataagggggaagcttatattgcagggaatatttatgaaggtaaatctattaaagaacaacttcaaaatacgacatggtttcagaatgcgttgaagcagggcaataaatattcgattagctcggaagttattacttaccagaatacatcgagcatcagacgaaaaagtgtttcttttttgcgagtgataaataatctggagacactggaatttatggggcttcttgtaataaatattccttatgagaaagtggaagaaacttttcggtctgtgggaaatgcagaaggaattaaaattatggtgctagacaaaaatgatgagatagttgccagttctatagaagaatcaaaactggaagaaaaaatactgatgtcagatcttgatacagagcagggcaaatacaagattctggattatagtgggacacggtataaaataggggaagttgtagcatctgatggagaatggaagattatttgtgcaatttcaagagctgaaacattatctgttatgagaaaatatactatgttctatgttctaattatggctcttggaatagctctttgtatttttggtacttcttttataacacagagaatttcaattccattgcagaacatccttgcttctatgaagaaagttgaacagggaaaactggaaagaatagatatagttcgggttaatcaggagatgagtcagcttcaggaaaaatataatcagatgcttgaggatacagaagcattaatggagcagaaagtaggagagcagaggcagagacgcaagtatgaactctcacttttacagatgcagatcagaccgcattttctttataatacatttgattctgtgtgtgccctagcaatgatgggaaaaacagatgatgtttatactatgatgcaggcacttggacagtattacagaaatagtttacacaaaggacaagaagttattacagtaaaggaagaattgaatattgttgaaaattatctgattatccagtcgtatcggtatgatgatgtatttcaggtagtttatgatgtggatgaatcagtaaaaggaattcctatgcttaaactggttcttcagccgttggttgagaatgcaatttatcatggattcagagagaatgccttgcagggaacaattacaattcgtgctaaagatgcaggacattttgtgaagttacaggtggaagatgatggaataggaatgtgtgaagaaaaacttttgcagatcatgagcgataaagatgcatcaaaaagatttggactgcacggtactgtacagagaatcaaattgtattatgacaaccaggatcttgtaaaaattgaaagtggtataggagagggaacagtaataaccatttttcttccaaaagagataaaagagtaaaatgataatattttcattatgtaaatagacgggggtagataattgggtaacatctctgaatgttttaataacatatcattctatgcttaaggtgtattgcctgtactttattcttcgatcatttagaaaatttggaggctttgtaatgaaaaaaatcactgcacttgtagtatgtctgaaaatgctgatatttttgataaatgaatcggtgatggcatctgatattacaattggatattctttaaaatctgttcaggaggaacggtggcaaagagaactggatggatgtattgcaacaacagatgaattaggtgcagaatttgtttatcttgttgcaaacggtgattcgcaacaacaaatttctcagattgaaactatgatctcacagggggtagatgtgctcatgataacagctgtggatgcaggagcgcttatgtcagttctagatgaagcaaaagaagaaggaatcaaaatactcatttttgatcagcaactacaaaattcatatggagacgtatttgttggatatgatgattttgacaatggagctatgattgcatcaccattacaggaactgagcataactggcaatatagtactccttcatggcgataaagcaagtggaatggaagaattgataaatggtgaaaaatcagttttagctgagttggatgtgaatattgcgatggaattgtattgccagaattgggcagaagagaatgctttttcctgcgcaaaaaaagcacttacagaaatgaatagtgatatatcagcatttatctgtatgaatgacgggattgcttcaggggctgttcaagcattagaagaatacggaatgaccggtaaagtggttgtaacaggtatggacagtgaactgaatgctcttcagagaattgtaaaaggaacacagacgtctactgtttataaagacagtagcattctttcaaaaatagctattgaaacggcaatggcgttggcaaagggagaagagattacagcaaaccagacagttaattttgggaaaaacgatatgccacatgtggttgtaaaatcaactgttatcacaaaagacaacatcgatgaaaaaatgattgatactggatattattcacataaagaaatatatggagaatagaaggttgtacaaagatgaaagattgcatattttaaattgcaattatatctaagctttcaccaaatctgcccgctagttcattctagcgggcagatttgtgtagctacagacagtgtaaactgccattaaagcatgtggcattattaagtacttattatctattgcttccaaaatcgcccaaggagagtcataggtgtagagttacgtatttttcatctacagtcggggtacggatcatttaccgttgttttttcagatttttctgggctgtggaaagcatcagcttgatacggttcagctgatttacttcgctggctccaggatcatagtcaatggcaacaatatttgcttccggatgttccctacggatctctttaataacaccctttcctacgatatggttaggcagacagccgaaaggctggatgcagacaatatttggaacatcaccgtggatcaactccatcatctctcctgtaaggaaccagccttcaccggtctggttaccggcagaaacgataggctctgccatccgggcaagatcacggatatctgcggtaggatggaagtgccggctctgggcaagagcttcattagcggctttacgcatccagtcgatagcctttattcctacattgccccagaaagctttggatttcttaaagccaaggttgtctgctttgaaattctggttataaaagcagtagctcataaagtcgatcagatccggaacaaccggctccgcaccttcagactccagaaggtctgccagatgattattggcagcaggaaggaatttgaccagaatctcgcctacaatacctactcttggtttcttttcatcactgatagggatggtatcaaaatcatgaaccatttccctgcacattttcttgaactgactgtgacttaaagaacttccagatacaaaggcaatcactctctgctcccaaattttgtgctttctgtttacgattcccttttcaagctcatatggacgcatcctgtaaatgcatttcatcaggatatcaccaaatacagctgcataaacgacggcttttacaaggggatatgtaagcttaaagccaggattgctttccagaccgcttaagttcagggaaataaccggaatctgttccatgccggcttttttcagtgccctgcggatgaaggcaatgtaattggaagcacggcagccaccaccggtctgagtcatgactacggctgttttattcaggtcatatttaccggaaagaagggcatccatgatctggcctactacgatcagggaagggtagcaggcatcattatttacatatttcaggcccacatccacagcatgcttattgtcattgggaaggatctccagatgatagccattggcattaaaggcagcctgaagaagtgaaaaatgtaccggtgacatctgcgggcaaagaatggtgtaatccttgcgcatttcttttgtaaatactaccttttcgatagaggaaggctgaatctggcgaggctttttctgtgcatcctttgcacgaagtgctgccaaaagagagcggacacggatccttgctgctcccaggttgttgacctcatcgatcttcagacaggtgtagatcttgtcactcttatcaagaatctcatatacttcatcagtggtaactgcatccagtccgcacccaaaggaattcagctggatcagatccaggtcgtctcttgtctttacataattagctgctgcatacaggcgtgagtgatacatccactggtcgttcacacggataggacgttctacaggaaccaggtgggatacagagtcttctgtcagtacagctacaccatagctgttgatcagatccgggatgccatggtgaatctccgggtcgatatggtatggacggcctgcaagaacgatgcctctgtggcctgtttcttccatatatttcagtgtttcttcccctttgcggcgtacatcttcacggacagcagccatttccgcccaggctgcatgggctgcggcttttatttcatttgcaggaatatccttgaagatttctgtcagacgtttggtaacgatctcttcagaagtcagggaaaggaacgggttcatgaacttaatggaaggatcatgaagctcatccacattgtttttgatattttctgcgtaagaggtaacgatgggacagttgtagtggttgactgcatccgggaattcgttcctctcgtaggggatacatgggtagaaaatgaattttacgccatttttcagtaaccagcttacgtgaccatgagctaacttggctggatagcattctgattcactagggatagattcgataccaagctcataaatcttacgcgtggaagttggagaaagcactacctggtacttcagctgtgtaaagaaggtaaaccagaaaggataattctcaaacatattcagcacacggggaatacctacctggccacgttctgccttgtctgcagataatggcgcataggaaaagatccgtttgtatttatattcataaaggtttggaatgtggtccttgttcttttctttgccgataccacgttcacagcggttgccgcttacgaactgacggccaccactgaatttgttgattgtaagtcggcagttgttggtacacccatggcagttagccatagctgtagtatattttaattcgttgatcttctggatggaaagcatggtggtttctttgccttcctgataacgttccctggcaataagggcagcaccaaaggcacccataataccagcgatatccggtcggatagcttcacagtttgcaatacgttcaaagctgcgaagtactgcatcgttatagaaggtacctccctgtactacgatatggcgtccaagctctgttgcatcggaaactttgataaccttataaagggcgtttttgataacagagtaggcaagacctgcggaaatatcagcaacagatgccccttccttctgagcctgttttactttggaattcatgaaaacagtacatcttgtaccaagatcaatgggatgttctgcaaaaagagcggcttttgcaaaatcctgtacagaatagtttagggatttggcaaaggtttcaataaaagagccgcagcctgaggagcatgcttcattcaactgtacgctgtccacagtatggttgcggatcttgatacatttcatgtcctgcccgccgatatccaagatacagtcaacatctggatcaaagaaagcagctgcataataatgggaaacagtttctacttcaccttcatccagaatcagggctgccttaataagtgcttcaccataaccggtggagcaggagtaggcaatgtgtgcatcctctggcaaaagagaataaatctcctggatagagcgtatggctgtttttaacgggctgccgttattattactgtagaaagaataaagaagggtgccatcctcgcctacaagtgcagtcttagtggtggtagatcctgcatcaatgcccaggtaacaattgcctttgtaagaggacagatcgctttttttgacctgataagcactttgacgctgattgaaggtatcatagtcatcctgtgtggcaaaaagaggctccatacgttctacctcaaagtccatatgtatggatccgtggagccggttctttaactgggtaagggatacggaagtctcttcctttgcattcatggcagatcccatggctgcgaaaaggtgggcgttctcaggcaggatggcatgttcatcatccagcttcagagtacggataaaggccgcccgcagttcggaaagaaagtggagagggccgccaaggaaagctacatgtccacggatcggctttccgcaggccaggccggaaatggtctggtttaccactgcctgaaaaatggaagcagaaaggtcttctttggtagcaccttcgttgatcagcggctggatgtctgtttttgcaaaaactccgcatctggcagcgataggatagagggctttgtaattcttagcatattcattcaggcctgtagcatctgtctgcagaagggaagccatttggtcaataaaggagcctgtacctcctgcacagatcccgttcatacgctgttcaatattgccaccttcaaaataaatgatcttggcatcctcgccgccaagctcaatggcaacatctgtctgaggcgcaatcttctgaagagcagtggaaactgcaatgacctcctggacaaatggaatctccagatggttggccagtgtgagaccgccggaaccagtgatcaccggatggagagtcagctctccaagtttgttataagccttctgtaaaaggtctgcaagtgtttcctggatattggcaaaatgacgttcataatctgcaaacaacaaggtttcgttttcatcaaggatcgcaatcttgacagtggtagatccaatgtcaattcccaaggtgtatttactcataaaattaatataagcctcctcgtttttcgtaaaaaatatcaaaggctgatgaacgggatatccctcatcagcggaatctgtgtgatcatacgtttgctttgtaaaaatgcgtttcatattattatacgatatgggtaaaaaatacgcaacggacaactttcacaaaaacagtggcagggaaaggtggaaatatggtaatggaaatcatggatcagcaaagaatttttaaaagttttccaaaggaaaaagcagggtgctggtccaaaagttcttccattttgttcaggtttgggtctgaatgctccagttctctggaaaaaagataacaaatccggatctgatccttaagagcaaggggctgcctggatttctggtacatacctacacttaagtcctggatcatcagagtacacacaagggcaagctttactttggcaaaaatctggtcatcgtatactgcaccacaaaaataggtatatagccagtaaagtaccagctgttcagcctggatctgccattttggcatggttttcttaaaatccttatataattgcaggatttcctggtcgttgtattttgtatgaaagatcaggttttcttttaaaaagctgtgccaggaaggtgacagaacttccatctcaggtatcagaatgctccagaaatcacggatcagttccggggtggatttgctatcgtctgaccactgtttaactttttccagaaaatccggaccggttccggtttggatatgctttctgcgtatgccttcccagcggtacaattcatttctgtcaaggcatagctgaaaatcatgtcccatggccagaagcttcagaaggcgggcattcaaagatatacttctgtcctgtaaaatggataacatctgctcacgggtatccattagctcagtaaagagaagataatcaaaagaatcataagtttcttctgaagatggtttttcttttgtgataaaggctataggctcctgcctggaaagaagcagcctggcggcctctggacaggagagggaaagagataattcacgaagcccttcaaattcttcgatatgtctgggatacttgcggcaggtatcacacagcatgtgcggacccgcttcggcgtaaatgtcacacaggttttcttcatttaaaaaagcacatctgtgatggtattggcggaagacttgttcgttccagttaatatcatttttcaaccggtttgcgaatggacctttatggtgggaataccgtttcaggctttttttatcaatcacaatctgccatccggcacaacaggtagccggacattctcctgcgatacaggaaaacttcttataaaaatcaggtgctgtaatctgcatatatctgacctcttttttggtaaattttctgcaggctattatacctttttgaaaggccaggtgcaagcaattacagaacaggctggaggaaaataagtaattcttgttttttttatgtattcaggatataattgccagataggcgggacttttgtccctaacaatattagaaaaaagggagcagcatatggctgaatacaaaatcttaaaaacagaaggccgggctaagagagcagaatttaaaactgttcatggtaccatccagacgccggtctttatgaatgtaggtacggtaggggcgatcaaaggggctgtatccaccatggacctgaaagagatcggcacacaggtagagctgtccaatacttatcaccttcatgtacgtacaggagacaagctgatcaaagaatttggaggccttcataagtttatggtctgggatcggcctatccttacagactccggtggattccaggtgttttccctggcaggactgcgtaagatcaaagaagaaggggtatatttccagtctcatattgacggacataagatttttatgggacctgaagaaagcatgcagatccagtccaatctggggtctactattgccatggcctttgacgagtgtccaagcagcgtagcagacagaggttatgtacagcgttctgtagaccggaccaccagatggcttgcaagatgcaaagaagaaatgcagcgtttgaacagtcttgaggacacgatcaataaagaacagctgttatttggtatcaaccagggtgctatttatgaagatatccgtaagaatcatgcagatgccatttcacagatgaatctggacggttatgcagtaggcggactggcagtaggagaaacccatgagcagatgtatcatattctggacgaagtggttccccatcttccacaggataagcctacttatcttatgggcgtaggaacgcctgccaatatcctggagggcgtggaaagaggcattgatttctttgactgtgtatatcccagcaggaacggccgtcatggtcatgtatataccaaccatggcaagatgaatatgtttaattcaaaatacgagatggatccacggccaattgaagaaggatgtcagtgtccggcctgccgtcattacagcagagcttatatccgccatcttctgaaagcaaaagagatgcttggcatgcggctttgcgtactgcacaatctttatttttataaccatcttatggaagaaatccgggacgcactggatgccggaaactttgcagaatataagaaaatgcgtctggaaggctttgaagagggcaggatcaacagtaaaagaggatgatttagttatttttaaaggatgatctagttatattaaaaaaataacttgatgaaattatgtattttgtgtatgatatactttaggcttcggtatgaataaagaagaagcagggtgccggggtttgggacccgttataacaaacgcacaggaggtatttttaaatggaccagagcagtggaatgggacttggttttactatcgtatggctggtagtccttttcggaattatgtattttctgatggtaagaccacagaaaaaggagcagaagagaatccaggctatgctcaatgacatggcagtaggagacagtgtggtaacaactggcggcttttatggcgtgatcattgatatgacagacgaggatgtgatcgtagaattcggtaataacaagaactgtcgtattccaatgagaaagcaggctattgctgaggttgaaaaggccgagcaggcagaataagtatgaaattagaaggcggcagctcctggtgagtctgtcgccttttgttctgcaacactctgttgtgttttagatttttgagtctgttgacttttacactttaacagtctgctgtcttttatgctttaataggttgaaatctgttgaaaagtgcgttattataatgacaattacctgtctgaggcaggagagtaagagaggaaattattatgaattataacatttcgctgattccgggagatgggataggaccggaaatcgtctctgaggcaagaaaagttctggacaaagtatgcgaagtttacggacatactttttcgtattccaaggtgcttcttgggggagcatccattgatgtacatggtgtgcctcttacagaagaagccattgcaacagcaaaagcatcagatgcagtacttatgggttctattggcggagatgcaaaaacatcaccctggtacaaactcgaaccatccaaacggccggaggccggacttctggctatccgtaaggcactgaatctgtttgccaatttaagacctgcatatctttacaatgaattgaaagatgcctgcccgcttaaagagcagatcatcggggacggatttgatatgatcattgtaagggaactgacaggaggcctttatttcggagcaagaaaaactaccgaagaaaatggggtaaagacagcagtagatactctttcctacaatgaaaatgagatccgcaggattgctatcaaagcttttgatattgctatgaaacgccgcaaaaaagtaacaagcgtagataaggcaaatgtactggattcttccagattgtggagaagtgttgtggaggaggttgccagggattatccggaggtaacgctggagcatatgctggtagacaactgtgcaatgcagctggtacgtgatcctaagcagtttgatgtgatccttacagagaatatgtttggagatatcctttcagatgaagccagtatggtgacaggctcgatcggaatgctttcttcagccagcttaaatgagacaaagtttggcctttatgagcccagccatggttcagcacctgacattgcaggccaaaataaagccaatcctattgcaacgatcctgtctgcagctatgatgctgcgctattccctggatctggacaaagaagcagatgcagtagaggcggcagtacagaaggtacttacagacggatatcgtacaggagacattatgtcaaagggctgtacccttgttggaacaaaagaaatgggcaacctgatcgcaaaagagatccggtgatccgttaagataaaggagagaacagatatgagaagcgatgcagtaaagaaggggtcccagcaggcacctcaccgttcactgtttaatgcacttggaatgactaaggaagaaatggaaagaccattggtaggtattgttagttcctacaatgagatcgttccgggacatatgaatcttgataagatcgtagctgctgtaaagcagggagtagcaatggctggcggtacaccggttgttttcccggcaattgctgtctgtgatgggattgctatgggacatataggaatgaaatattcccttgtgacaagggacctgatcgcagattctacagagtccatggcccttgcacatcagtttgatgcactggttatggtgcctaactgcgataagaatgtaccgggacttctcatggcagcagccaggatcaatgttcctactgtatttgtcagcggagggcctatgctggccggtcatatcaatggacacaaaactagcctttccagcatgtttgaggctgtaggtgcatatgcagcaggcaagctggacgaggaaggccttacagaatttgagaacaaaacatgtcctacctgtggttcctgttccggtatgtatactgccaacagcatgaactgcctgacagaggttcttggcatgggacttaagggcaacggtacgatccctgctgtatattctgagcgtatccgtcttgcaaagcatgctggtatgcaggttatggaaatgtacaggaaaaatatccgccccagagatattatgacaaaagaggcattactgaatgctttgactgtagatatggcactgggatgctctacaaacagcatgctgcatctgccagctattgcccatgagattggttgggattttgatatcagttttgcaaatgagatcagtgaaaaaactccgaacctgtgccacctggctcctgcaggccccacctacatggaagacctgaatgaagctggcggcgtatatgctgtgatgaacgaactgaataaaaaaggacttctccacacagaatgtatgactgttacaggaaagacggtaggggaaaatattaaggactgcatcaatctgaatccgcaggtgatccgcccaattgacaatccttacagtcagaccggaggacttgctgtactaaagggaaatcttgcaccggatggcagtgttgtaaagcgttctgcagttgcacccgagatgatggtacatgaaggtccggcaagagtatttgactgtgaagaagatgctattgctgccatcaaaggcggaaagatcaatgcaggtgatgtggttgtgattcgttatgaagggccaaaaggcggtccgggcatgcgtgagatgctgaatcctacttctgcaattgcaggtatgggacttggctcatctgtagcacttattacagacggacggttcagcggtgcgtcaagaggtgcatctattggacatgtatcaccggaagcagcagtaggcggaccgattgctcttgtagaagagggtgatatgatctccatcaatattccggagctttccctgagtctgaaagtatcagaggaggaactggaagcaagaaaagcaaaatggcagccaagagagccaaaggttacaaccggatatcttgcaagatatgcagcaatggtaacatccggcaatagaggagccattctggaagtgccaaaggcaaaataaaagaaatacgataaggcagcaggaggaacaaacatgcagcttacaggtgctgagatcattatagaatgtcttttggaacagggtgtggacactgtgttcggttatccgggcggagccatcctgaatgtatatgacgccttatacaaatacagccataagatcagacacgtacttacctcccatgagcagggagcgtcccatgcagcagatggttatgcccgtgctaccggcaaggtaggtgtatgcctggctacatccggaccaggagctaccaatcttgtgacaggtattgcaactgcgcagatggattctgtgccagtggtagccattacatgcaacgtagggacagccctccttggaaaggattctttccaggaggtggatatagccgggattgttatgccggtaacaaaacacagctacattgtcaaagatgtgacaaaacttgcggataccatccgtaaagcttttgtgattgcaggcagcgggcgtccgggacctgtccttgtggacgttccaaaggatgtaacagcagcatcctgcgaatatatccagcataagatcacaaaaccggaaccagtgacagatactattcgcaaagaggatgtagagcaggccgttcagatgattagccagtctaagaagccatttctatttgttggcggcggtgctgtgatctctgatgcatggcaggaagtaagagagcttgcccacaggatccaggcacctgtatgcgatagtctgatgggaaagggtgctttttcaggcgaggacgatctttacacaggaccagttggaatgcatggcaccaaaacatccaattatgctatgtgtgaatgcgatcttttgattgctcttggcacaagattcagtgatcgtgtaaccggaaatacacagacctttgcaccaaatgcaaagatccttcagatcgatattgatgcagcagagatcaacaagaatgttcatgtggatgcctgtgtaacaggagacctgaaaatggttcttaagcagatccttgaaaagcaggaaaaaatggatcattcccagtgggtggcacatatcatggaaatgaaagaaaagtatccgctgaattatgatcatacccagctgacaggcccttatgtgattcagaagctttacgagctgactggtggagatgcaattatttctactgatgttggacagcatcagatgtgggcagcacaatatttcaagtttaaagagccaaggacattccttacatccggaggccttgggactatgggctatggccttggggcagccattggtgcccgtatgggatgtccggataaaactgttgtgaatattgcgggagatggatgcttccgcatgaatatgaatgagattgccacagctgtacggtgcaaaaagccactggtacagattgtgttaaataaccatgttcttggaatggtgcgccagtggcagacactgttttatggacaaagatattcccagactattctggatgatgcggtggatttcgtaaagctttcagaagcaatgggggcaaaggcaatcagggttaccaggatagaagaagtggaaccggcacttaaagaagctctttccagcaatggaacagtggttcttgactgctggatcgaccagaatttaagtgtatatccgatggttcccgcaggtgcaagcctggatgatgtatttgacgaggaggatatgaaagaaaatgagtagagtatttaatttttccgctggtccggcagttcttccggaagaggttctgaaagaagttgctgatgagatgttagactataatggaaccggcatgtccgttatggaaatgagccacaggagtgctgcctttcaggagatcattgatacagcagaaaaagacttacgggatttgatgaatattcctgataattataaggtgctgtttcttcagggaggtgcttcccagcagtttgccatgattcctatgaacctgatgaaaaacaaagtagcagattatattgttacaggacagtgggctaaaaaagcatatcaggaagcacagaaatatggaaaagccaataagattgcatcttccgaggataaaaccttttcctacatcccggattgcagtgatcttcctatcagcccggatgcagattatgtatatatttgcgaaaacaataccatctatggaacaaaatacaaaaagcttccaaatacaaaagggaaaacactggtggcagatgtttcctcctgctttctgtcagagccggtagatgtaagcaaatacggactgatctatggtggtgtacagaaaaatatcggacctgcaggcatggtgatcgtgatcatccgtgaggatctgatctcagaggatgtacttccgggaacacctaccatgcttacatacaaaacacatgcagacgtaggctctttatataatactcctaatgcttactgcatttatgtatgcggaaaagtattcaaatggttgaaatccatgggcggacttgaggaaatgaagagacgtaacgaggaaaaagcaaagatcctttatgacttccttgacagcagttctctgtttaaaggcacagttgtgccagaggaccgttcccttatgaatgttccttttgttaccggagataaggaaatggatgcaaaatttgtaaaagaggcggcggccgcaggcctggtaaacttaaaaggccacagaaccgtaggcggtatgcgtgccagcatttataatgcaatgcctaaggctggggtagaggctctggttgcgttcatgaagaagtttgaggaggaaaataaataatgtatcagtttcattgtctgaatccgattgccagtaaaggtctggatatttttgatgagaattaccgtaaatccgatacaatagaggactgcaatgcaattctggtccgcagtgccaaaatgcatgatatgcagcttccttccacagtttccgtgatcgcaagagccggagccggagtaaataatatcccggtaaaggaatgtgcagaaaaaggaatcgttgtttttaatacaccaggcgccaatgcaaacggtgtaaaagaactggttctggcaggtatgcttcttgcatcccgtgacattgtaggaggtattgagtgggttcagaaagaaaaagataaagaggatatcgataagctggctgagaagcagaaaaagcagtttgcaggctgtgaaatcatgggcaaaaagctggggatcatcggacttggagcgattggcagcatggtagcaaatgcagccacaggccttggtatggaggtttatggatatgatccttatttgtctattgatgcagcctggaatttgtccagaaccattcatcacagcaaaacactggatgagatctacagtcagtgtgattatattaccattcacgttccgcttctggatgcaactaccagaatgatcaaccaggaagcgcttgcaaagatgaaagacggagttgtgatcctgaactttgcaagagacctgttagtagatgaggatgcactgatcgcagctcttgacagcggaaaagtaaagaaatatgtgacagattttgcaaatcatacagtagcaggccacgaaggcatcctggttactcctcacctgggagcttccacagaggagtccgaggagaactgtgcagtgatggcagtgaaggaagtgcgagatttccttgaaaacggaaacatcaaaaactctgtgaacttcccaaattgtgatatgggcacctgtgtggcagttggcagaattgctattacccataaaaatatcccaaatatgatcagtcaggtcacaaagatccttggaagtgaaggattgaatattgcagatatgactaataagagcaagggtgagtatgcatacactctcatcgacctggaaagtgcagcttcccaggaagcactggaagcactggaaagtattgaaggtgtttcaagagtaagggttgtaaaataatccatgaatacaaaagaatgcagatcccggatagtagatgaatttattgaactcactcagattgatgcagtcagctaccgggaaagaaaaatcgcagatgtactgaaagaaaagctgctgcagcttgggtttgaagtacaggaggatcaggccggtactgcttatggaagcagtaccgggaatttatatggatttttaaaggggagtctgcctggtggggcgattctcctttgtgcgcacatggatactgtggaaccaggacttggaaagcatgctgtatttcatgagaatggcaagatcacttcttccggagacaccattctgggggcagatgatgtatgcggacttgtggagatcctggaagcagtgcggatccttaaggaaaaacagattcctcacagggatatagaggtggtttttcctattgctgaagaggtattcattaagggaaccgatcagcttgattttacaaagttaagggcaaaagaggcttatgtgctggatttaagcggtgcccctggagcagcagccctgcgtgccccttcccttatttctttttctgttacagtaaagggaaaagcagcacatgcaggttttaatccagaaaaaggaatacatgccattcagatcatgagccaggtgatcgctggtcttcctatgggacatgttggagatgataccacttttaacattggtacagtagcaggtggaaagcttgtgaatattgtgcctgaggaatgtacctgtaaaggggagatccgcagttacagccatcaaaaagccttggaattgttggaaaagataagggtttcctttgaaaaagcagtcagggaaaagggaggaagcttttctatggagcatgaagtaaaccttcatgcttatgaaactgacagagaagcgccggttgtgaaacggtttgaaagagcctgcgaaaggctgtctctgccgtgcacattgaccgaaacctttggtggcagcgacaataataattttgctttacacggaatttcggggattgtgatctcctgtggcatgtaccagtgtcattccactttggaatatacgtatgagaaagatcttaagacgggtgctgcactggtagctgcgcttgtgtcagaaagggaaacagagttatgaaaacacctcttcgttatcaaatgactgaatatgattgcgggccaaccacaatgatgaatgccatcagctgtctttttgacagagaggatattccgccggaaatcgcaagaaatattatgctgtattgtctggattgttatggagaaggaggtgaacctgggaaaagcggtacctccaggatggctatgctttttttaagcaattggatctgccagttcggacggatcgggaatctttccatccgtaccagatacctttccggcagctgtgtttatatcggaccggaaagcaggatcaatgatgcccttcacagaggaggggtagtagtattgcgtctgttttatgaagtggagcattacgtacttcttacaggagaaaaagacggtctgatctatatgtttgatccttattatgaggatgaaaatacatatgaagaggatgatatcctgatggtggatgatcatccctgtgaatataaccgtttggtaccagcaaagtactttaattgtcagggatgttctacctatgcactgggtccgaaagctgacagggaggcagttcttctttttaattcagaaacagagcttacacctgaaaaaaccattgaatattttatctgatgaatatcaggacaggatttaaaataagggcgtgtgaaaatgagataccatttttcacgcgcccttttgacggctataattggaatttaaaagcttaacggcctgatgaagcaataaattccagcacttcttcacggctgggcatcactcttaaagctccttttttggtggtaatgagagatgctgctccgttggcaaaggtaagcatttccgtaagattctcttctgtaaggtctgtaagtccatgctccagcacgtaattcagcatacttgcacagaaagtatctccggcacctgtagtctcaatggtgttctcctgaaggaaaggagctacttctacacgaaggtctttgtaataaacacggctgccttccttgccaagggtgatacatacaagaggaatattgtatttctcacggatcagggctgcacctttgtcataatcggtagtgccaaaaagaaattcaacttcattatcagaaatcttcagcacatcgcacttggtcagaccatactcgatctcacgctttgcatcatccagggatttccatagaggtggacgcaggttagggtcaaaagaaatgatacagccagctttttttgcaagatcgatggcatatcgtgtggcttcccttacaccttcatgagtggaggaaagggtgccaaaatgaaaaatacgggagtttgcgatcagatcactggaaatctcctcttttttcaacatcatgtctgcacctggattacggtaaaaagagaaatccctgtctccatccggataggtgtgaacaaatgccagtgtggtatgtacttcttcatcggttataagattatcagtattaatgccaacttcttccacggccttgcgaagctggtcaccaaacatgtcttttcctacttttccaatgaaggctgttttcttgccaaggcgttccagcatggcaagtacattacagggagcaccacccgggttggcttccagaagaggattcccctgggggctgatgccgttttctgtgaaatcgatcagcagctcgcctaaagatgttacatcataaagtctgttttccataaagaacctcctaagttcaaaatagtcagtttcacccatttgggaaactgcagcaactgctcaataggaagtaacccgcaagggcactgaacagttacaaactgtaaacagtgtatcccagaggtatttttttgtcaaataaattccttcttttttcttcctttatttttagtgataaagatggtaaaattatgtacagaaacagattttcgtgcagggagatatccctgtagaataatacacagaaaagaatacagcgaaggagcgaaaaatatgaacgagaaagcatatagttatatggactggcccaggatcgaggcgattgtatatgcagaggaggcatccccaaaggatgtgatgagtccaagacttacaccggatggaatacttatccagggctttttcccgggggcagaggaagccgccgttcttgttggaaataaagaatatcctatggaacaggaggatgaggcaggatattttgctgcaatgatcccaggacggaagatccctgcttatcagttccgcgtaaagacagagggaaaaacagaagttttctatgatgcgtatgcttttccgggaatgcttacagaagaggacgaaaaggcttttgtagcaggcgtatattacaatgcttatgagaaattaggagcacatccggtgataaaggatggcatagagggcactagctttgcggtatgggcacctaatgctgtgcgtgtcagcgtagtaggagattttaatcactgggatggccgcaggcttcctatgcacaggatgcccatgtctggtatttttgaattgtttgttccaggagttcagcccggagatatctataaatatgagattctggtaaagggtaaagggacacatttgaaggcagatccatatgccaacagggcagaacagccaagagcctgcggatctgtggtagcaaaagtagatgattttgtatggaatgatcaggcatggatggcagacagaaagaaatatgcagatcgtgatcagccggtttctatttatgagacaagcctgaccaaatggaaaacagctggagagctggtggattttgtatcagatcttggctatacccatgtagaacttcatccggttatggaatatatggaggatcagacagacgggtattcaacctcttcctattttgcacctacttccaggtttggcactcctgaggatttccagaagctggtggatgctttgcatcagaaaggcattggtgtgatcctggactggactcctgcccagttccccagatatgagggcggactggagaattttgatggcacacctctttacgaattaaaggatcctgctgcagcagtccatcctatatggggcacgctgctttacaattacgaaagccctatggtgaaggatttcctgatctccaatgcatgcttctggatggaagtttatcatgtggatgggcttcgcctggacgatgtggatgctatgctgtatctggattttggccggaaggcaggagagtggcagccgaatatgtatggttctaatgagaacctggctgcaattgagtttctgaagcatttgaattctattacaagaaagagaaatccgggtgtgctgcttattgcccaggaggacggattatggcctgagctgacggatagtgtggagaacgatcatcttggatttgattataaatggagcggtggatggaccagagatttcctgtattatctggctgtaccgccggtaggcaggaagaattgtcatgatcagctgacactttccagtgtttatgcatattctgagcattatatccttactcttggcctgcgggatgtaggagatctggaggactttaagaaccgtctgccaggctccgaccaggagaaggaagcacaagttcgtgaggcatatgcttacatgatgcttcatccgggatgcaagatgaatgctccggatccggatatgtcatctgcacttcaggcatgtgtcagggatctgaatcaggtttatacacagcatcctgctctgtatcgtatggacaatgattatgatggatttgagtggatccagctgatgaaatatgatgagaatgtgatcacctttatccgcaaaactgacaagccggaggaaacattgctggctgtatgcaattttgcaggaattccatataaggattatcagacaggtgttccctttgccggaaaatataaagagatctttaacagtgatgacaagaaatacggtggagagggcaaaacaaatcctaggatgaaacgtgccaaaaaagaggaatgtgatgaaagggattattctatcaagcttacccttccagcccttggtgtagtgatcatgacttgcacgcctgaagaagaaaagaagcctgtgaagaaggaaactcaagcaaagaaagctgcggaaaagaaaactgcatcaaagactacggctgcaaaaaagacaacagctgcaaagaagacaacagcaaaagcagctgatacaaaaccggctgcaaagaagacaacagcaataaagaaaaaattatcataagggatttataagttaaaatacagaaggcattacagttacaggttttgtaattgtaatgccttttttatgacgatgttttacgatagccggaagctataatgtgaatatatatttttaaatgcatatccaaaaggagcaggaatctacagcagggtttcttaaatggggaagaagatttttctggttttcacttttgatccttataatagcgggggtgttgctgttaaaaccggaaaattaattcagtgaaaattccatataaacaggatcatggtcagaataggaatagcctgtattcagatcctcataagagcccatggtgatattatctgagaaaataaacccatccagagtaactgtatagctggcatccgggtcgtatggaatgtccgtgtttctggaagtgttccacaggtcagctttttcctgctgagataaaagatccataccaaaggtaaaatgctccggcagttcttttcttgggaaagggtaggcccaggaatggtactcacttgtatcgtcctctgaggctttcaggtcatgattgaaatccccgccgcatagtacataattgccggcctgatattctttttccatgtcctggcacagcatccggatctgtccctgacggatctggtcgtcgtttccataggcagacatgtgcaggttgaagaccaccagttccttgtcattgtccaccggaaccctggaaatgctgtagcacctgtcaagatcaaaaaatttcttaaaggttgtagcaatgggaaagcttcttcttaaagaggaagtcaccgggtatctggaaaacagggtaataccggatcggcttttgccatggggctgagttagcgggtaaaaaagaaagggtgaatcataattctgggcgaacacggaataataatcagcaaatgtgtctttcaggatatcatattggtttacatgatagcttcttgtagaattaagatctacttcctggaagaggataaagtcaggattttgggatgcagcaaaatttccggcaccgttgatgtttgactggacattttctttgcttttagcccaggaggacttaccgccatccataaaaaagctgaagtcaggggaataagctccaaagccaacattgtaggtaagtgcagaataggtctggcctgtggtcagagatgctgtctgtgcctgttctgttggggcttcaacagccagttcctggttgtcagggatcctgtggtaggctgcgtaaaggtagatcacataagccagaagaatgaccaggatcgcagtcaggatgccaagagggatcttgacccatttggacagtttctttttggaagcgtggggtattgatgatttctttttcataaggtacctcgttgtttgattaatttggtggtgaatatttcatggtattgtcaaacaatatgcatgatattctgtaattggattatattgagaataaagaaaaaagtcaactgtgtgtgcaaagcgcggaacaaagcttggaacattccgcataatcaggatttcggtgctttgatattaaaattgtttctgtccgcttccttataataaaaaaacaacttgacaaacaagacaaaagcatttaaactaaacaacagtttgggatgaaagttatagtatactggaacacagcatattaactggaatcccagtaattacaagagttctaagaacaacatgctggaatagctcagtcggtagagcacttcactcgtaatgaaggggtcgtgagttcgagtctcatttccagcttataggaagatcctgcgtcgatgatgacgatgcaggatttttttataaaacatattcccaaaaagataaaactgtgatagttttatgaaaattacgcagcatgtgccggttaagaacaaaaggcacaggttacacatgagcagttacgccgcaatgaaaggtgataaaagagatgaatcagtacgcagcaggatacgctttttattatgacgagagaaccgcagcaaaagcagcggcttttttgcgtaccctggaatctgcaattgatacatgccttggaagcactggcgtacgtgcagactggatggagcaggacggacctgctctcgcttggcatacaattaaatatagatgcagaaagtatacggataccatagctgtttcataactggcagcaggtgccgtatctttttttgtctaaaaagacttgtctgcaaagatggacagcttactatatatgagaaaggaaagagttacatgtcagtttattctctggaattaaaaaatattaccaaaagcttcggcaaggacgaagatgtgttaagagggatcagcctttccattgaaaaaggtgagtttatcacactacttggagcatctggatgtggaaagactaccacattaaggatcatagcaggactggaagcgccggatagcggaaatgtatatctggatggcaaagatgttacagacctggaaccaaaccagagaggtgtaaacaccattttccagaactatgccctatttcctcacatgactgtagcagataatgtaggctatggactgaaactgaaaaaagtaccaaagcaggaaataaagaaacgagtatcagaaatgttggagctggtacagctttcaggatttgaaaaacgaaaaccggatcagctttccggcgggcagagacaaagggtggcaatcgccagggcgctgatcaataatccccaggtactgcttttggatgagcctttaggggcattggatctgaagcttcgtcgggctatgcagacagaactgaagcgtcttcagaaaaagctgggtataacgtttatctatattacccatgaccaggaagaggctattaacatgtctgaccggatcgctgtgatgcgtgaaggacactttgagcagattggtacaccggatcagatctataatcatcccaaaaccagttatgtagcagattttgtaggaaacgccaatatcctagaagggatttgccagggaatggaaggaacacaggcggttcttcttacaggagaacagaaactgctggtggcagcagaaggcatatccctggaaaaaggcgaaaaggttacatttgcacttcgcagcgaaagtattcatgtggatgaaagcggtacaggaagcctgacagctactgtgaaagaaaagtcttttgctggcggtcagctgcgtatgcttttggaattgccggatggcagtgagataacagccagcagatacgggattgatgcaaatgttaagatcggccagaaggttggctggagctttgaacctggagacggagtgatcgtagacagggaggatcaggatgagcaattataatactgagaaaaagaaacacaaggtgaaaagccactctgtaggcatgatcctgccattatatatttttaccatcctatttgtagcatgtcccttgatctatatggttgcgctaagctttgctacacctggagccgtacatggggtagaatggatatttacccttgataattataaaaagatcctggaaccggtatatttgaatacctttgtacagtcttttaagctggctgtgacaagtactctgatcattggactggtaggctatccctttggttattttatggcaaagctgcctgcaggaaaaaagaaaaaggccatgctgatcctgatgcttcctttctgggtgaattctttgatccgtctgtacggatggattattatccttcagaaaaaaggaattctgaattttgtactgaaaaagctggggatcattgataagtcattaaagctgctgtacagctatccggccattgtagtaggtatggtatacgtgcttcttccttttatgatcctgtctgtgtattccagtgcagaaaagatggattggtcattggtagaggcagccagagatctgggcgcaggaaggatcaaagcattctggacgatcacctggaggcttaccctgccaggcctgttatccggtgtgatccttactttcgtgccgtccatgggactgttctttatagcagacattttgggtggaaataagatcgtgcttgtaggaagcctgatccaggatcagatgacaagagggaataactggccgtttgcagcaacgctggcagtagtcatgatgattcttacaactttgatgatctggttataccgaaagcttacaaatgcaaaggatttggagggagtaggatgaaaaagaattcaaaatttgcaaatctttatcttgttattatatttttgctgatgtatctgcctattggggtagtgatcgttttttcatttaatgaggcaaagcttccggtaagatttaccggattctccctgaagtggtatcaggaactgatgggggacagtgccatgcttcaggcgctggtgaacagcctgatccttggcgcggccagctgttttgtatctgcattgatcggtacatttggggctgtagggctgtccaggctgcatctgaagtccaaaggcattctggaatacatttccattttgccgcttatgattcctgagatcattcttggtatggtcctgatggcattcttttacatgctgaacctgccatttggcatgcttacccttctgatcggccatactgtattttgcgtgccttatatactaatggaggtgaaagcaaggcttgtggggatggatccgtcccttgaagaggctgccagggatctgggggcatcctccatgcgtgcattctttgatattacactgcctttgatcatgccggcagttgtatccggatctttgcttgcatttgccatgtccatggatgatgtagttatcagtatttttattaatggccctaagctgtctactttgcctatcaaggtgtatacccagatgaaaacaggggttacaccggagataaatgccctttgtaccattatgcttgcttttactgtgatcgtgctgcttctgtacagcctgatccgcagcatacgtaggaaaaagaaccggtaaagtttttttcagcaggaattcctgctatggaaccaagtatttacatttactgaggagaaaagagtatgaacaaactgatccagcttaagaatcttacgaaaaattttgatgaccagcaggtactgcgaggcatcaacctggatatttatgaaaatgagtttctcacccttttaggacccagcgggtgtggaaaaacaaccactttgcgtatcatagcagggtttgaggaaccaagtggaggggaagtactgtttgacggaattgagatttccaagcttccgccctacaaaagagaggtaaatacagttttccagaagtatgccctgtttccccatctcaatgtagctgaaaatatagcctttggattaaacctgaaaaaggtggaaaaatccgtgatcgatcagaaagtaggcaaaatgctgaaaatggtaggtctggaaggatttgaaaaaagggatgtaacccttctgtccggcggtcagcagcaaagggtggccattgccagggcactggtaaatgaacctaaggtgctgcttctggatgaacccttaggtgctcttgatgcgaagatccgcaagcagatgcagatcgagctgaaaaagatccagcaggaagtagggattacttttatctatgtcacccatgatcaggaagaggctctttctatgtcagatacagtggtagttatgaataatggagagatccagcagatcggctctcctacagatatttacaatgagccggaaaaccgtttcgttgcaggctttattggtgaatcaaacattattgaaggaattatgatccgtgattatctggtggaatttgatggattccagtttgagtgtgtagataaagggtttgaagacaatgaagagatcgaagtagtccttcgcccggaggatctggatattgtggaaccacaggatgcaaagatcacaggagtagtgaaaaatattacatttaaaggtgtgcattatgagattctggtagaaactgagaataggatctacaaggtgcagacaactgattacgcagaagcaggacgggaagtagggctgaaattcggtcctgaggatattcatgtcatgtacaggatgggggcatactgatgaaacagtttaaaagattgatcataccgtattttatctgggcagtggtcattttgctgataccgctttttttgattgccctgtacgctgtcacaaaagaaggaaatgaagtccttactgttacttttacctggggaaactttgcaaaattcctggaagcaacatacttgaatgtgatcctgaaatccttctggcttggtttactaactacagttatttgcctggtgctgggatatccactggcttatatgatttcaaaattcccggaaaaagtacagagtatgctgatccttcttgtaaccattcctatgtggatcaatatgcttctccgcacctatgcatggatgaatctgctttccgacaacgggatcatcaatcatctgctttctatgatagggcttgggccggtgtctatgatgtacacggatttttccgttatgataggcctggtatgtaactttatgccatttatgatcattcctattcatacatctttgaccaaaatggataaatccctgattgaggctgcttatgatctgggcgccaataagattcagactttttggaaagtgatctggaagctttcccttccaggcgtggtaaatgggatcatgatggtatttcttctggctatttcctctttcgttatcccaaagcttcttggaggaggacagtatatgctgatcggtaatctgatcgaatcccagtttatctctgtaggggactggaatttcggaagtgcgatttctctgatccttgctgtgatcatcctgatatttatgggactgatgaagcgtatggataaacaggatgaataggaggggacagatgaaaagaaaaaacggaatattttcaagattttacattgcattatgcctgatcttcttttacctgcctattctcgtcactatgattttttcctttaattcatcaaaatcactgacaaagtttacaggattttctcttagatggtatggtgaacttttacacaatggggaagtgataaaggcggtatatgtttctctgaccattgccattttggccactgtgatctctaccgttcttggtacgatcacagccattgggctttcaaagtcaaggaaagtggtaaaagaactgcttttaaatattaataatctgccgattctgaatccggatattgtaacagctatcggactgatgcttttgttttcgtcccttggctttcggaagggttatctgaccatgctgctggcacacattgctttttgtactccctacgtgatcaccagcgtatatcccaaagtgagaagccttgaccctaatctggccaatgcggctatggatctgggggcaacgccggcacaggcacttattaaggtaatcgttccgatgataaaggatgggatttttgcaggtgtgcttcttgcatttaccatgtcctttgatgattttgttatttcgtattttgtgtctggaaatggtgtgaaaaatatttctattgttgtatataatatgacaaagaggatcaatcctacgattaatgccttatctgccattgtgatcgcagtgattgcagtggtactgattgggggaagacatattcctaaattgctggaaaagtttcagggaaagcgcagcaggaaggttgtacggctggtcactgtactggttgcattggctctttttgccggattggtccgtatgggacagacggcaggaggaactcatgtactgaaggtatataatgctggagagtacatggatctggagctgcttcaggaatttgaaaaagagtataactgtacagtggtatacgaaacctttgaatccaatgagatgatgtataccaagctttcaggcggtgagtcttatgatgtactgattccttcagattatatgatcgaacgtctgatcaaggaggagtaccttcagtatcttgactgggatctgatcccaaatgggaaaaaccttctgacagaagtcaagaacagaagttatgatccgggaaaccggtattcctgtccttatttctggggaacggtaggaattctttataataaaaatgtagtatccaaggaagatttgcaagaaggctgggaactgcttcggaatccgaaatataaaggaaacctgtatatgtatgattcagaaagggattcctttatgattgcactgaaagcgcttggttattccatgaacacaacagaggatgcacagatccaggaggcattccagtggctgattgatcagagaaataccatggaaccaatctatgcaggcgatgatgtgatcgacaatatgatttcgggaaataaagctttggctgtggtatattctggtgatgcttcgtatattatcagtgaaaatccggaactggattattttacaccggatcagggtaccaacctgtggtatgatgcaatggtgatcaccaaagactgtaatgaggtagagctggcacatcagtttattaattttatgctggatgatgaatctgctctttccaatactgaggaagtaggttatacttcttctgtaaagagtgcatatgacgaaatgatccagggtacatatgaagggatttcttcttatattccggatattgataatccagataatgagatcttccgttaccagaagccaaagatcaaacaaaagtatgcagagctttggacaaagatcaaggccgagtaggccggtacaacatggtagttatcgaagataaaaggcttcggtgattataaataagtagaagaggagaaactattatgaaaaaaaagatttttgcagctgttttatgtgcagcatctgttgcagcatctgttactcctgcttatgcagatgattccgagcttgtgctttatacctggcagggcatgtttccacaggaagtactggatgattttgaaagtgagacagggattaagatcacatattccaactttgatacagacgagaccatgctggagaaggtttccatggcaaagggcggagactatgatgtggtgatcgcagatgactatattctggaaaaagtggtccaggaaggccttgctgaaaaacttgataaagataagctttctaattttgaaaatatcaattctctgtatcagggacagttctacgatcctacagatgagtataccgtaccttatggtgcaggtattccgctgatcgtgtatgatccggacgaagtggacattgacattgaaggctataatgacctttgggatccgtccctggaagacagtattgccttgacagccaactacagggttatcaatggtatcacaaaccttgcacttggaaagagcatgaatgaagaggatgtggattctattaaagaaaccggaaagaaacttctggaactggctcccaatgtacgtatgatccaggatgataatacccaggatgcacttcttaatggggaagcatccgtagcattcctttatacttcacaggttacttctgtacttgcagaaaatccggatctgaaggtagtatatccgaaagagggtcttggatttggtattatgggtatgtttattccaagtgaagcaccggacaaggatgcagcttatcagtttgtaaactatatcctgcagccggaagtatctgctaagtgctttgactatatcggttactactgcaccaataaagcagcagatgagtttgtagatcctaacctggtagtaccggaggatgtaacaaagggcgagattattcagaatgtaagcgcagaggctgacgagcagtacaataagaattggacggagtttaaagcagcctgcgattaaggggatcattttattatggaaatttataaaggcatgtctacatttgcagggatcgccattgggaagatcttttattataaccgggcagagtatcagctaagccagtatctgatcaataatgtaaagtatgaattgaccagatttgaacaggcaaaagaccaggttttaaaagacctgcaacatcagcttaagatggcagatcaggaagaacaaaaagaagatcttcagcatcagatcagcgtactttccatgggaagctttgaaaaagcagtggaaagtatgataaaagcggaaaaagtcagtgcagtttatgctgtgatgactacaaaagaggaattgtcagccaccttcgccagtctggaagatccagctgtgaaggagcagatccgatgtgtccgtcaaaatgctgaccatctgatcacagttcttggcggagtacttcccaggatcgatctgggaaaggaaccggtgatccttgtatcagacagcctttccccaacagagatcatggaaatggataagggacagctgcttgcggttgtgacccagcagggatcgcaggtatcccacgctgcgatcttggcccgcaccatggcagtcccttctctggtggggatttctcccaaagaagagtggaatggatcaaatgccattgtagatggatatacaggtacattgtatatccagccggacggagaatttttgaaagaatatgagatccgcaggatcgcagatatagaagaacgggaagaccttctgaaactaaggcatcagaaggacgaaacagtagatggccgtatagtgccgatctatgccaatattggcaatttagatgacctaaacagtgtgctttattatgaggcggccggtattggtcttttgcgaagtgaatttcagtatctgggaagagaaaattatcccagtgaagaggaattatttgctgcttacaaaagagtagcccagacgatgggcaggaaaagggcagtgatccgtacagtagacctgggagctgataaacaggcgaaatacttgaagatccccgaggaaatcaatcctatcatggggaatcggggaattcgtctctgccttgacagaagggaaatgtttaaggttcagctgcgtgctatttaccgtgcttccgtgtatggccgtctggcattgatgtatccaatgatcgattccatggaggagatggatgctatagagcagattcttactgaagtaagagcagagttggacgaaaaaagacagccataccaggagattccaaaggctattatgatcgagacaccggctgcagtaatgattagtgaagaattggctaaaagagtggatttcttaagccttggcaccaatgatctgacccagtatacccttgccatggacaggcagaatcctttacttcgtaacaagtataatgatcatcatccggctgtattgaagatgattcagatggtggtggatgcaggacataaaaatggacgtaaagtatacatctgtggcgagatagctgcagatacaaagcttacacacacatttatacaaatgggagtagatggcctgtctgtagttcctgcctgtatccttccggtacgccgggcagtgagaaatacagatcttacagaagggaaggactgatttatggagcaaaaaagcagagtgattcttcttccttgtaaggaatatgaggaagaagaaatttattctcttcttaaaaaagggcttgcactgcttggaggtgttgaaagcctgatcggaaaagaagaacaaatccttttaaaaccaaatcttctgaaaaaagcagaaatagaaaaggctgtgatcactcatcctattgtgatcggtgcgctggcaaggatcctgcgggaagaaggttataaccggatcatgctggcagattcttgcggaaatggaactaccagtaaggtgatacaaggaacagggatggatgcttatttggaaaagtatcacatccctgctgttgattataaagaaccagtaatggtttcctatcctcagggaatccaggcaaaggaatttatattgcctaaggagcttacagaggcggattgtgtgatttctgtgtcaaaaatgaaaacacatgcactggagcggatcacaggggcagtaaaaaacagttatggatttatatatggaagacaaaaagccattggacataccaggtatcccagtgcggatagctttgccagaatgctggttgatttgaacaagatggtaaagcccaggctgtatctgatggacggcattgttgccatggagggcaatggtccgggagcaggtgatcctgtgcctatgaatgtactgcttatgtctacagatcctgtggctcttgatagtatgtttgcaagacttgtctatctggatcctgcattggttccgacaaattatcatggagaaaagatggggcttggtacatggaaggaagaggaaatcttagttctccttcctgaaggaaaagagatctccatttcagatgctgtgaaactgtttggcaaaccagattttcatgtggatcggaaaagactccggcagaacctgtggaccaggatggctaaagcattgaatctgttccagaaaaagccctatattcaggcggatttgtgtgtgaaatgtggtatctgtgtgaatagctgtcctgtgccggaaaaggcggtggacttccgtaaggggaaagaccagccgcctgtttatgattataaaaaatgtatccggtgtttctgctgtcaggaaatgtgtcctaaaaaggcaattaaagtaagataacagcaaggggatcaaaggctgcggatcagttgtgcggtctgacggataaattccggtgtggtgccgcagcagcctcctatcacagaggcaccattttctatcagtactttcatatgtctggcaaaatcttctgcggtcatattgtatacagcatgtccctggtcatcaatggaaggcatacctgcattgggcttggcaactacaggtatggatacgttttcgtgtatattccgtatcacagataccagctgatctggtcccacagagcagttcactcctacagctgatgcaccggctgcctccagggcaagtgctgcttcaactgcattgccgccgctgaaaatactgccatctgcttctacagtcatggtgcaaaggataggaagatcgcatatactggagacagcatctacagctgccagtgtttcttcgatattgatcatggtttctgctgcaaaaagatccacacctgcatctaccaggtatccagcctgttctttgtacatttcataggcgttttcatacgtcatttcgcctgccggaaccatcatcttgccggaggtggtaatatcaccggctacataagccctgccattggcaatctctttcgaatagctgactagtgtatgattgatctggctggcttgatcctgaagattgtgcaggctaagactgcaccgattgccgccaaaggtaggagcgtagatgatctggcttcctgcttcgatatattctttctgcagtttctgaatcacatctttgtggctgagcacccattcttcggtgcatacgcctcttggcattcctgctgccatcagattggagcctgtggcgccgtcaaggagcaggatttggtctgcaagctgtaaaaaagtatctttggtcatgtataatgcctcctataatgtgagattttccgcaatttggttagaattatagcatacacgttgaaaaatatccattttaatcccataatttataaaaagaatcttaaatttaagctgtataaggattctcctcttgattttcatgtatccagcgtataaaatatggggtgattttgaatatcagctgggagatgactcccacctctataggtggtgagaaacaagctggtatcagtggtgggagtcaat

SEQ ID NO: 165 - DNA, 6002 bp, Unknown
  gut microbiota DNA sequence
atgtgatgaaaaggagaatgcaaggatgaattggaagaaaaagtttgacagggtgccaggtctggtgatcactgtgcttttactggtggtttccgtgatcttcatggttatgcttgccagaacaaagatgattccagatacctacatgattgttgccggtgtgatcctgcttttgttcgtggtcctcactgcagcccttgtatggcgaatgagcaataagatccggtttactgttggggctttgcttgggtttgtatttattgcagttcttgccattggcggtgcttacgtgaatcagacaaggacagccatcaacaagatttccggagagaagacggagatcaccaagatatctgtttatgtaaaggccgaggatacagcagattctgtggacgccaccaagggggatacatatggtatacttcaggctcttgaccgtaccaacacagacggagctgttgcccatctgaaaagccagtttgatacagatgtgaatacagtagagtttccagggcttacagaactggcagatggtcttctgaacggtcaggtacaggcactgatcctgaaccaggcttatgtggaagtcttgtccgagatggaaggatatacagacatccagtcaaagatcaaagaagttggtacagtggatgttgagaacgtgatcgccgagaaggatgaagagccggtgaagccggtagagactgctggcggtggcaagatctataccatttatatcagcggtattgatacaagaggcgagatgactgcttccagccgaagcgatgtgaatatcgtggcgaccatcaatacagagacaaagcagatcctgcttgtgtccacaccacgagattattttgttcctctttctatttccaatggagcaaaggataagctgacccatgccggtatctatggtattgatgtatgtatggatacattaggtatgctttacgatgaagatattcattattatttccgcgtgaactttggaggatttacaaagatcattgatgcacttggcggcattgatgtggattctgattatgaatttgattccagaaatattctgggatggcattacaacaaaggcgtcaatcatctggatggagagtctgctcttgtatttgcaagagagagatatgcattttctgaaggtgacagacagaggggcaagaaccagatggctgtgatcaaagcagtgctcgcaaaggcaatgtctccggatatcctgaagaattattccagtgtgatcgaaggtctggatggctgctttggcacgaatattacttatgaggagattgctgagatcctccaggatcagctgaagaatgggggcacatggaatgtggttacttacagcgtgaatggtactggtgcaaaggaaaagccatactccttaagtcagcctgcttacgttatgatcccggatgagactacagtagataaggccaaagagctgatggcaaaggtacgtgacggacagaccatcactcaggatgaggctgcttctgatacatctacccaggatctgggaatcccggaggacggtcctatcactccatcccctgttccggggcaggagggcagttcagatgcacaggaaggtactacagctgcagatactgcagcagacactacaacagcagatagtgctgcataaacttggattaaacgaatattaaaaaagacctgcaaaagtatttttcgtactttgcaggtcttttgctgtcagggataaaccaacctgaaattgtttttaattatcagaaatccagttcttttaaatatctagcaagtgcatcctgccaggtgggaagaggagtaaatccgcatttggccaacttgcttttatccagacggctgttaaatggtcttgctgcttttgaagcaccatattcagcagtagtcaccggatatacgtggcagtgatcaggagcatattccggatgtccaagggcttccgcctgacggaagatctcctttgtgaagtcataccagctgatgtagcccccctcattggtagcatgataatatccgtatttgtcggtcaaaatcatatctaccatcagacgggccaggtcaaaggtgtaggtaggggtgccaatctggtcatttaccacacgaagtgtatcgtgtgttttaccaagacttagcatggttttgataaaattctttccgttctttccaaacacccaggcaatacggataatgaagaatttggaaacaagaccggaaacagcaagttcaccgtccagtttggtctgtccgtaaacatttaatggcttgtaatccttgcagtccggatcccaaggcgactctccttgtccgtcaaatacatagtcggtagaaaggtacatcattttaatgtccagcttctggcatacctttgcaatattttctgtgcctgttacgtttaccaggcgaaccttttcctgtttatcctcatcttcagcagcatcaacagctgtccatgcagcacaatggatcacagcatccggtttgatctgtgtcaggatattttctacggccctggcatctgtaatgtccatggaaacataaggcatttcagtaaccggggaatgatcctgtataccgctgtagaccggtgcaatatcagacccaacgccttcaaagccccgcttgtgcagctcattcatcacatcatggccaagctgtcctgccacacctgttacaaaaaacttcatagcgtcctcctcacgatccttatatcagcgattgccgtacattttttcgtagtaattctgatactcgccggaaataatggtttcccaccattccttattgtcaagataccagcggatggttttcttgattccgtctgcgaattttgtttccggaagccagccaagctcattatggatcttggtaggatcgatggcataacgcatgtcatgtcccttacggtctgctacataagtaataaggctttccggtttgcccagttctttacagatgatttttacaatatcgatgttcttcatctcgttatgtccgccgatgttgtaaacttcgcctacgcggcctttatgaatgatcaggtcgattgccttgcagtgatcttctacatacaaccagtcacgtacattttcgccctttccataaaccggaagaggcttgtcattcagcgcatttgcgatcataagaggaatcagcttctcagggaagtggtatggaccgtagttgttggagcaacggctgatggttacaggcaggccgtaagttctgtggtaagcaagtaccagaaggtcagcgcctgctttggaagaactgtaagggctgcttgtatggatgggagtttcctcagtaaagaacagatccgggcggtccagaggcagatctccataaacttcgtcagtggaaacctgatggtaacgctggattccgtatttgcggcatgcatccatcagaacagcagtgccgataatattggtgttcaggaaaacctcagggttttcgatagaacggtctacatggctttctgctgcaaagtttacaaccatatccggatgctcttcttcaaaaagtttgtatacagcttctctatctgtaatgctttcttttacaaaacggaaatttggattgtccattacaggtgcaagagtggaaagattacctgcgtaggtcaggcaatccaggcagatgatccggtaatccggatatttctttaacatgtgaaaaataaagttgcttccgataaatccggcaccgccggtaacaatgatcttcattttataaattctcctttcagtgcagaacatccagatatttaccatccagaacgtcttttaaatactgtccatactgattctttttcagaacttcgtatacctttaaaacgtcttcctttgtgatccagccatttaagtaggcaatctcctccaggcaggcgatctttctgtgctgatggctttccatagtttttacaaagttggttgcctccaccagactttcatgtgtaccggtatccagccaggtaaagccctgtcccagaagctctacatttaatgtattattttcaaggtagatacggttcagatctgtgatttccagctctcctctggcacttggcttcaggttctttgcatattcaaccactcggttgtcatagaaataaaggcctgttacacagtagttgctctttggatgctctggcttttcctcgatggaaactgcttttccgtctttgtcgaactctacgataccgaaacgctccggatcatctacatagtaaccgaaaacagtggctcctttgccagattctgcgttttcaacagctgcttttaacctttttttcaggccatgtccagcgaaaatattatcaccaagaaccattgcaacggtatcattgccgataaaatcggcaccaatgataaaggcctgtgcaagtccgtccgggcttggctgtacagcataggtaagatgtacaccgaactgatgtccatcccctagaagctcatggaatcttggggtatcctgaggtgtggaaatgatcaggatatcacggattcctgcgttcatcaatacggacatgggatagtagatcataggtttgtcataaatcggtaacagctgtttggatgttaccatggtaagcggataaagacgggtaccggagcctccggcaagaataattcccttcatagtaatatcttctcctttgttttgtaaatggtgcgttatttatgataatttcagtataaaagataacgtaaggtcactttcaaggacttttttacaatttttttaaatttgttactttttcacaaagaaaaagtcctgcatctttagtaatgtgaaacccatgctctgtttttttctccacaaaggagcggaattccttgtaatgatccagaatatattgattctgattgccgtggcaggaaaggatataggagatcagaggctgggcatcaggaaccacaaggtgatcaggataggattcccaggttactgaggaaaaatacctggacagaatcccggctccgttttctctgccaaatttctcataaagcttttctgcggaaagaacgatccggtcatcaaaatcctgaacaagctgacttacctctcgcatatggctgctgctgtatgtggaacacaggaacaaaccgccaggctttaatacacggcttacttcctggcatacatccccgattctgtcacagtaaaagagtacgtggcctgcgatcaccaggtcaaagctttcatctgggaaaggtatctgatggcagtcaaaggcagtataggaaaaacggggatccactcctcctatggctcttcgggcatcacggagaataccgcttgaagtgtcggaaagggttatggaaatattcctgggaaggcaggaaagattctctgtccataaagtaccgtcgccacagccgatctcaagcactttcataccatctgtcagatgacaatgctggtaaaaccaggggaaccatccctggtggttcacagaataaagactgtgcagattgattctggcagaaatattggaggcatcctggtattggttcttcaggctgttttccatgcctgtaagatgaatcaagttcagcatctggctccagtttactgtatgctcctttcggatcatgtctgcagtatccagtatagcctgttctaccatttccatttgttcaatccggtctcgtacaagcttcagctgcacatccagggaattaagcatgaagtgataatctgaatcatcaatggtcattttacggatatcgtccagagaaaagcctaagtattttaaaagaaggatctgctgcagacgggcaaaatcctcatctgtataaaaacgtgctcctgcaggggatacatatgagggtttcaggatgtcctgcttatcgtaataacggatggtacgaagggtaacgtgggccatccttgcaaattcaccggaagaatagtagccgttttttttcatgggaaaagtgcctccttacatttgaaatatggctggcacagat

SEQ ID NO: 166 - DNA, 15450 bp, Unknown
  gut microbiota DNA sequence
ggaattctgtgacagaacaagaatatgtatgtttatttctaagaaagtatggtatcatatacaaatattataaaataaaaacgagggattttatgagaatcgaactggaagatgagaataagaaaaagcagcaggaggaacagacctgtcagcagctgagtcagaaacatgaatcggatcttactaaaaaagaaaaaaggcttctggaaaaagaaaaattaaaaggaatggactggaaaggaaaactgcagtatatctggatgtattataaggtatggatttttgcggcaatagggatagttttcctggcttttggaatacgcagctggatagaaaatgcccggacaaaaacagtcttatccattgctgtgacagattcagcaggttctgattatgaaactgtccaagaaaacctaaaagaattattggggattgaccaggatccataccagaaggttgatattacagaaacattggtatcaaatgaaaatggtacccagttggatacatacagccaggtggcttttgtgacaaaggttcaggcgcaggcttttgatgtggtattaatgccggaaacactttgcagttcctttgaaaaggaaggttattttatggatcttgatcagctgttagatcaggatacccttcaggcagcagggcaaaaggtacaggaaaatcacattctggtttctgatcaaagtctgaaagaacagtttggggttaaatatgagccggtatgtgtggccgtgcttgttaatgcccagaatacggaagcggctttaaagtggctgaagcagctgcttatgtaggccggagaaagactccggcaattagtgtttttccacttttcttccaataagattcaggattccatataaaagcatggcaatgatcatcaggatcacaatggacatcagtacccaggtaagcttaaaggtctggcttccatagatgatcaggtatcccagtccttgtctggcaccaatgaattccccaatgatcacgccaaccagacaaagacctatgtttaccttcatgttgcttagtatggtaggtacagaagagggaaggacgatcttaaataattcatctatcctaccacccccaagggttcgtatcagtttcagcttttcctggctgatttcggtaaagcctgtatacaggttgagaatacagccgaagatggcaacggatatgccggatacaataatagttttctcgttggcacccagccagacaataagaagtggagcaagtgcagattttggcaggctgttcagaaccaccaggtaaggctccaggattctggaaatttttgggaaaagccataggatcactgcacttaagataccaaggctcattacaagaaaaaagctgatcagggtttctgacagtgtgatgcggatatgcaaggtaagagattgttctttcaacatttttacaaaggttttcaggatcagggaagggctggaaaaaataaaggaatcgatccactgtttttgggaagcggtttcccagaaaaacaggaaaaaagcaagaagcaggagcctggatgcatggatcaggatcctgtctctttttaacctgataagatattgctgttgtctgaaagagtgattattcattctgattcagctccttccatattagattaaagtaatatttaaaaagcgaggcatttctggaggacataggtgttctgtctttcaggtcaagctcaatggggatgatctttttcacaacagcaggacgttttgacaggatcactacacgatcagccatactaatggcttctccgatatcatgagtcaccagaattgcaggcttattttctttcttcaggatttttccaatatcatcgcttacattcagacgtgtctgataatcaagggcagaaaagggctcatcaaggagtagaagctccggcttcagcagcagggtacggattagggcagcacgctgccgcatgcctccagacaactgggacggtctggcatttctgaatttatccagaccataagtggccagcatctgatctgccagctcttttttggagggagtaagctgatgacggatctccagccccagaataacatttctgtatatggatctccattccagcagatggtctttctgcagcatatatcctatacgtgtgtttggggtttctacaggcagatcccccatatagatggagcctttttcaggtgttaaaagtccactgatcagattcagaagagtagacttcccacatccggatggaccggcaatggcaagaaactcaccaggcatcaggtcaaaggatatattagaaagggctggcgtttccccggaagggctgtggtaggagaggcttacgtctctgacttccagtagtggcttcatttattttgcctccaatttaatatattttatcatatgcttttgtaagaaattatgatataatgctgagaaaaggaattttaaatgaaagagataatccaatgtcaagcaaaagaaaaacgatttttaatctggtatttctggttgttgtttttgtgctgaccatccattttgtatttcgaggagaggatatcggtgatatccttcaggcagtgagggatgccgactggcggtatctgctgctgggattggtctgtgtgatactttttattttgggagaatcaacgatcattttctatatgatgcgtactttgggagcaaaggtaaagatgggacactgcgccctgtattcctttgtaggcttttttttcagctgcattactccatctgcgtccggaggacagccaatgcagatctatttcatgaaaaaggacaagatgcctgtccctgtgaccacgctggtactgatgatcgttaccattacatataaggctgtgcttgtactgatcggtgtggcagcagctatatttggcagtggttttctcagaggatatcttggagattacatgtgggtcttttatctgggattgggacttaatattttttgcgttaccctgatgctgactctggtatttgctcctggtcttgcaaaatggctgatggtaaagggactgaagcttctggagcatgtaaagttcctgaagaaaaaggaaagccgtttgaaaaagctggaagagtctatggatcagtaccatgccactgcagctttttgggcaggccataaaaggatcatcctgaatgtatttcttattactctggttcaacgatgtattttgttcaccattacctattgggtgtaccgttcgctgggacttcattcagtgggcttttttgccattacactgctgcagtccatgatttccgtatcagtggatatgcttccgctgcctggcggcatgggtatcagtgagactctttacatccgcatgtttgagccggtgtttggcgatctgcttctgccgtccatgcttcttagcagaggattgtcttattatgggcagatgctgatcagtgccataatgacctgtgttgcatattttgtgatacgggatgatacacaaacagaaaaaaaggagaaaagcgtatgttaggtttttatgattatacagttgttctgacttatataagtctggggatttccattgtgggtatgacacgggcattggaaggggattttcgggtagctattctgtgtcttgccctgtccgggctttgtgatatgtttgacgggaagatcgcccgtaccaagaagaatcgtacagaagatgagaagagattcggcatccagatcgattccttgtgtgatgtggtctgttttggagtttttcccattatgatctgctattgcctggggatgcggggagcattcagtgtgttcatccttgctctttacggaatggcctctgtgatccgtcttgctttttttaatgtaatggaagaaaagcgtcagaatgaaactgcagaaaccaggaaatattatcaggggctgcctattacgtctatggcgatcattttacctttcctatatctgttaagaagatgttgtggcagacactttcttcttgtgatcaatgtggcagtggtggttgtaggagtactgtttatcagcgacattaaagtaaagaaaccacagaatccaatgatcattctgctggttgcactggtaggcattgcacttgcatttatgttccatttgttataaagatgaaatccgcaggtatcacagccccaaccttttgatcctggtatcattatttttattttggctctggtaccatcattttattataaaggtgttgaatacaaatgaactatatagacagaaaaggaaatatcacaattgaagaaaacggacaggacaagcttctccactttctgtacaatgaccggggaggaagactttgcctgaaactgctggtacgtccatttgtctcaaaggcagcaggtgttttcctgaatagcccgctatcagcagggatggttcctggttttgtgaaaaaaaatcagattgatttgtctgcgtatacaaagcagagatttcgctcttacaatgatttttttaccagaaggatcagacccggggaacgtatgattgcccagggagagaatctgctgatcagtccctgtgacgggaagactactgtatgcaggatcggggcagataccaggttctatataaaggacactttgtatactgctgcacagctccttagaaacgaaagactggcagaccattataagggtggatatgctgtgatccttcggctgacggtggatgattaccatcattactgttatgtggcagatggacagaaatcaaaaaatgttacgctgcccgggatctatcatactgttaatccggcagctaatgatgcgtttcctatttaccgtgagaatgcaagagaatatactttgatccgtacagagaagtttggcaccataatgatgatggaagtaggtgccatgatggttggaaagatcacaaacctggaaaaggattcctgccaggtgaaaaagggagcagaaaaaggctattttgaatttggaggctccacgattattctgtttttgcagcatggaaaggtgcggctggacagtgacctgctggagaatacagaagctggatatgagacgattgtaaggatgggcgagagaattggtgaatgtaaattatcaaaaagaactggaaaatctgattaaaaaagaacaggagcaggggcatgtaccaaggctttttttacatgcctgctgtgctccatgcagcagttatgtgctggaatacctttcacagtatttcaggatcacagtttttttctataatcctaatatagcacctgcagaagagtatgccaaacgtgtggcagagattcgcaggctgatacaagagatgaaatttgaacatcctgtggatcttctcgaaggagaatattgtccgcaggatttttatgatatggcgaaaggacttgagaatgttcctgaaggaggagaacggtgttttggctgctatcggcttcggatggagcaggcagcccgcctggccaaagaaggcgggtatgattattttacaactacgttgtcgatcagtcccctgaaaaatgcggtaaagatcaatgagatcggagaagaactaggagagatttatcaggtatctcatctgccgtcagactttaagaaaaaggatggatataagcggtctatccagctttccagggaatatggactgtacaggcagaattactgcggatgcgtgttttccaggagagacaggaaggaagaactttccaaactggataatctgtgataaactgtcatagaaaaatgtaatggtgcagcagactttaaggatatggctgttgaactgtttgcaaaaaaataaaagaaatgaggaagaaacatggcacagctttggggcggacgtttcacaaaagaaacagataaacttgtatacaattttaatgcatcgatttcttttgaccagaagttttacgagcaggacatcagaggcagtatggcccatgtggagatgctggcaaagcaggggattcttacagcggaagaaaaggacaagatcatggaagggcttggcagcattatggaagatgtaaaggagggaaggcttgccataacttccgagtatgaagacatccacagctttgtggaggccaacctgatccaacgtgtaggcgatgcaggtaagaagctgcataccggcaggagccgtaatgaccaggtagccctggatatgaagctttatgtgcgtgatgagattgatgcgattgacggtgaggtaaaggatcttctgaaggctcttcttaagatcatggaaggcaatgtacagacctggatgccaggttttacccatcttcagaaagcacagccggttacgcttgcccatcatattggtgcatattttgagatgttccgaagagacagagggcgtcttatggatatccgcaaaaggatgaatacttgtcctttgggagccggtgcacttgcaggtactacatatccgctggacagggcgtatacagcacagcttctgggatttgatgagcctaccaggaacagtatggattctgtttctgacagagattatgtgatcgaacttttatcagccctttctacgatcatgatgcatctcagccgtttttctgaggagatcattatgtggaattccaatgaataccagtttgtggagattgatgatgcctacagtacaggcagcagtattatgccacagaagaagaatccggatattgcagagctggtacgtggtaagactggtcgtgtatatggtgctcttatgtctattcttacaactatgaaagggattccactggcatataataaagacatgcaggaagataaggaactaacctttgatgccattgatacagttaaaggctgcttggcattatttacaggtatggtatctaccatggagtttaagaaggacaatatggaagccagtgcaaagaatggctttaccaatgctacagatgcggcagattatctggtgaaccatggtgtgcctttcagggatgcccacgggatcgtaggccagcttgtattgaagtgtattgaacttggtacttccctggatcatcttcctcttgccgaatatcaggcgatcagccccgttttccaggaagatatttaccaggctgtaagtatgaaaacctgtgtggaaaagcgtactacttacggagctccgggaccggaggttatgcgtcaggtgatccaggaaaacaaaaaatatctggaagagaattaataacagcataaataacaaaaaaaggcttgcttttttggtaagattgttatagtatttgatgaaaagacaaatgtacgtggaataaagacatgccaataggatgtatgcgtgcaaaaaacactgaggagatcatattatgagtgaaaaattaaaagttggtattttaggagcaaccggcatggtaggtcagagatttatttctctgcttgagaatcatccatggtttcaggtagtaacagtagctgcaagcccaagaagcgcaggaaagacataccaggaggccgttggcggccgttggaaaatggatactcctatgccggaggctgtaaaggacctgatcgttatgaatgttaatgaggttgagaaggttgcttctactgtagactttgtattttctgctgttgatatgacaaaagaagagatcaaggcaatcgaagaagaatatgcaaagacagagacaccagttgtttccaataacagtgcacacagatggacaccggatgttcccatggttattccggagatcaatcctgagcattttgaagtgatcaaacaccagaaagaacgtcttggcacaaagagaggattcattgcagttaaaccgaactgttctattcagagctatgcacctgttctcactgcatggaaggaatttgaaccatatgaagtagttgctactacttatcaggctatttccggtgcaggcaagaccttcaaagactggccggagatggaacacaatattattccatatatcggcggtgaggaggagaagagtgagaaagagcctcttcgtatctggggcacgatccagaatggtgagatcgtacctgcaaaagagccggttattacctgtcagtgtgtacgtgtgccgatcctgaatggacatacagcagctgtttttgtaaaattcagaaagaaaccaaccaaagagcagctggttaatgcattaagagagtttaaaggcattccccaggagcttcagcttccaagtgcgccgaagcagtttatccagtatctggaagaggacaatcggccacaggttacagcagatgttgattttgaacatggtatgggcgtttctgtaggacgtcttcgtgaggatacggtatatgactggaagtttatcggactgtctcataatacagtaagaggtgcagctggcggtgctgttctttgcgctgagactttgaaagcaaagggttatatccaggcgaaataaaaaggaggtggcgatttggaccagagagagaagatccggctgaccactctttcccatacatccgggtgagcggccaaattaggtccggggacccttgctcaggttctgagcaagctgccaaaattttacgattcaaatcttctggtaggcacagaaacatcagatgatgctgctgtctaccagatcaaccaggatctggccatgatacagactgtagatttttttacacctgtcgtggacgatccttatacctttggacagatcgctgcagccaatgcattaagcgatgtgtatgccatgggtggagagccgaagctggctttgaatattgctgcttttccaaactgcctttctccggatatccttggggatattatgaggggaggagcagacaaggtaaaagaagcaggcgccgttcttgcaggcggacatacgatccaggatgatgagcctaagtacggattatgtgttaccggttttgtacatccggatcatctatggaaaaatataggggctttgccaggggatcgtctgatccttacgaaacctgttggtacagggattttgactaccgccctgaaggctgatttcttaagcagggatgaggggcaggaagtgatccgggtaatgagctggctgaacaaatatgccagggatgcggtggcagatctggagatccatgcatgtacggatattaccggatttggtcttgcaggtcattgtcttgaaatggcccagggcagtggtgtgagtctgtgcatcgatccgctttcagtgcctatacagaaaggagccctggaatatgcttccatgggaatggtacctgccggtgcctacaggaataaagagtttaccggggacaaatgcagctggggagatactgctcctgagcttatagatgtgctttgcgatccccaaacatccggtggacttcttcttgcagtatctgagaaggattctttggaagctgtgaaaagattatcaagtcttcaattcccaggtgcaataattggcaaggcaattcccaggaaagatgctgatttgctgtttatgagagaataataacaggtattattataaactataaaaccctgaataggttattggtaattatttctcaaagtctattgtgaaaaaaacatcaaagtgttataatataccggtagtaaaaattagcgactgtaaaatactgttgcagttgcacaaatttcataaaccagcggaggtgttttttatgaactacgaggatgtacagaaacttgctaacgccgcaaaagccaagatcggtcttttaaacggcaatttcctgaaatactttcttcgggctgtcatggcaggattttttattgacatggccatgatctacagtaatgtggtgggaaatgtattttcagcgaatgcacctgaatgggggaaatttctgggggctttggttttctctattgcagtgcttttgatctgcctggtaggtggagagttatttaccggcaataatatggttatggcatttggcgcttatgataagagcgtgtcatggaaggatgccggaaaggtatggctggtaagctatatcggtaattttgtaggatgtctgatcctggctctgatctttgtatgggcaggggcatccggtacagcagattatttcggaggatttatcaacaacaagctgacaatgcctgcaggccagatgttcttcagggcagtgctttgtaacttctttgtatgccttggcgtgctttgtggaattaagttaaaaagcgaaacaggaaaattcctgatgatcgttatgtgtatttcaggatttgttgtaagcggatttgagcatagcattgccaatatgggaatttttgttacttcctattgtctggtagatgggctttccatcggactgatgctgaagaatcttctgattgtaacacttggaaatatggtaggcggtgctctgctgcttgcatggccgctgagaaagatgagtgcagataaataatgtcaaaagctttatacatagccgagaagcccagtgtggctcaggaatttgcaaaagctttaaagatcaacggacaaagaagggatggttatctggagtctgatacttctgtagtgacctggtgtgtagggcacctggtcactatgagctatcctgaaaaatatgatatgaaatacaaaaggtggagttttgataccctgccttttttgccccgtgactttaaatacgaagtgattccaggcgttcagaaacagtttcagattgtaaagggccttttaaacaggccggatatagagaccatctatgtgtgtacggactctggacgggagggagaatatatctaccggctggtggcacagatggctggtgtaaaaggaaaaaaagaaaaaagagtttggattgattctcagacagaagaagaaattatgcgagggatccgtgatgcaaaggatatttcagaatatgacaatcttgcagcttctgcttaccttcgtgcaaaagaagattatctgatggggatcaatttttcgcgtgtactgactttgcgttatgggaacagtgtatctaattatctaagttccaaatatcaggctatttctgtaggaagagtaatgacctgtgtgcttgggatggtagtacgcagggaacgggagatccgttcttttgtgaaaacaccattttaccgtgtggtcagtagtattgtacttgaaggagaaaaattcgagggtgaatggagggcagtagaaggcagctcttatttccagtcccctgtattatataaagaaaacggttttaagaaaaaagaagatgccagagggctgatccaaagcctgtcatctgtgcagcctttgtcctgtacagtagagaaggtggagcggaaaaaggaaaataagaatccaccgcttttgtttaacctggcagagctgcagaatgtgtgctccaagctatttaagatcagccctgatgaaacgttggcagtggtgcaggaattatatgagaaaaagctggtaacctaccccaggacagatgccagggtactgtcaacagcagtggcaaaggtaatctctaagaatatatccgggctgcagaattacgggcctgctgcagatgctgcaaaagaagctttttctatgggaacctggcaaaccatagccaagacacgatatgtaaatgacaagcagatcacagaccattatgccattatacctacaggacagggacttggcaacttaaaaggcctgtcctttacttctcagcgggtttatgagactatcgtgagacgttttctgtgtattttttatcctcctgcagtgtatcagaaggtttccattgtaaccaggatggggaatgaatcctttttctcttcttttaaagtgttggtaagtgaaggatacctgaagattgcagccaattcatttgcaagaaagaaggcttctgatacagaagggaaagctgcagaaggaaagtccgaagaagacagtgaagatgtggcctgtgatgcagcgcttcttggtgcattgcagaaactgaggaaaaatgatatactttccgtggacagtttaaatattaaagaaggggaaacatcccctcctaaaagatacaattcaggctccatgatccttgctatggaaaatgcaggacagcttattgaagacgaggagctgcgtgcacagattaaaggcagcgggatcggtacaagtgctaccagggcagagatcctgaaaaagctgtttaatattaagtatctgtctttgaataagaaaacacagatgatcactcccacacttttaggcgagatgatttatgacgtagtgaattgctccatccgtcagcttctgaatccggagcttacagcaagctgggaaaagggactgacttatgtggcagagggatctattacagagcaggaatatatggataagctggaacattttgtacgcatccgcaccaatcaggtggaggccagcaattatcagtatgctttgcggcaattctttgatgcatcggcacagtattataaaaagccggagagaagtaccagaagtgcttcttccgggaaacaaggaggaaaatcattatgatgaaggattttactatttctaatcttctggatctgaacgaaacgattgcaggggaattatttgaaggaaagacctatccctgggaagtgcttccggagatcggggattttatcataaagctgggaaatacattagatccagcagagtatgagcatctggagggagatatctggatcgccagatctgcccaggtagtatctactgccagcatccatggaccggctatcattggtaagaatgcagaagtacgccactgcgcatttatcagaggcaaggcgatcgtaggagagggctgtgtagtaggcaattctacagagcttaagaatgtagtactttttaattgtgtgcaggtacctcattacaattatgtgggagattctgtgcttgggtataagtctcatatgggagctggttctatctgttccaatgtgaaatctgacaaaaaactggtgattgttaaagatgggcaggagcaggtagagaccggatttaagaagtttggcgcaatgctgggagatcatgtggaagtaggctgtggttctgtgctgaatcctggctccgtgatcggcagaaataccaatatttatcctctttcctctgtacgtggctgcgttccgagtgacagcatcttcaaaaacggggaaccggttcccaaaagggaaatgtaaaggatatataagtgtgggaacatacaatatagaacataaaaatataacataaaaaaataccaccggataacctaaaagttacctggtggtattttatatcagctgggagtcaatcccccagctgatatagcctccggcaggattgcagaggtgcgcagtagaagtatgtcatgcaattgcatgacgcgcacctcgcagcaagaatgccgaggcattcttgaatgaattagaacttaccagccttagcagcttcctcaacggaaacagcaactgccacagtagcaccaaccatcgggttgttacccataccgatcagacccatcatctcaacgtgagccggtacagaagaagaaccagcgaactgagcatcagagtgcatacgtcccatagtatctgtcataccgtaggaagcaggacctgctgccatgttgtccgggtgaagtgtacgtcctgtaccaccgccggaagcaacggagaagtatttcttaccctgctcgatacattcttttttgtatgtacctgcaaccggatgctggaaacgggtcgggtttgtggagttacctgtgatggaaacaccaacattctcgtgatgcatgatagcaacaccttcctgaacgtcatctgcaccgtagcatttaacagtagcacgaagaccgttggaatatggtttctcatagacaatatttaatttagcttctttgtaatcatattttgtctcaacaaatgtgaaaccgttgatacgggaaatgatctgagcagcgtcttttccaagaccgttcaggataacacgtaatggtttctgacgtactttgtttgctttctctgcgataccgatagcaccctcagcagctgcgaaggactcatggcctgcaaggaagcagaagcactctgtctcttcctcaagaagcattttgccaaggttaccatggccaagacctacttttctgtggtcagcaacagaacctgggatacagaaagcctgaaggccttctccgatagcagcagcagcttcagaagcttttctgcagccttttttgattgcaatggcagcacctacagtgtatgcccagcaagcattctcaaagcagattggctggatcttctttacctgatcatatacattaagtccagcatcttttgtaattttctcagcttcttcgatagagctgataccatagctgtttaatacagcattgatctggtcaattcttctttcataactttcaaataatgccattttatgttcgtctcctttcgtttcctgattactcttctcttgggtcgataatcttaacggcatctgctacacggccatactgaccttttgctttttcccatgcggtgttaggatcatcaccttttttgatgaagtcggtcatctttccaagagaaacgaactgatatccgattacttcattatcctcgtcaagagcgatacctgttacatatccctctgccatctcgaggtaacgaacacctttttcttttgtagcatacatggtaccaacctgggaacgaagacccttaccaagatcctcaagtccggcacctacagcaagtccgtcatcagagaaagcactctgagtacgtccatatacgatctggaggaataattctctcattgcggtgttgatcgcatcacagacaaggtcagtatttaaagcttccaggatagttttgccctgaaggatctcagctgccatagctgcagaatgagtcatacctgaacatccgatcgtttcaacaagagcttcctcgattacaccattttttacattcagggacagcttgcatgcaccctgctgtggagcacaccagccaacgccgtgtgtaaaaccagaaatatcttcaatttttttggaatgaacccattttccttcttcaggaattggagcaggctcatgttttgcgcccttagctacaggacacatgttttcaacttccttagtgtaaatcattttaagactcctttcagtattagtgaacttaatgttgttaaaagtctaacaactcagtgtagcgctccttaagggagtctcccatagcggaacgctttactggtgttattctctcacaaaatgcccaattcgtccagtcataatttgtaaaaaaacatagaaaaaagagaaagtgcttgaataaaaaatataaatgagcaacagccaccgaaaaaattttctttacttttctgatttacttactataatgcaattatcggatgcgtcattggagaggagagaaatatgatatagcctccggcaggattgcagagg

SEQ ID NO: 167 - DNA, 5232 bp, Unknown
  gut microbiota DNA sequence
tgcagatataaatcaaagattggtgatattttgctggctgcagatgaaattaagttggaacaagcaaacctaagttaaaggagtacaggatggaacagacaaagcaattacaggattcatttatgccggaaaagttccgggttttaagcggcagtgcattaaaagtactggctatggtgatcatgctgatcgaccatacagctgcatttcttctggtgaaatcagcggctgccaccaggactttatttgttcttggaggcacggatatatcgatttataggatcatgcgggatgtgggcagggctgcatttcccattttttgttttcttctggtggagggctttgtccatacacacaaccgctttaaatatggaagaaatctcctgatctttgcctgtatttcagaaattccctgggatctggtacataaaggtacattctttgatatgtctacccagaatgtgttttttacactgtttttgggttatctggctttttgtgcagttgattattataaagacaaccagctgatgcagcttatctgcatggccgggctttttgctgtatcatggaacctgcatgcagattacagctacagagggtatgtattccttcttatcatgtactggctgaaggagaagagagcagcccaggcggtgatcggtacaagctggctgatctatgagtggaaagcatgctttgcttttctttctatcaatatgtataacggacagagaggattcattaaaggaaaatgggcaaaatactttttctatgttttttaccctgcgcatatcctgatcctgttcctgatccggcggatgctttatcagatgtagatcactcctcctctttttatgatgttttgattgacatataggatgcactgctatagaatagaaaaagttatcgtaaaaaacggatgcgtcaaaaatatttatctcagtcgagaagactcccacctctttcaggtggtgagtaacagtaagttagtcttagtgggagttcaatctccgactgagataaacgctccgcgaggatgcacagtgattctgcaaagaatatgtcagcttacgctgaccagaatcacgcgccaagtctcgcggctgctcgacttgaacaaaacacattgagagggggattttcatggaaaaaaatgccgtggaaaaagaaaacaaaatgggcgttatgcctgttggaaaattgcttgtatcaatgtctgtcccgatcatgatttccatgctggttcaggcattgtataatattgtagacagtatgtttgttgcaaagctaaatgagaatgcactgacagctgtttcattggcctttcctgtacagaacctgatgatcgcagtaggtacaggtaccggtgtaggtattaatgcccttgtgtcacggtctctgggcgagaagaatacggaatatgccaacaaggctgctaataacggcattatcctttgcctgttaagcgcattgacttttgccgtgcttaccggagtcttcggacatacattctttgccgttcagacgcaggatccccagatcctttcttatggaacggtctatgtaaggatcatagggatgatgtcatttggactgtttatgcagcttgtatttgaaagactgctgcaggcaaccggaaggacgttttattccatgctgacccagcttctgggtgcgatcctgaatattattctggatccgatcatgatttttggccttttcggttttcccaggatggaggtggcaggtgctgcccttgccactgtaacggggcagattattgctgctattgtaggatattttgtaaatcatcatattaataaggaactccatatttccctggtgaaatataagctgtccgcaaatgttgtaaaaaatatttacagtgttgggttcccgtctattatcatggcttccgtaggatctgttatgacctttggtatgaataagatcctgatgggattttcctctactgcaaccgcagtatttggagtttatttcaagcttcagagttttgtatttatgccggtatttggtctgaataatggtatggtgcccatcatttcttacaattacggagccaaaaagccggatcgtatcacaaagacgatccggatcagtgtggctatgggcgttgggatcatgcttttgggatttgcagtattccagctgttccctcaggagcttctgaatattttcagcgcttcagatactatgcgggaaattggaataccggctcttcgcattatcagttttagctttttgctggctggtttcagtgtggtttcctcctctgtataccagtccctgcgccatggcttcttaagcctggcagtatctgtgttaagacagctggtagtgcttcttccggcggcctttattctggcacggacaggcgggatcaaagctacctggtggtcattccctattgcagaattgttttcctttgtgatctgtgtgctgttcctcagatatgtttataaagcggagatcgatccgttgaagaaataaaagaaaagccagttttctccggaatcacccggggcaaactggcttattaaatgtcttattaattgtcttatcccatatggatcgttacctggtattctttctttccctcttcaaaaggaatcagattgccggaaatctgtttttcgtcgatttccagatattttacccccttttcaacgtggtcaggatttgagataaaaagatgatatactgcgcccctaaacctgcgggtgaccgtgaaatccccaaagtctgcaggaatgcatgggtctacacacaaaccgtcatagcttggctgtatgccaaggatggcctgggaaagatttacaaatgtccaggcagcagtgcctgtaagccagctgtttttggcttccccgtgccgtggggcatcccttcctgcaatcatctgagaataaatataaggttctgtcctgtggatctggctgatattctcaatataggaaggacaggtttttttatagatctgaaaagcacggctgcctctgccgatcatggtttctccgatggaaatccagggattgttatggcagaaaatgcctgcattttctttataacctggcggataggaggagatttccccaaggttcaggtagtatctggtataagcaggctgctgtaccatgataccgtatttggtatccagccgttcttttacagaatccagtgctttttctgccaggccttcctttataccgatccctgccattacgcagaatccctgaggctcaataaagatctggccttcttcacattcatgggaacctatcttttgggatgttgcgtcataggcgcgaaggaaccagtcaccatcccagccggaggcaagcactgcctggtacatggcatcaactgcatcttttgcctgaagagcttcctctgtgtggccatatttttcgcagatggtttgaaattccctgccgtattttacaaacattcctgcaatgaaaactgattctgccacaggaccttcagaaggaccagtagtctggaatggctccccaggctcactggaaaagcagttcaggttcagacagtcgttccagtctgcacggccgatcaatggtagtttatggggacctaagtgggtacaggtataatggaagctgcgaagcagatgctggaaaaagggttgtgcttttgaggtgtcgcagtcaaaggcaaccatttcgcctaaaatagaaaaatcaccggtttccttcaggtaagcagaagcagctgcgatcagccataacgggtcatcgttaaatccgcttccaatatccagattgcctttcttggtgagaggctgatattgatgataagcactgccatcttcaaattgagtagcagcaatatcaaggatacgctctcttgcgcgttcaggtacaagatgtacaaagccaagaagatcctgacaggaatctcgaaagcccatgcctcttcctgtaccggattcgtagtaggaagcagagcgggaaaggttaaaagtgaccatacactggtactggttccagatatttgccatacggtttacatgaggatcctggctgtttacaaaaaatcgggagagcagatcctcccagtaatggttcagatcctggaatgctttctgcacctgtgcggaagtatggtatttttcctgcatggcaagagctgtggtcttgcggatcacatttggtgcttcccatttttcttcccgaggattttcacaatacccaagaaggaatatcagttctttcttttcccctggggcaagtacaagatcaatctggtgactggcgatgggataccatccactggcaacagaaccagtacattttccctgctctacggccagaggccggtcatttccacggcgcactcccagaaattcatctctgctggtgtcaaagccgtcaatgggcgtatttacagaaaagaagctgtagtgatttcttcgctccctgtattctgttttgtggtaaatagcgcttccctggatctccacttctccaatacttaaattacgctggaaattggtcatatcatctactgcattccacagacaaaactccacataggaaaaaagggaaagctttttggaagaagcggattggttttttaaggtaagtatattgatctcgcaaggagtgtctacaggtacaaaagccagaagatcagcagaaagctggtttttgattccatggaaacggctgtatccaagaccgtgtctgcattggtattcgtccagaggggttctggtgggcattgtaccaggattccagatcacatccccttcttttatgtaatagtattttccgttggaatctgccggaagattattatagcggtaacgggtaagccggagcagctttgcatctttatagaaactgtaaccaccacaggtgttggagatcaggctgaaaaagtcctgagatcccagataattgatccatggaagtggagtgtccggggttgtgatcacatactcctttttttcgtcgtcaaagaaaccgaacttcattggaaatcctcccttgtgaaagattagagcctgacatgtacagtgcctgtcatcatgcttgcagctctgaaaaaaagtatatgcgaaaacgaatgagttctgataattcaatagaaataaaagaaacattagaaaacaacataaaaaaaatcaaatataaagaagttattcctataaaaagatggaataattatcttgactttactatatctgag

SEQ ID NO: 168 - DNA, 1007 bp, Unknown
  gut microbiota DNA sequence
ctgatgttccaaaaagcttttgatagtaaaatgataccatcaaatccagtccaggatataaaactacctgccagggattattcaccggcatcaaataatgttgaaaaagatctgcagtgcataagtgtaactcaatcagaaactttttttaaggcatgtaaagatacaagatattatgaactattttatctattaatacatacaggaatgcgcatcggggaggcctgtgctcttacatggacagatattgattttgataataaattaattcatatcaataaaactctgaaccaggtttccatatattatgacaataatggaaatcctcttccggaacataaatttgttatacagataacgaccccgaaacaaaccaaaagctgcagaaatgttcctttgtcagaacaagtttcagaagcacttctcatgtggaaagcaaaacaaacggctgataaaaagcaatgtaagcactggggagacgaaaacagtttactaacgatgtatccagatctggtatttaccacctgcaacggcaaagcatatacgcctaacgatgcaagtaaagaatgtagaagaatcatggataaaataaatgcaaatgaaaaaacttgctgaactggaaaagagaatgcctgtgctattaaatattcatcctcacatgttccggcacacatttattacacgttgcatatagtcaggaattcccgcagaaactactgccaaaatagtaggccatgcagatataaggatgacgcattattacacccatattgaggatgaattcatgaaaaaggaatatgcaaagttctcagaaaactatacagaagaaagaggaaattaaattgccaacagaaaaaccaacccagaataccagttcgaatacagatatgggtaatatatgggtcaaaacggcctcagcgaagcctgaaatccgcataaacacaggggttttggccgatattcccaagttatcaccgatgatgaattagtgaaatttcagtatcgtt

SEQ ID NO: 169 - DNA, 784 bp, Unknown
  gut microbiota DNA sequence
tttgtggaatccgtcttattgtgccgtcacagtcagtgaccggagccgtgagcaggtatctgcctatatcaaaggccagaaggaaaaagaaaagagaaagctctgagtacaggggtcattccagaatcgtttgtttttacgagaaaggtggaagaagatgcggacagtatccagctatggtgtggagatacgaaaacagaatatcccggtccggcaaacaatggaggtctatcgtcaggcagtcggttacctgacagagatctacgcacaggtctgggaagacctgaggaagatcccggagacaaaaaagcgttttaataccgcagagcatatggtacacatgacgaagaaaaacacagctcggtttgattttgatcttcgttttccgaagatgccgtcttacctccgcaggtccgcgatccagcatgcgcttggaagtgtatcttcgtatgagacccggctggggcagtggaaagaacaagagcccggagtgctgtccggaaggccgaaacttacctgcaagaaccatgccatgccggtcttttaccgggatgtgatgtaccgcgaaggagcagaaggaaaagatgaagcatatctgaaactgtacgacgggcatgactggaaatggttccgtgtatatttaaaacgtaccgatatggaatatcttcgcaggaactggaaaggaaagaaggcatcggcccctacgctggaaaggagacaccgccggtatttcctgcgtttttcctatacagaagaagtaacactgacgaaaacaccggtaaaa

SEQ ID NO: 170 - DNA, 2151 bp, Unknown
  gut microbiota DNA sequence
gatggattaccgtatactttgcaagtcgcatcctcgcggagcgtttttgcgtatgtgtaataggaacattacggagtaatctcctattacataaaaaaaagccctttgagaacaggatttctcccctctcaaagagcaagtcattcttttgtaatggctgtttgcagaccttgcagatcatccgtgtcaggatgagacaacgcacggtcaaaattgtcaatcagcatatcaagattcgccggatgctccggattctctttcatcctcagataacgttccctcacagactgtggcattttcccctgacacatatattctccgacaacaacattgcttgaatcaatggactgcctgatttgtcccagaatcttctgaaaatatacatcacttccaccaaaaccagctgtaccaaaaagaaaaatctttttattttttaatttggataacaattccaaagttttatgatccgcattccctttgtctgtccaaaatcctacatacagcaactttgattgaggtacctgagcttcaatcgtgccaaaataatcacactcattcttaggcagtgtttcatgaattacatccgcaagcttcttcgtattacctgttaagctgctgaatactatcgaataattctctctcttcaaaccttatcatctccttcttaaaatggtattataacatatgaacagtattttcaaacgcaactattcacagtaggtaaatatattcttacagcaactgtaagtgttatttatctcgcttccgtgctatgcttctattatgataccagggtagaattgtaaaagcacatagcacgaaacaatccataggtatcatagctttgggcttttgccctcaaaatcttattataatgctagaagaacttaatgtgaagcctattttatatattgaaaatctaactaaaatctatggcaaggcacccagctcaactgtattgcaaccgtcatccggcctacaggcggcagtatccaaataaatagacacagcctgcaggcactcaagggaaaagcacttgccgaataccgtgggaaaacattaggatatttgttccaaaactttgaactgcacttttatctgctgtctgcatcgaaatactgaaatttaatctgtaagaaaatctgtttattcttgcgacccgattctggcattctccaagtatctgttcaggcatcagcaacgatgctacaaatcttataatactttagcgtaagaatataaattacttcttgaatttatattttccttttccgtaaccggatactggttcaataatatctgcctgcaccaaattagaaagaagttttgaagctccagaacttttcagttcaagaatctccataactgcacttcttccaaatacttcatcaaatccaaactttgcaaaaagtctatggatgttaactgttgtttttactgtaaaattgttgcatttgcctgaaaatatgttttctacattcacttttaaggctcgaatatccacttttcggtcttgaatgtccacttttcgatctcgaatgtccactttttgatctcgaatgtccactttttcttcatttaaaagtctacttatgtgaaggtttcgattgagaagttcatttttttcgtttaaaagtagatttctaagaaacacttccagatattctgttgtttcgtgaatacctttttgcaggtttgtatagttcgcacgaacaagtgcatttctaaaataccacgcattttccgcaaaagtatcattagtcgcaaagaaaccaagtgttctcaaatatttaatgaagaacaccgccgatgttctcgtattgccttccccaaagatgtgaatttgccacaaccttgaaatgaatacagcaagatgatggataatctcatccattgaaagccctttatagataaaatctctctcctgcgcaaaatcatattcaagtgtggctctcagttcagaagcgctaccatacaaaacagttgccccatcaagcacccattctttctttgtaatattataatctctaaactttccggcatgtttataaattccttgaaaaagtttacggtggatagaaatatactcactgggtgaaaatgagaacgctgtttcggaaagaatttcagcaatacgggaagaaaccttat

SEQ ID NO: 171 - DNA, 583 bp, Unknown
  gut microbiota DNA sequence
agaccgcctcattgaactgtattatacgttcatggggcggtcgaatgttgttaattgttctgcactattgttttacggtacttatctcttttttcttctggaatttcaagcatatccattgtttgctcgatagtccagttcgtgtttttcattaactttttgatgttttccatttcttttatttccatgccatcgtccattagcatctgtcccagtctggtcattcgcattacctccctgatctcatctaaatctgatttatccaaaaacttatctgccagagtatatagtatagctcttgttttttctgctataagttcattactcggtttcgttagatttattgctgttttgaacatttctttacggctcatattcccagacatcaatggagaaagagaaagagcaacgtaatcattttcggtgaatttttcgttattgctctgtttttgtattagtttttggaatatgtcatctgcatttttatcttttagataaattggctgtatccgataagtgtataatccgcagtccaattcggactttacgtcataacggcatcttcatgtttcgtatttgccat

SEQ ID NO: 172 - DNA, 11710 bp, Unknown
  gut microbiota DNA sequence
ctattattcgtccagtatagtcctcattggtgttctgaaaatgtattcactcgttcttttgttttttgtcatttgtaaggatgtagacttttcctccttctgtatgattattttaacagaacgagtttggaattgccagtactgattgttacaatcgcagtagaagtacatgcgctatatgacatatgtctcacagcagaatatcggagaggaatcttgatttttttgcagaaatagcatgtgtgtttctctgctatcagttcggacagatgttgtgatgaactttgttatattgggctttggaaagtggattgatagttctgttattaaatgaacatgcaaatatgttaaaagtgcacaaattattacacggataatagtaaaaaacaccaatattgacaaaagcagaaaatgaaattataataaataacatcacaggagaaatttttttaaactaataaataacatcacaggagaaacaaagggggcgggtttttgcaaagatatgttggaattgatataggtgggacaaatattaagtttggtatttttttgaatgatggaaggctggaaaaaaaatggtcaatttctacaaatttttccgatgaaggaaaaaaaatgtgggatgatatttataacgaaataaaaaaaaatgtgagcatagatgatttatgcggaattgggatgggacttcctgggcctgttttggcagatggttttgttgaagtttgtgtgaacctggatttacataattttaatccagttcaaataatgcaggcatatttcccaggtgtgcgaataagggctgcaaatgatgcaaatgtggctgcattaggcgaacagtggaaaggaagtggagaaggttatacaagtcttggtttggtaacgttaggaacgggtgttggaggagcggtgattgttgacggagacattgtttatggtgcgtcaggtctgagtggagagattggacatattcaattgaattcagaagagactcgtacatgtacctgtggtggaaaaggatgtgtagatcagatcgcatccgcaacaggaattgtaagatatacaaaggaagttcttgccagaagtcaacaggattctgcgttgcgcgacaaggagcagattacttgcaaagatattttagatgctggaaaagaaggagatataatagcgaatcaatgtgtccggcattgtatgaagtaccttgcaaaggcactggcggctgtaacctatattattgatccggaagttttgattgttggtggtggtgtatcaaatgctggggattaccttattaatatcataaaagaatactatgattcatttattacgttgtcccagaaaaagactccaattttgagagcatcgttaggaaatgattcgggaatatacggcgcagcaaaacttgtaatttagtgaaatggagaatttttatgaaggaaattaaagttggatttgagaaagtgttacgaccaccgaatacgattgcaacagaaccagtatatcttacagatgatactatgggagaacgaaagaatagaattcttatgttgatgaaacaacataattttgattctattgtaatttatgcagatcgggaacatggtgcaaattatggttatttgactggatttgaaccccgctttgaagaaagcttattagttatccatgatagtggtaaagcatatttaatgcttggtaatgaaagtttgaaaatggccttatattcaagaattgaggttgaggcaatacatactccacatttttcgttgcctaatcagccaatggagacagaaagtacatggctggaattgcttaaaaaagtaaaaattgatgagtgcagaaaaattggaatagtgggttggaagttatttactgggaaattggaagataataaacacttgtttgacgttccgtattttgtagttgatggaataaaaaaagtcagcacagatgcaacaatagaaaatgctactgggttatttattgatccggtttatgggtgcagaactagaatgaacgcaaatgaaatagctcattatgaatatgcagcggcaacggcatcacattgtgtttatgaggtaatgaatgctattgaagttgggaaaacggaaatggaattggcagagttgcttgcagcacatgggcagcctttgtcggtgcaaacgatatgtgcaactggagaacgatttaccaacgcaacagttgaaccaagaaataaaaaagttcagttgggcgacagaataacttttacaatggggttaaaaggtggattatcacacagatgtggatacgcagtatctgaaaaaagtcagttgaaagttgatgagaaggactatttggaacgagttgcttttccatattataaagctcttgcaacatggtattccaatattggcattggtgtgaaaggagctgatttttatactttgattgataaagttttgcctcaaaataaatataaatggacattaaatccaggacattatacagctgatgaagaatggttgtcttctccattttatccgaattccgaggcatatattcagagtgggatgatgcttcaaatggatattattattagtgtatcaggatttgggggaacaaatgcagaagatgggattgctgtggcggatgaaaacctacgagatgatataagaaaacagtatccagaactatgggagcgctttatgaaacggagaatgtatatgcaggaagtgcttaatatttcgctgaaggaggaaattctacctatgtcaacaatatgtgggtactatcgcccatatatgctaaataaagataatgcattatatatcaaataaatacacgagggaagggaggatataatcttagtaacgcgtaacatgcactaaaatttaaattagaacatttggagggaattacaatgaataacaaaaaaagattatttgcaatgggaatggcagcactttgtgcagtaaccacaattggatctattaatgttatggctgaggaaaaagagaatagcgacggatattattttgaatgggcaggagaacagtgggggctttcaaacgaagaaattgataaaatcaaagaaatggatttaagctttgctattgaaactccaacagaatccgaatttggttatggacaaatgcgtggatttgaggatgcatgtaaagcacttggaataaaagtagccggcgaggcttcctgtgaattggatccggcaacacagcagtctaatatggaaaactttatttctatgggtgttgatggaattgtctgccagcctcaggatgctgatacggcggcatcacgatttgacgcagtggttgatgcaggaattaaattagcatttacaggatctaaaccagatggatatgaagcaggcgagcagtacgtaacaatggttaccgatgaatttgcagaagaaggtgctttggcggctgattatcttgcagaagcaattggtggaaaaggaaagattctggcaataacaatttcaagcgttaatgcagtttctaatacaagagatggagcttttgttgacactattaaagaaaaatatccagatatagagttattggaagaaggcggaattgaatctgccagtgatgccggttcagtagcaagtggtcttttagctaaatatccggatgcggatggtatgtttgtaacattttctactccggcactggaagttttagatatcgttaaaagtcttggaaaagatgattttaaaattgtgacgattgatttggatacagtatgctgtattgatatgattaatggtgggaatatagcaggaattgtatgtgattcagcttattattatgcagcagctgcagtagtaggacttgcaaaagactatcttggacaggaagtaccggcagaattatccggacctggtaaacaggttacagtagataatatgaatgaaatgtggcagtggtcatttggaacagatgtgccagatacacttgcagaagctttagcagatgcaaaataacagataggtgttgttagaagagtatttatatactcttctaacaattatgagagcttgctgggtcgtggactgggagacaatttagaggtgataatatgagtcaaaaagcactaaatatgtcagatatttgcataggatttaatggggtgccagttttaaaaaatgtgaattttgcgctggataagggagaagtttgtgggcttgttggaaaaaacggtgcgggaaaaagtactctgttaaaaattattcagggtttgtatcatgcagattctggaaacgtggaaatttttcaaaaaaatgttaaggaagaatcgcatagagaaacttatgatttggtaggaatgatatttcaggaattaagtttgattcctgaaatgacggttttagaaaatatatatcttaataatgagataaaaagccataatattataaaagaaaaagaggaacaagatagggtcctttcttttatgaaaaaatacgatatcagtattgatatacatcagaagattaaaaatttagggtcagcggataagcagatggttgaaatatgtaaagcggtattaaaaaacaaacaaattttgcttatggatgaaccgacagcatcattggatgacaaacaagcagcaaaattatataaaatggtaaagaagctgaaggaaaatgggatatcaattatcttgataacacatcatcttcaggaaattatagataattgtgacagtatagcagttatacgagatgggattatgacacttcacgacaaaacaagtaatgtgtcaatgaagaaaatgatcgaggcgatgctggggcaagaacaaaccgatttaacatttgacagaacgattaccaatgtagagaaagcacaaccagttcttgaattgaaagatatcactacaaactttattaaaacacctttgtcaataaaaatatatccaaaagaagcagtaggatttgccggtttgaagggatgtggcagaacagaattgtttagagctatattcggactggataagttaaaatctggagagatatatgtacaaggaaaaaaagttacaataaaaaatccggtagatgcagttgagaatggtatttatcttataccggaaagtagaagatttcaagggttgagcgtagaacattctatcaaattcaacattgaaatccctattctgaaaaagcttgcaaagaaaatatttgtcaatgataaagcaggaaataaacttgtagatgattacataaaaagagtgaatattaaatcgaatggcagagatgatcttgtgaagagcttatctggaggtaatcaacaaaaagtggtaatttcaaaagcgttggtgactgatcctaaaattctgatcatggatgatcctacatatggtgttgatgttggcgcaaaagcagaaattatgaaaattattgatcagtttaaagtggatggcggtgcagtgcttttagcatcatcagagattgaagaggtaaatcaaaattgcaatcgaatctatgtgttaaagaatagaaaagtaacgaaagaattgatgaatgaagattatgtttctattacacaggataaattggcaacggaaatacaatagggaagaggtgcattagcatgaaaaaaaagtttgacattcaaaaatcaatcatttacattgcctttatagctttatttgttatcttttcaattacattacgaaatgtaggtgctggatttgcatctataagtaacataatgaacattttaagacaaacctgtctggtggcaattatggcagttggtatgacatttgtattaggtgctgcattgatagatttgtctacaggaccattggtagcatgtacatctttggtatgtggtttatttcttcagcaatatggattgattgctggtgttatagcaggattgctatttggtgtgttagcaggtgtattaaatggatttttaattgcatatcttaaaatgccgccattcatagcaacgcttggaactcaaaccgtgtttaccggagtggccagaacaattacaaatttacaatcagtacctataactaataaaacttttattaatatttttggtggaggaaatattggagttgttccttctgtcttaatctggatgttaggtgtttttattattggtgtattgcttatgtacaaaatgccatttggcagaaaggttttagcagttggtggaaacactacatctgcaaaatattctgggattaatattgcaaaagtgcagatgaatgtaatgatattgatgagtgttttatgtgcattggctggaattctctgggctggaagatttggcggcggtcgctacacactgggtgaagattctggtacatctgtaattgcagcatcagtgcttggcggaacatctatgatgggtggaaaggtttctgtatatggtgcaattgttggggcattaatgatgggaatgctggataatgcacttgtcatgtatggcttaagtgtatatcagcagacgattgtaagaggtattgtaatcattattgcagtggcagtcagcaccgtgcgtgaagatgattaagcaaaatactgggactgaaaacagaaatcagagtagatgtttcaaggtacattgatgtatttcgcagaaaggaaaggtataaaaatatgaacatacaagaagtaaatgcatatatcgaaaacaataaatttgaattgatttcacttttacaaaaatgtatacaggcaaagccggttaatccgctttatgcaatggaacatggatataatgaagctgagtgtgagaagatacttatagaaaaaataaaaacacttggtcttgaattatatacctttgatgtggatttgaatgaacttgaagaatacagagatatgcctggttttatcacgggttatactgataaaatcgattttaaggacaggcctaatattgttgctaagctgcctggcaccgatccggaaaatgcaaaatcaattttactgattggtcattgtgatgttgttgcagctgatgatattgaattatggaagcatcatccatttgcggcagagattgatgacggtgtattatatggtcgtggctgtgtggatgaactgggcggtcttattagtcagctgattgccattgaagcgattataaaaaccgggaatcgtcctaaaggagatatttggttttccagcgttgtgtgtgaagaatcaggcggaacgggggttctggcagttgcagactggttaaagaagaaaggagtcaaaatcgatgcagggatcatgggcgaaccaacagatttggatgtgagtctactttgtcgaaacattacatggggagatataaaaatcgtaggaagaactggacatttggaggagtggcagccacactggacgcagggaggacccgtcgatgctattaaaaaagcaagatatattatggatcagattgataacctcaatgaagaatgggcaaaacgaccggataagaaccatccattggaaaaacttccttgtcaggttaaagtggccattattaaaggcggacatcacaggtccagttatccagcttcatgtgaattatcttttaacattcagattttaccgcaggagactgataaatttggacttggtcctaatgtaaagaaagaatttgaagattttattgtcagagccagtgaggcagatccatggctcaaagaaaacccgcctgtggttgagtgggtatgtgaagccgactgttcggaagttccacaagaccatccgtttgtaaaagtttttgaagaaaacgcgaaaaaaacgcagaaggatagcagattgataggatcaggattccatacagatactggatggcttatgagggtacctgaaatccctgtagtcaattatggaccaggaaatcctgctttggcgcacagcacaaatgaaagatgtaaagttgaggatgttgtgaagtgttgtaaaacagtagcaatgacttgtatggagtggtgtaacacggataaataataaaaatgggaaagcatgtaaaaatgatatggcatgttttcccgttttgtaatgctaaagagtgaaatattcgttataataaagatattgaaacaataggcatgaaatgacggatgaggaaaacgtatgaaaattcaaaatcaacaaaatcttaaaagtaacaatgaaaaaatgattcttgaaatcatcagaaacaataatgaaaaggacatttcacaggcagatattgttaaagcaacaaaaatgagtcctacaagtatctctcgaattgttgagaatttgattacaaaaggattagtgaaaaaaaaggatttaattaatacagataaagtcggaagaaagggagtaaagctatcattagtagctgagagcgttattacggtaggggtttcaattgattctgataatctgggaatttgtatggtggattttctgggtaaaataatcgcatctgatatttttactttacaaaaaaaacattatgagccagcagaaatcatttctttaatatgccatatgtatcaaacattatgtgaaaaagttcctttggaagcagaagatatcttggcaataggcatttcctgtattggtaatattaactatgaagacggtgatatttattttgcacctcaatttgggtggaatcatgtaaaatttggggaaatggcgcagaaagcacttggaaaacctgtttatatggaaaatgatatgaaagctgctattatgagtgttgttcatcaagagaggaaatacttaaaagaaaatattacatacttatctgttggaatgggcgttggggcagcagttatgtttcagggagagatagtaaggggcagtaataatgcatttggtgaagttggtcatgttattattcaacagggaggcagaaaatgtgattgtggacaaagaggctgtgtgcagaccactttaacaactaatagtttaattgaagaatgtcaggaaatgggattacagattgacaatgtaaatcagatttttgaagcgtatagagcacaagaggaatgggctttgaaatttattaacaaaacggcaatggatctggctattcttatcaggaatattgtatatatgtataatacgaattatattcttgtaggtggtgctttgattatggattttccagaattgctagagttagctaaggaaaaattgaataatttgatccattcgaatctttattcgagtttgcatgtagttaaggttgaaaccagaaataatagtgtgacaggtgcagcatttatagcacagtcgctttgtgtgaaaaatatcattgagaatgaatgacgaattcctgtaaaatctatgaagcagaccgccccattgaacgatgtcatacgttcatggggcggtctgcttgttagcttaaaactacaacctgaaaatcttcaacaacatatttgccatgcctacagaatatcctgcggatgcaaaacatccggtgagtgccccgtctgtgatcaccatcagaggcagtctgtcagaatctgtatacatctttctggcagtcatttctttttcttttccgaaagaagcaaaataaacaccagccttagggaaggcctgtaaacattgacgaaacacagattccccggcagcttcttcattctccagaatgaatatcaactggttctggatagctgaaaaatcatctttcatttccataagttcatttaaaatatgctgggttggctctttgccaggatctaaccagagcaggatccttcgcgtaccatcggtgattcgggaaatggtatccgtattgccagcctgatcccttaaattgaaatctggaatcggatgagggttcatcatctgatccagatggatatttctgtgacgaaggctaatcctgtgagtttcaccttttgctacatgaaaatcatagcggctggcgaaaatagtaccggaaggcaaccggttggaagtgatcacccgataatagcctggctccacatccagtgtgatacctgtcttctgccagggaatatcctccagctggaagaaaagatagccgtttttgtcagcctttgcaagggcccagttcctggaataggtccagccatactgctcttcaccggtaataacaagacaggcatccttcctgcggctttcatggatttgtgcaaaacctttgttttcccagtattccatggctccgtcctcaggattcagtcttgcaggaatgccaagagtacgggcaatcgctacaaaaagaatagcacgggatcggcttcctgcaattttcatgcgcagggcggcggttggggttgtataaacggttcttcgctcctgcaggtcattttcctgaatgttttcttcgatccactgccagatcaggaaaggcttgctgcggaactgatcctgctgctcctgtgaaaagtagcccagaatgcttcggcgccatttggtcaggacctcatcatcgatcctggggttccagatataatgaagaaagaaatctctggggaacatttcgccatatacagaggcctctctgtagtgctcgtccaggatctcaggataaacatcattctggtctttttcggaaaggacagacatcagctcctccataaccttcagctcatggccaaaaagacagttgcgccataaaggttggaacttggctgctttatgcctgcactttgcagactcagcagcaacccggtcattatttgctttttccaggtctgcgggaaatggaaccaggtttcctattgtgtcatctggggcggtcatattaaagtcttcccattcgtcttcaagaaagccctctcccagcatgcactcaaaatggtcatcctctctggtgtcgatcaggcattcaccataggtctctccataaacggcacagatatgtagactgccaaagcctgtaacaaaagaagcacagccgctggcatctgtacgaagcctggcaacaggggtaaactgggaataattaaggatctcagcacggacctccgcatccgggacagaacatccgtccagatctgttacatggatggtgatccgcttggtgtgggcatatctgggaagctggttcagcatcagattcacatcatccataccgatcacatcctcattctccggtagaatcttgtcaaaccagcgggaacggatcatcatggctcttgaagctgcattggtaaaccagcctcgatccaggtcagcctccggctcgcaggcaccaagataatgccagtcaccgtcacaccatacctccacccaggcgtggttatcatcacagtgggaccatctgggtacatacacctgtctggcaggaatccctgcacttcgcagtacatttactgcaaatacagactcttccccgcatcggccaaaaccatgacggtaaacatccagtgcagagctggtgcggcagtctgtggactggtacatagcttcctggcagcaccagtggttgatctcaaggatggcccctttcatggaaagcccctggatccgttttttgatcttttcccagaaaagggtacggcagggcttgatctcttcttcgttgaccctgtgaaaaagaacataattcagatacagttcttcagaaagctgggacctatatggagagtttttccaaagataaatcccctgccaggcaaaatccaggaaggtatcaaaggaataattaccggcatcactatagggcatacagacgtaaagatatttcagtgccagaactacgtctggatccaaagcatc

SEQ ID NO: 173 - DNA, 598 bp, Unknown
  gut microbiota DNA sequence
tctggaacggttattttcaagaaacatgataagcctccttataatgagtcaggatctcttttgcctggcggatctgagacgcactggtacgcagaagctggaactcatccagggacgcagcgcccatagaaatttctttattacggtagatcataggacttggaagagctgtcttaccggacatatgccaggcatgagcgccagtataaggcaaaagctcattcaaggtgtctgggttcaccccgccgcctatcatgatagtgatacggccatcctcatggctgaccagctgacgaagcagctccttcccctgactgcagctattctgctgacctgaggtcagaatcgtatggatgccaagctcttttgcctgtttcatagcagcaaaaggatctgcacaaagatcaaaggcccggtgcagggtaacacacatatctccggctgcctgcatcagctgtctcatacgtgccaggtccagagtgccgtccggatgcagcacaccgatcacaataccctgggcaccgaggctgcggaacatttctacttctttcagcatgatatgaaattcatgctccgtataacaaaagtccccatatct

SEQ ID NO: 174 - DNA, 1560 bp, Unknown
  gut microbiota DNA sequence
gtgctgcttttattgtaaaagtaattgcagcaataactttatgtgtatgattatcatcaatttccttagcgattttattaaccattgtatgggtttttcctgttcctgcactcgcccttactattaagttaccgggagtttctactattttctcttgaattggagatagtttcattcggcaacctccttcaaacatgcaaagttgtaatgattatagattgttctgcaatccgtatccgaaagtttctcaatcaactccaccatatgatagtgctttgcatcttgtaaatatttaacaggattatcattatccaataaagctgataatctatcatgcaaaaactcgtctaaatcattttctaaatccacttttgataagaaaatatgaaagtcacttcgtattttatccaaagcatttatatttgaattatataaactcctcttggcagaaacagaattttcttgaattggttcagtaggcagacgattttccccaatataattattacagcgtgaaaagcctaaaacgctatatgtgccttttcctgttaccgctctcacatcattgtcagtttttaccacattaaaaatttcaagttcatccaggatagaacgatatgttttaaatcccacaccatcaactggtaaaatatatattccatctacttcataaaaaggatgcactactgaaaggactttgctaaatagcatatattcagatggtccttcaaccaaaagtactttgttagcaaagattgcttctgacaaacaacggtttaacattttcctgtttttctcataagcatcaggcactttataaaatgtgctaatactattgatttttcgctcactatatattcgaactaaatttacattatccatttcataaagaacaaaaggcgaatgagttgttacaaacaagtatgtgtatttgctatcggtaaaaagtatttgtgataatgcaatctgcatagacttatgaagatggttttcaggctcctcaattaaaaacagattgattttcttttccgcattttcatctgacagtatgtcgtatattgaatatgccaataactttttcctaccttccccagcagtaggatataaattatcatcattatcttgtttaatatatgggatgatatttgagtacaatccctttactgcgatttcggattttattgaaacagatatcccttcatcatggaatttttgatattctggcgtaagtttatcctcaaattctttaattccagacagagaagcaatatgaccattcaaatcatcaactgtattttgaatttttgccagaatatctttatcttcgtccttttcatttctgacaagctggctcacattctttttaaatagggaatacaaatcaacataagagtcaatataaatgacattaaatacatagtctatttcatatagatatcctctttgcttcatttcgtaaagatgattaatatctccaccccacgataatatcggtagagcgagcatttctgttttgctatattctgcaaaaagctttatatgtaccttattatgctcact

SEQ ID NO: 175 - DNA, 275 bp, Unknown
  gut microbiota DNA sequence
taacaacaatctcaattggtttatcaagctgcttattatgaaaatccgaatctaaaaggttttgtttacgaatatctttatcaaatacatatcgtagagcgtacaagaaatttgttttccccacatcatttagaccaaaaaatatgtttttatttgataagtcaagttcaacattatcaaaatttctaaaatttttaataaccactttttcaaatttcatatatgttctttcaccatccatcttgtttgtataataagaaaattataccattatt

SEQ ID NO: 176 - DNA, 256 bp, Unknown
  gut microbiota DNA sequence
tggacaccggatcctgtcgagctctcaactcttcaggatcctttcttttctggttccagtgccaccaggacgatccaggcaactacacttaatgcaactgctcccattacctgtgcgccatcccactgccagaatggcaggtaagtggccagcgtgccgatcacaccggccgtgatggtgtctttaagcatttggctcatggcttgtctcctttccactgccttaaccggcagcttttttcttttcataattcatc

SEQ ID NO: 177 - DNA, 386 bp, Unknown
  gut microbiota DNA sequence
aaatgaggaaggagaagaaaaagaagacggtacgattgataagatatcttatggatatgaataatagaacagactgaattttctaacggagagtgtgggattcgaacccacgtgcccttgcggacaaccgcatttcgagtgcggcgcgttacgaccacttcgctaactctccatatgaaaacagcatacaatctgaaaggatatcatataacaacacacatccctgaagatttcttagcgtttttgaagattacatcagaatcatggatcaacgctgcttttgctgcaaccgttttttattatatccgtattcatgaaaaaggtcaattcctttttcatgaatgatgtgtttatgtgtttttgctatatcagctgggagatgactc

SEQ ID NO: 178 - DNA, 1517 bp, Unknown
  gut microbiota DNA sequence
atgaatctctacaccatcttctaatgcagcttcaatccatgctttttttgcatccagtgcatttgctaccgcactctccactgtctcaccacaagtaatgcaaccaggcaaatccggataagaaactacaaatccgccttcatctttatcttccacaatttccatacgataggacattgccatataatcattcagcgtcttcatcattcttcgcctcgctttctacaatctgccttaccatttctacatatactttcttgattggttcatgctttggtattgtaattggcatacacccttgttttctgaaagtataatggctacttccacttcttggtgcattcatttcgtatccataactttccaataccttccgtaactcatcaaaccggaggtctttcgataaattgcatatacgtgttatcagtttatcccattttgacatttgtcatacctcctatctatattatatatggtgtcatatgtggtgtcaatcaatttattatattattccatgatgattctacgttcctaacaacttctattggttttccctgaattatagtctctccacctttatttcctgcatttcttcctacatctacaagataatctgctacatgagaaataaattctatattatgttcaataattaatacaggtatatgtattaagttaaaagaataaacccgtaaacagcagatcccctgcaaagcttgaaaactctgcaggggaacacataaattttattttccctatgtaatcatctccggtttcatctttcaaaaacaggtatatccgaaacatcccgcttttcattacggatataatcctgattatacggaaatctggcaacctttgcgcgaaccttcatctggcgggttcccggcgttccccagagtatttcaagctccgtcccttctttggcatattctgcggaaatgaaggccagagaaatcatgctgttataggtataagagatgatttttccgcttgtgatcccgatctccttatctgcagccagcaccttatccgcccggtactcaaaaccaaactctctgacacagaaatagtattcaagagcgcatggtttggtaatatcctcgcagggttcctccccagggctgagcatggttgcaaagacttctgccacatcctcggcgttccactccagggttacgcattttttttggggctttttcgacatttcaaggagggcttcttttccaatgaagtcatgattgtatttaatcaggaaatcccatcccacatcatagggagtaacaaatcgagcctgaagatcatcccccacacttccgagaagccttcgattgagattgaacatggataactgaggcactgtgcgcatatattctgtcattttctcgctggtttccagccacggaagcggatagtgaagattgatattcgggaatccggcctccgtatggttaaacatgttataagcctggagcccaagctttcttgctcccagcttttcacctgccgcccatacc

SEQ ID NO: 179 - DNA, 742 bp, Unknown
  gut microbiota DNA sequence
ttccatggtctgaaaaacttccagaaatatgccggagtaaaacaaaaacaattaatatttaaaaccttgccgccggaaacggcggcttaaagttagagtagtacggatggattaccgtatacatattagcaacgatcgtatttggaattgtccgcacagtaataaaggagaggaaagaaaaatgatctatcttcagctttttttagttttcttcaggttggagcgttaagcttcggcggtggatacgcagcaatgccgctgatacaggaacaggtggtgaatttgcatggatggttatctatgaatgcctttaccgatctggtaacaattgcagaaatgacacctggcccgattgcagtaaacgcagctacctttgtaggtatgcagattatcggaccactaggggccgtggttgcaacatttggctgcattcttccatcctgcgtgatggtgactttattggcacatctttatactaaatatcaaaatgtatctgtgtttcagggaacattagcctctcttcgccctgcagttgtagctatgattgcgaaagcgggagtgaccatcctgatttcttctttttttgtcaacggaacgatacagcttatacgacaaaatatatgtatacggatgatagtgtttttcgggatcgcattggtgctgttacggaagtttaacataaatatagcaagaattctccttcctctgcaggtgggagatgaattgcgaaaaaatgaaaaga

SEQ ID NO: 180 - DNA, 295 bp, Unknown
  gut microbiota DNA sequence
ctgcctatcctccatcacatccccctgtttatatttaagcacatttacatttggcggtggttatgtgattgtgaccctattaaaagagaaatttgtggatcattaccactggatcgatgaagaggaaatgctggatctggtagccatcgcacagtcttcgccaggagccattgcggtgaatggggcaatcgtagtagggtacaagcttgcaggcataccaggagtgatagtctcaactctgggggccattataccgccaatggtgattttatccttaatttcggtattttataat

SEQ ID NO: 181 - DNA, 579 bp, Unknown
  gut microbiota DNA sequence
caattttctccaccagtttctttgtatttccgtgatgtacagacgcataaacaattactgtcttcatttttacccccgcctaacgatgccattccatcgtatattcttcttctgatgtattttcatctattttctgattcacaattttaaattcacgatgctgatagaacactaccgctctcatatttttcttatacacgttaaggttcaattgatcctttagcttcgtaacggtgcgaagcagctctgttccgattccttttgattgttcttttgcctttacaaagatcccggctatataagtatctattaaaccaataaagccttgaatctcctcattttcttctgccacatacatttctgcttcagaaatcaattttctgaccatatcataattctttttccaataatctgcttctataaaagaatggctctctatatttgcatgaagccataagtccattatctcattcagatctcttgtttcaaatcttcgaatcatttttcttataccataattactaaacttttttacaatccatttctgtaaatctcattgatcacagcctgggcatgttc

SEQ ID NO: 182 - DNA, 1983 bp, Unknown
  gut microbiota DNA sequence
aattagagatttaagtggtgggagtatgtcacaaatccagatccttctggctcatttcttcgatcaattctttcttcatggtatacagctttggagaaaggtctacataaaccttctgaggatttacaaaacgtctggattcatcccataaggtttcctgttctttcagacagatatcccgcagttccatcacagatggagaagtgtacacgcggtgtccctcacggattacgggaaccagaagctcacgaagctggtaggtaccgccaagcacttttgtctttttccaggtatctaccggatcgaaaatgaccatggtatcattttcatccagcttctcgtctgccaggcaaatcaggtctgctttgatcttgcctgtggatttgctgtagatacgataaacggttttgttgccagggtttgtcacttttgctgtattctcagacaatttgattttgggaataaattcctgtgtctccggatccctgacagcagataatttatatacgcctccaaaggcaggattgtcattagcagtgatcagtcgtgtgccaacgccccaggaattgatctttgcatcctgggctttcaggctttcgatcaggtattcgtccaggtcgctggaagcagagatggtggcatcgtcaaagccggcagcagcaagcatcttgtatgcttctttggacagataagccagatctccgctgtcaatacggataccgtatctggtaagcggaatgccttcttcacgcatctcttcaaatacacgaatggcattgggaacaccggacttcagtacatcataggtgtccaccagaaggatgcaggcattggggtaaagctttgcataggtcttaaatgcagtatattcatctggaaagctcatgatccaggaatgggcatgggtgccaagcacaggtacatcaaacatctgtcctgtaagaacacaggaagtacccatacagcctccgatcacagcagcacgggcaccaaagataccagcatccggtccctgggcacgacgaagaccaaattccataatgccatcgcctttggctgcatagcatacacgggctgcttttgttgcaatcagactctggtggttgatgatgttcagaatcgctgtttccacaagctgggcttccataataggcgcaataacttttaccataggttctctggggaagatcacagttccctcggggatggcatagatatcacctgtaaaatgaaaattactcagatattcaagaaaatcctcttcaaaaaggtgaaggctgcgaagataatcaatatctttttttgtaaagtgaagattttcgatgtattcgatcatctgctccagaccggcacagatagcgaatgcgccgccacagggattgtctctgtaaaacatgtcaaaaactacggtctgatccgtcggatttttaaaataaccctgcatcatggtaagttcataaagatccgttagcagagtcagattatttgctctcatgtgttttctcctcattcattataaatttccgtatcgctatggtaatataagcctgtaacttttcagtaggaagtctcatcataactgtgagaatactgaacagctacgtaacaagaatgcctctgcaatcctgccggagtcatctcccagctgatatactaagtgctcacattatatcacattcggataaaagataaaggtttgatataaaaatatttaaaaaaggtgaaaaaaatataaaaaagggcttgcatttctgtgaggagtattatataataccacttgtcgcaagcgagaagcgcattgcgaaagagaatttagggctatcgccaaacggtaaggcaacggactctgactccgtcatttcaaggttcgaatccttgtagccctgctaagtaaagcacctcagacgaggtgcttttttcgtattgtgaaaagtcccagaagccacagatttactggctttgcaggacttttaagttttatct

SEQ ID NO: 183 - DNA, 4833 bp, Unknown
  gut microbiota DNA sequence
ggaacggatcacaagtgagtatggaacgatgctccgtatgaatcgcagtattcaggccgaaggttcatttgctgatgtaaaggaagacatgaattttcgaagatatctgtaccgaggaaaagcaaatgcactggcagagagcatccttttggcgatgggacgaaatatcaataagcttcattgcaagattcagaccggaagaacggggagtcatcttttttcattaaagacagcatagattttaatggttgaaaacaaaacagtttgaaatcaggcatgccgaaagggatgtctgggaatgaactgtgtttataagggatgggggcgaaatcacaaccgatttcgcccccatttgggcataaagcaaggctgccgcccagcaaaaaatatttgctagtgcgacagtcccctttttataaagtccatgttatcaattgtaaacttattcctctgaaaggctttgcaaacgatacgggattccttctctttccagtatctgagcctctcttttattgcaggtgctgatgatcacctgtttttgctctttttcaagccagtgaagcactgctgccagcctggcttcatcatacatcccgaatacatcatccaggatcacaggaaaggtttccccaccgcaaagcaattcagaagctgccatgcgaagggcaaaatacagctgttctatagtacctctacttaatctctgggcaggtattatccgctcgctggtattcacgctgatctgaagatccgggtcgatcagtacttcctgatacctgccatctgtgatctcgcacaagatctgggaagtacgctgtcgcagccggtaccctacctgccggtgtatattgcctgatatctgctcaatggtatccattgcaagattcagcgcctggatctctatgtcctcactgaccggcatccagatctccgattcataatccttgtattcttcctgcagattttcaaaatccacccttttttcttcaaaggattcctgcagggattctttattccacttcagcttctcctgctgctggagccacctggtacgcaatctgttctggctggccagatcacgatccagcatacgccgccgcccaagataatacaggatcatccctatcccaagcagaatacagaaatcccatcccagcctggtgatctgatcagcagcggaaaacctgctgaaaagtcctacaatgcccaggattacagccaataaggctgctgcagtaagagccagacgccgtttacgaagagcctggatcttcccttcgatcatgtcaagacctctttcctccccagaccggatctgcagcttttcttctttcctggatacctgggattgtctctccttcaattcttccagttcccgattcagatattccattttggcattcagcttttcctgctctttttctgcttcttttctttttttgtccttttgtacctgatagccttttctggacatcttcagcatctgcatcgttcttcccagatctacagagctgtccccggttccctggtagctggccatataattctgtacctcagatgccaggtccttgcctgtaacgcttttcagctgcgccacagacactgtattgtcatatacagcctggcttacaccgcctagcagctgctccatttggccatcctccacaccggtcagctctccggtacgaagattaagtagctccccattctggttctctttataaaaattacgagtgagccgataatcttcgcctccgattgaaaaccacagactcccaccgtactgtgccggattctcccacggctcgtacctggtataaatatcatttctggaggctcgtccccgctgtcttgtgatcccgtacagcatacttcttacaaaggtatgaaccgtgcttttcccactttcattttctccgtaaagtatgttgatcccctgggaaaactccagagtcttgtcatggatctttccaaaattcttaatcgtcagtcgtttgaagatcattcaattcctgtcctctctactaacacctgttaatcacactgcacttgtctgtagaagtgcctgaagaccgtaatacaaagccttatcttccacaatgcttctgtctttttccagaaaatacgtaatataatccccgatcagggtaccgctgtactgtctttgcaaggcttccagatcatacataggcctggattcatccaggacctctgtaacattgccgaattgtttcagcttttccggaataaacagcagctctgccggacgttctccctggatgatcacccgataaatattcagaccgcctcttctgtaaatctcatccttcagctcttcttccagagaaatctgggtcgactcctgagatacagtgagaagaagctgctgataggatctggatgcaaaaggtacaaaggaaacgcgcagcctgccattctccagcctgccctctatatatccgtgttctcccaggtcacctctgtcaataggctccaaagctcctgcataagctgctctgtcccttaaaaggatctgtggcctatgaatatgacccattgccacataatcaaatccagcggcagataagctgtttatattcacaggtatatgatctgcatccccaccatgagccagaaggatatgaagtccctctccttcctttgggcggattccatcataaagaggagtcctgatctcctggtgttcatagcttaaaccatacacatatacatccaattttttgtcttttacgcaggtaagcttttcatctttaaaaaataccacattatctgcccatggaaaatctctgtaaaaagaatccttcttcagataatcgtgatttcctgccatcagatacacctgtgtctccgggatggtggaaaacagatgattcacttcttttagttcacgcagcaatggctgcctgtgaaaaagatctccggctataaataacaaatccaccggattttcacggatacccgtaataacccggcggaaagtttcccagatctcttcttcccgcttttcactccaggggcatcccctgtcaggtactgctcccagatgtacatctgcaagatgaataaatctcattctgatctgctccttatatagataagctatacctgtaagggtaaaatacatctgtaaagatcaaacataactgcaaagatcaaagcatgcagcaagtgcaccctgcagttatgacaagacccttatcttacaggtcacagttatttacagttcttgggaatggaatcacgtcgcggatattgcccattcctgtcagatacatcacgcatctttcaaagccaaggccaaagcctgcatgacgggtagtaccatatttacgaaggtccagatagaagtcatagtcacactctttcatgccaagctcgtccatacgggctttcagcttgtcataatcctcttctctctggcttcctccgatgatctcgccaatgcccggtaccagacagtccatagctgccactgtcttgccatcctggttctgcttcatatagaaggctttgatctcctttggataatccgtaacaaagataggtttcttaaagatctgctctgtcagatagcgctcatgctctgtctgaaggtcacatccccaggataccttgtaatcgaatttgtcattgttcttctcaagaagctctacagcctctgtataggtcacacggccaaactcagaattaaccacatggttcagtctgtccagaagccccttatcaacaaaagaattgaagaagttcatctcctccggtgcattctccaacacaaaattgatcacatacttcagcatagcctctgccagatccatatcatcctgaagatcagcaaatgcacactccggctcgatcatccagaactctgctgcatggcgggtggtattggaattctctgcacggaaggtaggtccaaaggtatatacattgcggaatgcctgtgcaaaagtctcacaattcagctgtccgctgacagtaagattggtctcttttccgaagaagtccttgctgtaatcgatcttcccctgatcatctacaggtgtatttgcaaggtcaagtgtagtgacctggaacatctctcctgcaccctcacagtcacttcctgtgatcagtggtgtatgcacatacacaaaacctctctcctggaaaaacttatggatcgcatatgcgcaaagggaacgtacacgaaatacagcctggaaggtattggtacgtggacgcagatgggtcatggttcttaaatactcaaggctatggcgtttcttctgaagaggataatccggtgcagatgctccctccagtgtgatctcagaagcctggatctcaaaaggctgctttgcctggggagtagctaccagattaccttttacaataatagctgcacctacgttcagcttgctgatctgtgcaaaattctccatattgtcatggtaaactacctgcagtgtttcaaaataggtaccatcatggagaacaataaatccgaatgttttggaatcacgcacgctgcgtacccagccgcctactgtgatctcctgatccagatatttatctctgtttctgtaaatctctttaactgttgtaaggttcataatctgtcctctttctcttcatattacattatcgatagcaatatggatctcatccgtcccacactgcctgttgtgttacagtatagactattcctgttctttacgcaagaaaaaataaggccaaaatataactgttcaattgatgtttcaattgctgttcaattgctgtccacaggcaatatcccgtaacaaagcgggcaagtccgcttcaaactccctg

SEQ ID NO: 184 - DNA, 33680 bp, Unknown
  gut microbiota DNA sequence
acttgttacgctttgcgcgccagatgcagtctgcttcagcagacatattcctcatgcatctggtcgcatcctcgcggagtgtttttatgtaataggaacattacggagtaatttcctattacataaaaaaacagaactgccgtcctacacgatacagttctgtcttttttatttctgtacaggtcctgcctgcaattaatctatattgcctgtaaattacttatcctgcctgtaatttatcttacctgaaatttattttgtgagatgccagatatcctcattgtactgctcaatggttctgtcagatgagaagaacccagcctttgaaatgttcacaagcatcttcttagcccatttctctctgtctgtataatctgccagagcctggttcttaaccttgatatagtcttccaggtcaagaagagtcataaaccagtctttgttcacaagctcattgtgaagtcttcttaagttctcttcatgtccaagtgcaagcacctgatcgctgacaatgaaatccacatatttcttaatatctgcattgccttcatagatagcttttgaattgtaatctgccttctcatagtgctggataacctgctcgctggactgtccgaagatatagatgttatcctcgccaaccagatcactgatctctacgtttgcaccatccatagtaccaagagttaccgcaccgttcagcatgaacttcatgttacctgtaccggaagcctctttagatgccagagaaatctgctctgaaatatcacatgcagggatcagtttctcagctgcgcttacattgtagttctctaccattacaaccttcatgtatggagctacatccggatcatttttgatcagatcctgaagtgtaagaagaagatggatgatgtcctttgcgatcacatatgcaggagctgcctttgcaccaaagatgaaggttacaggcttctccggcttcttgccgcctttgatctccaggtatttataaataatgtacagagcattcagctgctgacgtttgtactcgtgaagacgtttgatctggatatcaaagatactgttctcatcgatctcaacacctgtgttggaaaggatgaaatctttgcacaccttctttgcatcggtcttgatagacaggatcttattcaatacttcctgatcatccttatatgcaagaagtttttccagttcaaatgcatttttcttaaatccgtctccgatcagggatgtgatcagttctgtcagaggatggttgcaatacatcagccagcgacggaatgtgataccatttgtcttattattgaatttctcaggatagatatcatagaactgcttcaactcgctgttcttaaggatctctgtgtgaagtgctgccacaccattgatggaatagccgtagtggatatccatatgtgccatatgcaccaggttgttgctgtcaatgatcgcaacggattcctgaggatattttctcttaaccttctcatccagctgtttgataataggaacaagatgaggaacaacctcttccagatagctcattggccatttctcaagtgcctctgcaaggatcgtatgattggtataagcacaaacctttgcaacgatatcgcttgcttcctcaaagtcaatgccttttgtagtcagcagacggatgaactcaggaatgatcatacttggatgtgtatcgttgatctgtacaactgcgtaatcagccaggtcatgaaggttgcatcctttggccactgcctcgtccaggatcagctgtgcagcattgcttaccataaagtactgctgatagatacgaagctttcttccgtcatcatcactgtcatccggatacaggaacagagtcaggttatgaagtacgtcttttttattgaatgcaatgccatcatgaaccatgctctcatctgcaatatcaatatcaaataaatgaagatggattgctttattctgatagcctgcaactgcaatatcatacattttagactcaagctcaaatccgtggaacggtacagtatatgttacatctgtaggtgtaagccatgtattgttggtgatccatgggttcggtgtctcattctgaagtctgtctttgaatacctgtttaaacagacccaggtgataattcagaccgattccttctccaggcagtcccagtgttgcaatagaatccaggaaacatgctgccagacgtccaagtccgccatttccaagagatggttccggctcaacctcttcgatctcagcaagggatttgccgttctcttttaagtaatctgcaacctgatcataaatgccaaggttaatcagattgttagaaagcagctttccgatcaggaactctgcagaaatataataaattttcttttttccgttgtgataacctttttcttccagtgcttcctttgtgtaagtaagaagagctgtataaatctcttcatttgtacaggaagaacagtctttgtggaacatgtcattgatcattgtctttaaagtttccattgtttctcctttcatccattggtctgtatattcagaccttttcatacgcgcctttttgcttcttcgttctttgctctttttgatgatacaattttagcacggatgaaaggcacaaaaatacaacaaaactgttatgttatgacatatttttgcgatatttatgcggtgaaaccagattggcctgctggaactttttaataaagtagcttgtattattaaagccgacatccaaagcgatttccgtaatggaacggtctgaatgcaaaagcaggactttcgccttttccaggcggaaatcattcaggtatgatgctaccgtcttgcctgtgtattgcttaaaaagcttcatgaaataatactcactgtaattggacatctctgttaactctttcacagtcagctgttcctgatagtgttcattaatataatccaaaaccatttttatggatgcaagattcctgttctgttctgtatctgcaggaacaatgtaatttcctatcagcatctggtaaaaaaattcgtaaaataagcttttcagctgtacataatagaagggctttttctctctgtggcaatcatgaatctgataaaacaggcggaaaatgtgttcatagccacggtctcctggcgatatcaaatgggtaaactctgcctgattctcagcaagaagggagatcagccgctcctggcacagatcccctgccggactggacagaaaattcaggtcaaatacaatacttttgtaatacagataattccgaaggtctgatcgtatgccgtgaatgactccgctattgaccatcaggatatctccttgtttcaggcgaatggtttctctgttcagctttgccaggccacagcctttttcgatgcagatgatctccatttctttgtgccagtggttgtacaaggaatggaagatcacacagttgtcggtgtaggtttctacgggaagttcaaatgagccatgtcggcccagttctttcagggtttcgtccacctttggggcatgaagtgttccgttttctgccatcctctcacctcctgttgtttcctatttttttctttgattctaccacaaaactcttcccttgcaaaatccttttataccgtatagaatggtatgtaataatgatattaaaacgaatggataatgaaatatgaagaacaaacaattaaatcttacctccggcccgattctttctacccttacggagctggcactgcctattatggcatcttcttttctggctacagcctacaatatcactgatatggcctggatcggaatgcttggttccaaggcagttgcaggagtaggcgtaggcggcatgtacgtatggctttcccagggactttgttccctgtcgcgtatgggcggacaggtaaatatggcacaggcccttggccgtaaagatcgggaggcctctatccgctatgcagatgtagctctgcagctgaccatcctgtttggtcttttttttactgcactctgcctgctttttacagatcctctgcttcacttttttaatctgacagatccggaagcttatgccagtgccagggtctacatgctgatcacctgtggactgatcctgcttccttacctgactcagactctgaccggactttatacagcccagggagattccaaaactcccctgaaggctaacttcctggggcttgtgctgaatatggttctggatcctgtgctgatccttggagtgggaccttttccaagactggaggttgttggtgctgcagctgccactgtcacttcccagtttctggtgctggcagtacttgttgtcagccttgttaaggatcacagtgaaaccaatatcctgcgtcattccaaccctttacgcagatctgcttccagctattataaggatgttttccgcattgggattcccaccgcactgcaaggcagcatttactgcctgatctccatgatcctgacccgtatggtttccggctttggtgcaggtgctattgcagtccagcgtgtaggcggacagatcgaatccctgtcctggaatactgccgacggcttcggtgctgctctaaatgctttcatgggacagaattatggtgcaggaaagacggaccgtatccggaaaggatacagcatttcctttcggctgctggttgcctgggggcttttgatcactgcagcctttgtattgatccccggccctatttcctccctgtttttccatgaaaaggatgtagtgctgatttccgttagttacctgaccatcatcggatttggggaagccttcatgagtgtggagctgatgaccataggtgcactgtcaggacttggaaaaacaaagctttgcagtattatcagtattatttttactggtatgcgtatcccgcttgccatggttctttccgccacttcccttggacttgacgggatctggtgggcacttaccgctacaagcatagtgaaagggatcattttttactttgcatttcaacatatcagcaggcgcagcctgtactagaaatgtttttgctcccaacatcctattatcagtgaccaataataaagaggtacttatgacaaaaaaagaactggctcttgaagtcatcaaacgattaaaaaccgcatatccggatgcagactgtaccctggattatgaccaggcctggaagcttcttgtaagcgtccgcctggcagcccagtgtacagatgcaagggtaaatatagtagtacaagatctttttgccagatatccaagtgtggcagccctggctcaggcagctccggaagagatcgaggctatcgtaaagccttgcggtcttggcaaaagcaaggcaagagatatcagtgcctgtatgaaaatgcttcatgaaaaatataatgacaaggttcccgaagattttaacgctcttctgtctttacccggtgtgggccgcaaaagcgccaatctgatcatgggagatgtattcggtaagcccgccattgtaacagatacccactgtatccgtctttccaacaggatcggacttgtaaatggaatcaaagacccgaaaaaagtagaaatggaattatggaagatcattccgccagaagagggcagtgatctgtgtcaccgtcttgtgtggcacggaagagaaatctgcacagcaagaacacagcctcactgtgacagatgctgtctatttgatatctgtgaaaggaatctgtaaaaagataccaaaagattctacagtatgcaagaaatgtgagagtatcctgcaagatgctaattactgaaacattactacatttccaatattttatctgcaccaagggaaaaagcatcctgtttttcatgtgttaccaaaagcagggtctttcccctggtgtatttttttatggtatccaaaactttgatcctggtatccggatccagtccggaaagaggctcatccataagaatacattttcggtctgctgccagtgctcttgcgatggcagtcctgcggcacatgccgccgcttaattcacccgcttttttgtcccaggcctcttccaggtctacagcagcaagaagttcccggagtctttcctccgaaagccctttatttaccaggcggatattcgcctgtacggtaagattccggcaaagtctgtcctcctgaaaaacagctgccataggttctttatttccctggatggttcctgtatccgggagttccaatcccaggatcagattcagaagtgttgttttcccgcatcctgatctgcccataatacaggtggttttcccttctggaaagcaataggaaaaatcctgcaacaccacttgtccataataagctttacataaattccggatgctcagatccatttttattttcccatcctttccacaagtgcgcctattccggtcagaaacaatttttcaaacagcacgctgattccgatgatcacaatggtccatgcaaaaagatccggtgtatttaaatatatttttgcatgatacagcttctcccctatcgatccgcctgggatcccgatcacctctgcagcgactccggctttccagcaaagccccagtgccagacggcaggcagccagaaaataaggggcagcctgtgaaatgtaaatataccgcacctttcttccaaagctgacctgaaatacctgggccatttccaaaagctcccggtcggtttcccggatgccctggcatacatttgtataaactgccggaaacaccataagaaacgttataaatacagaaagattcctggatggaagccagatcaggcacaagataataaatgaagcaaccggaaccgacttcataaccgttacaacaggtgccagcaggatctccagcactttacatccacaggctgcggcagccaatatggttcctgcaaaaagccccagaagaaatccggaaacaatccgcacaaagctgaatcccacagttttccagaaatctgcctgcggcaaaagctgccacaatttttttacaacagaaacaggagatgccagaaggatctcctgtttcagccacatactggccagctgccataccaggatccagaaggcagctgccagtattcttattgtatagcttttccacctgagcctgttattttgggcctcatcgtgcgtagtagaaatcatcatccggaagctgtcctccaaccatctctgggttctgctgttccagtgtgctcagatatccggacagcatggtctgcatctcttctccctctacaaatacgatactgcagtcagggatggcctttttggccacttcttcagcaataatgtcatgggcgccaatgatctttgcagcctgatccggatcgctgtttacaaattctacggacgcttgatatgcatccataaaagcatccacatcagcctcatgctccttaagataatcatttcttacaacaaccactcctgttaccagctggctgtcatcagaaactccatcctgccacagctgattcagatccaaagccacccgaaggctgtcattcttcatcaatgcagttgtaacaaagggctggggcaaaagccctgctgctgtctggtcatttgccagagctgccactacttccgcatgttctgacttatattcaatggtcacatccttttccggatcgatcccatttgcacttaatacatattccagggcatactccggtgtagcgccttttccactggcgtaaatggtttttcctttcaggtcttccacagactgtatggattctccattttccaccagatagagaacgcccagtgtattcacagccagtacacttacattcttctgtgtcttctgatacagtactgccgccagattggatggaacagctgctatatctacatttccctgcacgatctgcggtacgatctcgtctggggatgctgctatggtaaaatcatagctgtcatcatccagcagctgcgccatgcccatggcagttggtccttttaaggcgcctacagcaatcttgtcagatgctttttcctctgctggaactgtaacgcagtttcctgccagcgttcctgccaagagccctgctgtcagcaatacggatatcatttttttcttcatgtcttttgcccctccttagtctcaggtcatacttaaaagtcgtgtaactgttcagtaccttcacagttacattcaagaatgcctcggcattcttgctgcgaggtgcgcgtcatgcaattgcatgacatacttctcctgcgcacctctgcaatcctgccggaggctatatcagctgggggattgactcccagctgatatcattcataagatttgttgtgaagcaattcgtgttcttttcccttcagaagtccgttgtacagctctactaccagcgggttctcatctgactttttgatgatcatggtattgtctgcattataaagcccttttgcccttaatgccttggtcctgtcaccggcccttgtaggctggccaccgcccatgatacatccccgtctgcaggccataacctcgatcatatggtattctttctctccatttttcacctgatccatcactttccgtgcatttgcaagtccattggcaacacagatctttatttccattccttcatacataacggaaaactctttgatgccttcatccccgcgcacaccacattctgcgatctcatgcatagattctttgcggtgatcttttgtgagacgacggagaactgcctctgtaacaccgcctgttacgccaaagatcacgccgccgcctgagccaaagccaaatggcatatcgcaggcttccggatccagcggagcaaagtcgataccgaaattatcgatcatacggatcagctctgtagtggtgatcacaatgtctgtgtcctgttctccgtgggtaaagctgttgggccggatcgcttctgccttcttggctgtacatggcataatggaaaccataaccgtcttctttccatcctgatgttccggctgccggaaatattccttgatcacagcggaaagcatcccctgtggagatctgcaggtagaaagattagggatgtaatccttgtactgatctgtaataaatttcacccatgccgggcagcaggatgtgagcagcggaagtttttctccttttttgatccggtcaagaaattctgcactctcctccataatggtaagatctgcactgaaagaggtatcgtatacttcgtcaaatcccattctgtgcagggcatttacgatcttgcccataacacttctgccctttgacagcccgtaatgatcccctactgcaacacgtactgccggtgcgatctgtgccaccacccgtacatttggatcagccagtgcatcccataccagatctgtatgggtcttgatggaaatcgcacctgtaggacaataaatacggcactgtccacagttcacacaatcagtctgggcaatctttttgttaaatgcaggcatgaccatagcgtccgtaccacggaatgcaaagcccagtgcaccaatcccctgaagttcttcacaggcacgtacacagtctccgcaaaggatacatttgttaggatcccttacaagagaaggagaacttgtatccagctcatagggctccctggtattttcaaaacggatggtattcaccccaagacggtgtgccagctcctggaggatacactctccgcttttcacacaggtagtacagtcgcggcaatgagccgccagaagcagctccacgatcagcttcctgtatttcttaattcgtcctgaattggtgtaaatggtcatcccatcccttggttcttcagaacaggatgcaaacatcttgcccctttcatcctctaccatacacaaacggcaggctccaaatgtggacacctcagaatggtagcacaatgttggaatatttattcctgctttcctgatcacggacagcacatttttttcatcggtaaactctatttttctaccgtcaatcatcatatatcccataatatacccccttcctatgcttccacataaatcgcatcaaaattacagttatctttacatgcgccgcacttgatgcaaagagtattgtctatatgatgaggatgcttgatcagtcctgaaattgcacctgccggacagtttcttgcacacttgccgcagccgatacagaattcctgattgatatggaactgacgcagtgcagtacatacctttgcacggcacttcttatccctgatatgctcctcgtattcatccctgaagcggtgcagagtactgattataggaagcggtgcgcttttgccaaggccgcaaagtgccatactctgaaccatatttgccagttcttccagctgatccagatctgacatttcgcctttgccatctacgatcctttccaggatctccagcatacgcttggtcccctcacggcaaggtacgcatttaccacagctttccctctgggtaaaattcatgaagaaacgtgcaacctctaccatacaagtgttttcatccataacaaccagtccgccggagcccatgatcgcatcctgcttctttaccgagtcaaaatccaggggcacatccagctgatccatgatcagacatccaccggaaggtccgccaatctgtacgcctttaaaggctgctccctttttcagtccgccgccaatatcataaataatatggcgcaacgtagtgcccataggcacctcgatcaagcctgtattctcaatagctcctgtaagggagaaggttttggtacccgggcttccttctgtaccgatggtccggaaccagtcagccccctgaagaatgatcttaggcacattggcataagtttccacattgttcagtaccgtaggcttgccccacagtcctttctccactgtacgtggaggctttacacgaggcataccccggttgccttcaatagatgctgtaagtgcagatccctcaccacatacaaaggcacctgcacctctgttaatatgtaaatggaaattaattcctgttcccaggatgttatctcccagaaatccgtaattctctgcctgttcaatagccatacgcagtctctttacagagagaggatattctgcacgtacatagatatagccttcttctgcgccaactgcataagcagcaatggtcataccttcgatcatcttatatggatcgccttccataacagacccgtccataaatgcaccaggatcgccttcatcaccattacatacaacatagcggatcttttcggcctgtcttgccacctgggaccatttcttccctgccgggaatccggcgccgccacggcccctgaggcctgactttgtcacctcctgtatcacatcatcaggagtcatggattccagtgcctttgccagtgcctggtatccgccaactgcaatatattcgtcaatagattctgcatcgatctttccacaattttccagtaccacccttgtctgaaggtttaggaaaggaatgtcctccgggtggggacagacagtgtccttctctctgtaaaacaaacgctctactggctttccttccagaactgtacgctctacgatctctttacagtcctgcggctgcacatgtacatactgatatccgtaaggctctatcctcatcaaaggccccagctcgcataatccctgacagccagtcttgatcacgcctgtatgagggatatctttttgcatttccacctttactccgtccacatcccggcacagcaccttcatctcctcatagatcttctgtgcgccggaggcaatacagcctgtacctgaacatacaagtacacgacaggtataggagcggatcttttcatttacttctttctgtttgtttaacagttcttctccatttcttatactcatacgctttctcctctcagccggttcaaaagttctatggctttttcttccgtcatcttcggatgtacttcatcgtttacagtcagggtaggcgcaagtccgcaggctcccagacaggaaactgtctcaacagtgaaaagcatatcgtctgtggtatgctttttatttgtcagacccagttctttcatcagtgcctctttcacaggctgtgattttcttacgtgacaggctgttccgtcacagaccttgatcacgtatttcccttttggctcaaatgaaaagttctcataaaaggtagccacgctgtatgctttggcttcttttaccccgatctctttcgccacataggtgagcagttcccctggcaggtaccggtattctgcctggatgtcctgcatgatggggatcagcgatgctgctttccgaccatagtgtgcgataatctcatccgccttgttgtaataagattgatctaacattggtttcctccttactttgcgtcgttcgctagtatgtatttgtatccattgcacaattctatatccaatatagtacattatctggcaggattatacaattattttttttgcttttctgtgattattgtggatttttattactatcagcgaagtgaatagcagctcgatacgcattcacatacaccgtcccacttttttgacatgtatattttcttatgctatgatatttccgattaagcgaaattatgaaacgacaaagccaatagctgcttacacacatatgcaccagaggcttttggctggtggattttgactggtgttttttggctggcagcttttggctggcggcttttggctggcatcttttacatacaggcaggtgaaactttgaagaaaaaagaaattctatttatcctgggaatccttgcagctgcagcacttttgtgggcaggtacccaccttatggacaagggtgatctttccacagtacgcattacagtggcaggcaaagaatatggcacctattctttatccaaagatcaggtgatctccataggagataccaatcggtgtgaaataaacgacggggaaataaaaatgatctgggctgactgcccggaccatttgtgtatgaaacagcatgcaattgacaaaaacggcggaaccattgtatgtctgcctaacaaagtagtgatcgaaggcaaaaaaagttcatcctctaactcagaagatgaactggtgattgattccgttacctgattttgtactacaaaagaagatccagtgatattgcaaagcatcagggagcttatttgtcgccggaggggatccctgtaagttcataataaaaaatatactgctgcatcacaccacgcatccctttatagcggcggttagggaagcctcttttgtagtgctgatccagtacctggcgtatatgggtatccaccggaaatgcatccagctggtgcaaggcaaacaaacagatgcaatctgccactttcccacctacgccatagatttccatcaaagcttcccgtgcttttttgtaagacattgattgaatctctgatagattgatctgcccgtctgccacatcaagtgcggcctgatgaacatatttggcacggtatcccagattgcatgcccgcagatcttcttcagatgcagtagccaaagcctgtggctttggaaagctataatattccctgccatccggcaaaatgattctttctccgtaccgtgtacagatattctcaatgcacctgcggatcctgcgtatattattctgctgcgaaataagaaatgtgatcagcatttcccacagatcctgacgaagtatacggattccctgtccatgctgtgcggctgcacataaatatctgtccctgggattcactgactgtatatatctgctgtaatctgcatcaaggtcaaagtatgggatccagaagaaaaggaaatcctcctgagaacagtcgaaatccactacctgccctttttgccttacttctacgtatttcttacctgcgatcacagtaaaacagtctgtatctgtttcatccatcctgaaacattgtccggattccatgatctgccttatgttaaaattctccagttctatggatatcatctgtctgtcctgccttcggttatttctggtactgcctgaagaaaacagacagcttctccagtgccttcgccagaacacctacttcattgtccgataaagcactcaccactgcatctgtcatctgcctgtgatactctgcgtgatgatgaaaggctttacgccctttaaccgtaagatggataaaaacaactcttctgtccttctcactgcgttctctctgtgcataccctttcttaaccagtgcattcatggcaatggtcagggagcctaccgtaatattcagttctgccgctatatcggacatctttttttctccaagaccaatggcagcgataatatgcatatcattattggtaatatctttatactcatctgtgataatggcctgttcttccagttccatgatctcattaaaaagatttaccagcacatcgttgattacttccttatcattcaatatggtccttccccccgccttatgggctattccaattaatttgtatacagggagcagcttgtgctcctgcttgtccgttgctgtccgttgttgttcaagtgtacacagtatagcataaaccggggatttttgcaccatgtgtttccgtgacatttggattcgtaaatttgaatttgaatttccgcagcatttgtggtttaagtttctgtctgctttaccatttctgtctgctttccgatttccgtctgctttccggatttcatctacattttacgaaatctgttataccgcttttccaaaagctcctctgtatccattttctcgtacaatgtaaggaatgtaccaatcgcctggtccattttctctcccatatctgtcatattggctcgtgtaagaggctccttttcagaaaaaacatgctccacaataccaagctttttcagatccccggcagtaagtcgcatcacctgggctgcttccctggcttttcctgcatccttccacaaaattgaagcaaagccttccggggaaaggacagaatagatggaattttccaacatccatacctgatcagccacagcaagagccaaggctccgccgcttcccccttctccgatcacaatggacagaacaggtaccttaagagcagataattcataaatgttttctgcaatcgcctgcccttgcccccgttcttcagcctccatcccgcagaaggctcccggagtatccacgaaacagatcacaggtcttttgaacttctctgcctgcttcatcaaacgcagggatttacgatatccttccggtgaaaccatcccaaagtttctggcaatactgtcttttgttccctgtcccttttcctggatgatcactgtcacaggatttccatgaaaacgccctattcctccgatcacggcaggatcatctccatatcgtctgtctccatgcagttccgtaaattcatcaaataacagtgcaagataatctttccctgttggacgttccttatcccttgcaagctgcacacgctcccaggcacttttatcctgaagcttttcttctttcagaactttttttccctgatatacgctttttgtatcctgatgctgatgcatggacagcagacgtgaaagtgtagctttcatctgttttcgatcaacgatcccatctaagaaaccatgctccaggagaaattcagccttttgaaatcccttgggcaatttctgtccaatggtctgccggatcactcttggtcctgcaaagccgatcaacgctcccggctctgccagaataatatctccctccatggcaaagcttgccgtaacaccaccagtagtaggattggtaagcacactgatataaagaaggccggcatcactgtgccgtttcagtgctgctgatgtttttgccatctgcatcagggacacaatgccttcctgcatacgtgctccgccggagcaggcaaaaatcactacagggagccgttccctggtagccctctccactgcccgggtgatcttttcccctactacacttcccatgcttgccatcataaacctgctgtcacagactccaagcactgtgggatttccgtcaatttctgccttaccggtaaggatggcttcatccagccctgttttttcctgaagaccttcaattttctctttatatcccttgtaatgaagcggattctcctggggcagacctgtatcccattcttcaaaagtccctggatctgcgatctgctggactcttctccaggcatgaacacgaaaataattgccgcaatgagggcatatataatcgttgtcctttacctcttccacaaacaccgccgacttacatacattacattttttcagaagtccttccggaacctctggctttactgtttctgctgtcaggctgctacgaccaactgtccgtttaaatgtacagttaaatttcatttactttcactcccccgatttcatgggtacttaaaaatccaacattaaaattaccgctctggaaatccggatgactgaggatttcaaactgatagtcaatgtttgtattcactccctggatcaccacttctcccaatgcgcttttcattttggcaatagcctcttctcttgttcttccatgaacgatcagctttgcaagcatggaatcataataaggcggtactgtatatcctggataaatacctgtatccacacggattccctggccgccaggaaaatgaagatctgaaatggtgccgggagaaggcctgaaattcttctccgggttttccgcattgatcctgcattcaatagcatgcccctgtacatgtacatccttctggctgacctgaagcggcagaccggaagcgatacggatttgttcctttaccagatccatgccagtgacccactctgttaccggatgctctacctgtatcctggtattcatttccataaaataaaagttctcatccttttccagaaggaattctatggttcctgcattcacataatgtgctgcctttgcagccttcacagctgcttttcccatcttcctgcgaagcttgtccgatacagctacagagggcgattcctcgatcatcttttgatgattccgctgtatggaacagtccctttccccaagatggatcacatttccctgctggtctgcaaggatctgaaattctatatgtcttggcttttccacaaaatgctctatgtacatggttccgtccccaaaggccatttgcgcttctttctttgcagtcaggaaagctttttcaaactcttccggtgaaaaggctgtgcgcatacccttgccgccaccgccaagagcagccttgatgatcaccggataaccaatcctgtcagcttccttttttcctgcgtcaatatccagaactgcccccttcgtcccagggatcaccggaacaccggctgcttccatggtgtttctggcttcctgcttgtttccaagactgcggatcacagaagagggaggccccacaaagataatgccgcacttttcacatatttgtgcgaaacgggcattttcagataaaaacccaaagcctggatgtatggcatctgcgccggttgtcattgtagcactgataatgctttccatattcagatagctttccgttgaaggaccaggtcctatgcagactgcctgatcagcaagctgagcatgaagactatccttgtccgcctctgaataaaccgctacgctctcaatccccaattctctgcaggcgcggatgatccttactgcaatctctccccggtttgccaccagcaattttcgtatcatattttaccccaccataaatgtaagctgtgctttaacagcaatcttcccgtctacggttgcaactgcttctcccactccaagcgggcctttctgcttcacgatcctggtttccagacgcagcttgtctccgggacgcaccttcgtcttaaagcgacacttatcaaggcctccgaaataggcgattttcccctggttttccggctttgacaggatggcaacagcgccggtctgtgccaatgcttccaggatcagcacccctggcattacaggttcctgtggaaaatgtcctttaaaaaagtcctctctgtaggttacgcatttatatcctaccgcaaattctcctggttcataatcttcaatataatccaccaaaagaaagggatgtctgtgtggaatgatctgctggatctgctttgtatctaaataattcatgcttcctcgattctgaacagaggggtaccatattctaccgcctgtccgttttcaaccaaaacttctgccacaattccttcaaattcactttcaatctcattcatcagcttcattgcctcaacaatggcaagcacctggccttttttcactgtatccccttttttcacaaaaggctggctatcctgggaaggagccgcataaaatgtaccaaccaaaggtgatgttaccagatttccggtttctgcttccttctccaaaacagctgccttttccggtacaggagcagcactgtatacggtttcttttttatctctatcccatttaacggacattttttgtccattgttttcatattcaaaggatgatactcctgcggcgtctattttgtcgataagctgcagtatctgttcaaattccatgatcattcctcctcatagcgttttaccagaagagaagcattgtggcctccgaatccaagagagttgctcatagcataccgaacctgagtctgaaccggtgcatcaatacaataatccagatccagttcctcttctgtttcttttgttccaactgtctggtggataaaaccatccagaattgattttacacatacaataaattccacaccgccggcagcacctaaaagatgccctgtcattgacttggtagaattgatctttactttatatgcagcctctttaaacgcagctttaatggctcttgtttcaaacagatcattgtaatgggtgcctgtgccgtgtgcattgatataatccacctcttccggttcgatcccagcctcatgcatagcatcctccatggcccttgcagcgcctgctccgtcttccgctggagaagtgatatggaaagcatctgcggtagcaccatatcccacaacctctgccagaatgtgggcacctcttttcttggcatgctccagttcttccaaaactacgatccctgctccttctcccattacaaagccagcacggtctttatcaaatggaatggaagcccgaaaaggatctgaagatgtgcttaatgcagtcagactggtaaatccggcaactcccaaaggacagatacatccctctgtgccacctgccaggatcacctctgcatccccatactggatcgcccgaaaagcatcccctatgcagtggcttcctgatgcacaggcagtgaccacattggtacacttaccttttgccccgatggcaattgaaatatttccggcagccatgttgctgatcattttgggaacaaaaagcggatccaccttagaaggtcctctttgggaaagcctttgctgagaagctgtcatagcctgcaggcttcccacaccggatcctacgatcacacctacccggtatggatcctcctgttccatgcagatcccggaatccgccagtgcttcttttgcagctgctactccgtattttgaaaataattccattctttttgcagccttaaaatccatatatttttcaggttcaaacccctttacctctgcagccaccttcactttataatctgttgtatcaaatcttgtaatgttctggatccccacttttccggctttgataccttcccagaaggattctgcatcatttccaagaggtgttactgcgccaagtcctgtgaccactactctacgtttcatatatgtttgtcctcacttttcctacattgccattccgccgtcaaccatcagcacctgtccggtaatataaccggcttcctctgatgcaaaaaaagccgctgctgctgccacatcctggggatcgccaaatacgcccataggaatctgcgcccagattttttccttcacctgctccggcagaacctgggtcatgtctgtgcagataaatccgggagcgattgcatttacagtaattcccctggatgccagctcctttgcagctgattttgtcagtccgatcacccctgccttagatgcagcataatttgcctggcctgcatttcctgaaatacccacaatagaacttaaattgatgatcctgccttttttctgtttgatcatggttctggcagcatggcggatacaataaaatgttccttttagattggtatccactacctttgaaaaatcttcttcgctcatccccatcaaaaggccatcctttgtgatccctgcattattgaccagaatatcaagatgtcccattttactgatcgtatctttaaacatttcaccacaagcctgaaaatcagctacattacactgataaatatgggcctggcctcctgcctgcaggatctcctgctgcacttcttctgctttttcctttgagccattataattgataaccacatagcatccttctgttgccagccgtaaggcaatggcacgcccgattcccctggatgcgccggttacaagggcaactctttttccggtcattttttgtcctcctgtcagatttctgtatctgtcatgtctgtacttctattagattcctgtatctgtcatatctgtgcttctatcagattttcatctctgttatcgtcatatctctgctgctgttttttccagatcttctactgtctgtatattaaaggttcttacatttttatctatcttttttataaaaccggtaagcgtcctgcctggtccgatctccacaaaggtatcgatcccggcactgatcatctgctccacactttgctgccagcggacggaagaggaaatctgtctggccagcagtggacggatctgtgcagggtctgttacatactttgccgtaacatttgtcacataagggatctttagagagtggatttctgtagtctcaagtaccttttccagtttcctgcctgccgcttccatcatagatgagtgaaaggggccgctgacttttaaaggaaggactctccttgctcctgcagttttcaactgcgctgccgctatttccactgctgccttttccccagtgatcacaatttgtccgggacagttataattggcaatctccactccacctatcttttctatcactttttcgatctccagtccggtcagaccaagcactgccgccatgcttccctttcctgcaggaactgcctgttccataaggattcctctcttacgtacagttacagctgcatccttcaggctgattccgccagctgcttcaatggcgcaatattcccccaggcttaagcctgccgttacctccgggatcaggccatattcttctgctgctttttccatggcaagacaggctgttaaaagtgctgcctgtgtatattcggtaagatccagtttatcattttcttcaaagcaaagctgtggcatatccagatccagccactgggacacctgttcaaataccctggcagaaaccggatatttttcataaaaatcttttcccattcctgctttctgagctccctggccaggaaatataaatgcgatcctactcataaactgcagttcctttcaaaagagtttccgtctccttcatcagcttttggatcagatccttgcagctcatttcttcttttataagtcctgcgatctgtccggacataacgcttccgttcttcacatctccctctgttactgctcttcgtaagcctcccagtgtgagctgctccagttcctcgaaaggtgcgccctcagcctcttttttcagatattctctggtcatctgatttctcagtgcccgcaccggatgccctgtagtacgtccggtcactcttgtatctatatcttttgctttcaggatcatatctttataattctgatgcacctggcattcggttgttgctacaaaacaggttcccatctgtactgcctgtgctcccagcataaatgctgctgcaatcccacggccgtcgccgataccgcctgctgcgatcaccggaatctgtaccccatctactacctggggcaccagtgccatggtggttgtctctcccacatggcctccggactcacatccttcggctaccactgcatctgccccacaccgctccatacgttttgccagtgccacagaggcaactaccgggatcacgcggattcctgcttttttccacatctccatatatttttccggatttccggcacctgtggtaactgcttttacaccctcttctgcgatcacctgcgcaacctcatctgcataagggctcatcagcattacatttaccccgaatggtttatctgttttctcttttgccagccggatctgctcccgcacccactgtgccggtgcattggctgctccaataataccgaagcctcctgcctctgatacagcggctgccagatgatgctcggccacccaggccattcccccctgtataatggggtattgtatatcaagtaaatctgtaacttttgttttcataacactgtcctttgctttcacaatactgtttacttttttcaatattgcctcttacttttcccggttctggatataagcttccacatctccgattgtctggattccttccaggtcttctgtaggaatctccacattaaattcctcttccagagccataatcatctcaaaaagatccagtgaatcagctcccagatcctctttaaaggatgtgctctctgttaatgttcctgcctctgttcccagtgattctgctacgatttctttaattctttctaacatgttcttttctccttgttatattttatttccactctagcaggcttgctccataagacagtccggctccaaaagccgccaagatcagcttatctcctgccttgaaatatcctttccgattcagttcatccaaaagaatagggatgcttgctccggaagtattgccatattcctgaatatttacaggaaatttttcttcagtttctccaagtctttttgccacagactgaataattcttatattagcctgatgcaaaatataaaaccttatctcttccccagaaagcttttccttttccaaaagctcccggatcacctgtggcacacaagacacagcaaacttaaatacctctctgccatccatctccatgtaggtttcctgtgcatccggatgttccacatactgtttttggtttctgctgctgcaggtgagggctctgcccttctccccttctgaatgagtgacctgtgcatatctgctcttctcatctgcctccaggaaaacagctcctgcaccatcaccaaataaaatacaggttccccggtccttccaattggtaagattggaaaggctttctgccccgatcacaagtgcattcctgtagatgccgctattcagatatgcctgtgctgtgttcagtgcaaaaagaaatcctgtacatgcactgttcaaatcaaagcaggtggctcgaaccgcccccagcatctcctgcacactgcaggctgtacagggaaggatttcatttcccgaaatggttgccacaaggatcagttcaacttcttccggatccacgtttgcctgcgccagtgcactttttgctgcctttgcagccatcctggcagttgtctcctgccatgcaatatgtcgtctttccactcctgtccgctcacggatccactgatcatttgtgtccaccatattggacaattcattattatccaatatgtgttccggaacccaggagcctgttcctgttattcttcctgtcataatgattattcctgttttactgtttcattattttgcaattgaattgttttactgcttagttgtgttgctttttctgccttactaagcatcaacctgctgttttgtctcttagcctaatttgtttttatttcaaaatattttgattatcaaagtatatcatatttttttatattgtcaaggaaaaaatagattgagatattttatagataaaaaaaaggttgaaatatttttgaacattttgaatattttgataaaaaaaacagagaaaatactctcctcaagtatctcctctgcttttaaactgcctgacatttttctttgtatttggtattacaaatcaaatcggatctttaagtaatcctctatcacatccacacatttttcacggcctactcttgcactgtttaatgtaaggtcataattcaccgggtttgtccagtaaccgcctcttgtataatactcataataatctgccctgtatttatctgttttgctgatcagctcatgggcttccggctccgaaacctgcagctttttcataatggattccacacagtttttacgtggagcttcgatgtaaatgctgatcacattgtcaaaatctttcaacacataatccgcacattttccaataatgatacaggactccgtctttgccagttcctttatgatctcgcactggatattataaagattattatccgaagtaaacgctttttcagatggtttggcaagcttctcaataggattgatctttaaaagtcttgcaattctttttcctttgatttttcatccacctcggcaaacaaatgctttccgatgccgctttgttcgcttgccatatcaaggatctggttttcataacagggaatccccagtctttcgccaagttttgtaccgatttcttttccgccgcttccaaagcctctggctattgtaattacgtaattatccatgtttagccctccctttgattttcatctttgtgttcaaaaaaatgatggatgccaggatcaaaacaactccggtcagattgcccagtgtgaatttttcaccaaaaaccaggattccgcagatagtggcgatcattggttctataaaagccataattgacgctttaccagcttccatttttttcagtcctttggtgtaacagataaacgggatcaccgtggaaactgtagccaagagtactgatatcactatgatttccatattatggccgatagatgaaaccaggtttcctgcatgtgcaaaaggaccgattcctattgatgccagtaaaaatgtataaaaagtaattgtaaatgaattatattttctggtagcaaccgttccgaaaatgctgtatagcgcatacccgaatccagatccaaggccaataaggatcccaattccggatatacggctctcagactgcagtacccctgttgtgaaaagacagcctgtaaaagccagcagcaatgcggcaaccttttgccatgttatggattccttaaaaaatatgcaggacatgatcataaccatacaaggagctgtgtaaagaagaatggctgcaatggacatggtagtcatctcgatcgtcctgaaatagcagatattaaaaaaagccacactgcagatacctgtgccaacaaacatccatatatcctttatattgatcctcaggtttcttttgtcttttatgaatagaaacaaaaacagttctgctgctgcaaaaaaatttcttagaaaagtgatctgtatggaatccagccctgcggttccaagccttcttgtaaaaatgccgataatcccccagcagatcccggcaattgcaacatatatcattcctgttttttcgtttctgttcatagacctcaccctctatactgataaatatgatttgatccggtcataatcctgcagttctttcccagtcatagaatcgatgatcgttcccttatccatagcataacctctctgggaaacctgctggatcagtccgatatgctgttcaacaatcagaactgtcagattcagttctttgtttatgcgtatgattatatcaccaattgctgttacaatgttaggctgaacaccttccgatggctcgtcaagaagcattaatttggaatttccggtaagaacacggcctatggaaagcattgcctgctcaccgccgctcatagttcctgccagctgttcttttctttctgccagtcttggaaaatattcataaatcagatcataatccggtttcttaccctctattggattgatggactcacctatctgcagattttcctctacagtaagcgtaggaaaagccatatgcccctggggtacataggaaattcctttccacgcactctgatatggtttaagactggtgatatcctgtccttcaaaagtgattttaccactgcttgccggaagtaatccacataaagttttaacaaatgtgctttttcccacaccgttccttccgatcacagaaacaatttctccctgttcaatattcattgtaacattctgtaaaatgtttaccttgtcatatccagaaaccaatttattctgtttcttccggcctcagacctgccgccggttcatccagaagtaaaagctttggatttggtgcaagtgccatggcaatctccagccactgctgctgcccatgggtcatatttttcacacaaggattgcccagatcctgaatatgtaccagttcgatcagcctgtcaatctcagaattaagttctgactttttcacaaagttctgtgctgctatccggatattctctctcaatgttaagtctccaaacagcccaggtacctgcattttaatgctgattcctcttttagctcttttaactgttgcttcctttgtaatgtcctgtccttcaaaaacaatctttccggaggacacagggaggatgcctgtgtccatcttaaagaccgttgtttttcccgctccatttggtccgatcaggcaatggagttctcctttttccattgacatactgaaatcttctactgcattaattccaccgaaattcttagaaagattttttatttccagcagtttctgtgcactctcacccattgtatccactctcccttctttaattattttgcaatcatgtgcttccttttgaacaggccatcaaccttattaaagaacccgatcataattccatccggaatatagaggacagatatgatcagcagtactccaagaatcaactgggtatattcgcttcctgttgttgcaagatactgggtaaaccatgcatagattactgtcatgatcattgcgccggtaacatttttccttcctgcaactgccaccataatcactgcgatagtagatgagtttacgctgaaattggtaggaactacatatccgctccatccggcaaacaatccacctgcaagcccggccagtccaccacttatggcaaagatcagagtctggatttttgctgtatcatagccgaacatttcgcttctttctttattctccctgattccgaataatgcatatccgaagttggacttttctacttttttcattgccagatatataatcaaaagaacagctactacaaagaaatagaaatgcagctggcttatggaaataccgccaatttccagagaaggtatcttattgatcccattaaaaccaccaatgggaatacccagcagcttccactggcctccacttgtctggttcataaagatcttacagacagttgccacgctcattgtaataatacctgtaaaaacattgctgattcttccgtaaaagataaagaatcctaatattcccgcaaataaagcagctgtgaccacagatcccaaaagtgcaggaaatgtactgtttccgcctcccattaccttagacagtatcgcataggtatatgcacccattccataaaaagcagcctgcccaaaactgaaaatacctgtaaatccccagatcagaacaatagaaaaagaaacaagaaccgttatgtaaaagtttgaaaaattatccacctgataaagagtagaatacataggaaaaaggattgcaaaaacaaagaatatgagggctgaaactttttctgtacttaatttaaatctgatctttttcatgctcaccgcctccttttatccacaagtcctgaaaaacctttaggcaatattctaatagaaacaatggcgatcagcaggataccgatacgtcccacaaatgttcctcccacaacaactgttacaaagctttcaaccaggaagttagttccataagtgggggtaagtcccataagaggtgcgtaaagcgctcctacaagtccggccaatgctgatccaagcataaaagtcaaggtactgcccatataatagctatatgggcagcagtaatatcaattagatccactcttttgcatcacttaatttgactcatccaaaggagaatactgtgtctgtggatcctctttgcttaggccaattcccatatccagaagataggatggttcaacctgtttataggtctcaactgtacatcatggttttcatcaatctcaaccactgacatatctgtataaagatgatgtgtttttggctcaactttaacatgtccgccaggcccgtcaaattcaagatccttcgtttcaatggcattgatcacatcctctgtatcgtagcttcctgctgccttaacagcctctgcccagatatgaactgtattgtaagcaatagcacagttagaggtaatatatggttcatccggagccatttcttttagccactcgaccattacacggccataattatagtcagcaacaagaccaagctttatggtgtctccactactgccagtatctgaggttttttctgtatttgaatcatctgtttttctgtctttttctcggatgtagcagtatctaaagcagaccctgaagtaccgcagccggtcattcctgccagcatggctgttgccataaaaactgccagcaatctttttgtccttttcctcataccaattcctcccttgtgcaattaattatgaataaaaaagaaggcattttctaagatcatctcttaaaaaacgcctttgttttttatcttaagtattatgtatttacagacaataaattgtttcctgatgttctcataactgctatagttttcaacaattatgaactatccaatgttatagatccattatttctgatctaaagctctggcatgttttgtatatactgatggatcaattccaagcagatattctacaacctcatctacagttttaacatcgcagaatttagcttccatatcgaacatattccattcgataacacctggtgttctatcaccaacacatccttctggaacaatcgttttaaatccaagtcctgtagaatccataacggagtgtcttacgcagccacctgcagtagcgcccataacgatcactgtgtcaactccaaggtaatttaatgttgctccaagatgtgtaccaaagaagttagaagcaaattttttatggatcaccgactcgtctggtcttggtttgatcttagaatcaatttccatccattcactgttaatatccagcgtagtcagtggaatcttttcatcctatcttggcagatcccactgtgtctttcctgtaaaaccggtagttgtatggaagataggaactccaacctttcgagctgcctccaggattttcagtgcgttggcacaaacctcttcggaatggtcacaggtgaacggatgaccctcggacatccaggcctttgccatatcaacagttgtgatggccggtgcctttccccatcccatctctctcataaatcctctggatttaaggattgctttggcctctgcaaaagctttctttaataattcttcatcaaactcataatgatcaacaaatttatattctgtatttgccataacacatatctccttcataaaataattctacaacaactacttttcaatctgttcatccggccgtttgaacttgatggcgttatattattcttcattcaggctttttgcaataggtttttggcttttgtcagacagaatatactgacaaaaaaatgtacaaatattttcgcttgatattcttaagctgatgtgctatcctttgtacaatcataaaagacagataataaagatacataataaaaatgcataacaaaaataacaaaataataaagttcgtatttcagacaatggagttcttttggaagttcattgtctttttttatttctgaagggaagcgatcatatggaagccaggaatcagtctgcgtattgtaggtgctatttccagtcatattgaacgtggaatggcgctcattccatcagatcagaaagagcgccatagtgtaagccgttatttatatgattttgccagtgaaattgatgatattgagcaaatcgcaatttacaaattcattgcataagtgttcaagatgcgatgatcagcctgggagttagtaatccgttactatctgctacatctctacaattcttctgtttcgaatgtagcatagccttcgccatctaagctgttctactccacagtcaccacacatacacggctcttcttcccagaacagactgtaatccttgccctgccctttttctttgcgtatattttgccttttggatttacagatacaactttactattggaacttttaaatgttactttttcctgagaagtcaccggagctaccgttgtacggagagtatagcttcttccttttttcagggtcagccgtgcattgctgatctttaaagccgttgtttttacaattcctttttgtacatatactcgtatctttttggtatacccgctggcaagccggatggtaataatcgtatttccttttgcttttccagttacaactcccttttgtgatacacgggcaatctttttatttccggttgaccatgaaaccacagaatctcctttggcaagacctgtcactttcactgtatatctctgtttcacacgcagacgcaggctggaaacattcagctttatggatggagtcagagctggcactgtaacagtcacatatgcaccgcagctgcagtacgctgtgcgaacaccttcttccagcgcagttgcttccttagtcaactgatattctccataatgatgtcctgttgctggaaccactgtggctgcaagcgttgtttcctttgtacctgcttcatcactaaaatattttttacaaacactgcagtaccagtattctgtatttccttcttctgtacaggtagctgctttgctatccctcttgcttaactgatgacctgtcgcaggaaccactgtggctacaagcgatatctcctgttttccatcttcatcactaaaatattttttgcaaacactgcaataccagtattccgtatttcctgcttctgtacaggttgctgatttgctatccctcttattcaactgatgtcctgctggaattgctgtatcagcaagcaatatttcctgtcttccttcgttatcacgaaaatactttccgcaaacagaacaattccagtactctatgtttcctgcttctgtacaggttgctgctttgccttctgtcttactcaactgatgacctgccggaattactgtatcaacaagcgatatctcctgtcttccatcttcatcactgaaatatttcccacaaatattgcaagtccaatactcagtatttccttcttctgtacaggtagctgctttaccatctgtcttattcaactgatgaccggtggcaggaatcactgtgtctgtaatcgtcgtttcctttgtgcctgcttcatcactgaaatattttttgcaaacactgcagtaccagtattctgtatttcctgcttctgtacaggtagctttctttccttctgtcttactcaactgatgaccggtggcaggaaccactgtggctgcaagcgttgtttcctttgtacctgcttcatcactgaaatattttttgcaagcactgcagtaccagtattctgtatttcctgcttctgtacaggtagctgctttgctgtctgtcttgctcaactgatgaccggtggcaggaaccactgtggctgcaagcgtagtttcctttgtgcctgcttcatcactaaaatattttttgcaagcactgcagtaccagtattctgtatttcctgcttctgtacaggtagctgctttactgtctgtcttacttaactgatgacctggcgaagtttctgtatctgtcagataactgttatctgaaatcagtggataaataaacgcctggggtgtaaattcagtgggagatgaaaatgtatccttttcagttcgttcttcccgaagtgtattatgattaaatactttgctgttccatcctgccagaagataagtagtacgaataccgcttaactggtcatcccaggtagcatctaccagataccaggtatcattatccatctttacatagttccacatatgtgcttctccggagcttgcagaactgttccttgcaaaaccgccaatacatgcacagtcaatacccagttttctgcaaagaatcagcattgcttttgcatagccttcacatactacatgtccatccccgataaacattggtcctgcagaatgtactctcaagttgttctgtgcatcatacactgccttttcacacacataatcatgaatcgcctttaccttctcgtataggcttttaccgttggtctctgccgcgatctgggcggctgcagcatctgcattttccagaaaattattcatattatctgtaatgttagtattataaccctccacaagagaaggcctcatagtaaactctgaaataatgccggtatactttccattctgctctgtagcactgatactataagaatagccacttccacgcatccagaatacttccggataatcataggtgaacgcatccagtgctgcctgcatgttgacacgtacctgaagtatggcttcttcatatgcctcatcctgaactatctggttatcttgaaccttcgccgcaaaggtaactggttcactggcctgatatttataggactcaccattaaaggtactgtaattaacaaacaaattggaaacatatgtgttatagacttccaacgccatcccatctaactgattgccataagagccatcatattcttccagtgaaaatacatgaatcccgtctgtgtctcctggttctccattcacgatcagcggagaagccagttcctcttccacatactccagaatagttccttcctggagatcctgtgcatttgtatctgcaccgtctgtaaacaggtgggcttctgtctccgaatcaacacctgaagtaaatttcgcctcctgactttcttcccctgcagtcacttcttccggctgttccgattcttcatcctgaacatctgttatctcttgggctgcagcatctgtggcggcaacatcttccacatcataaaatgcttccccatacactccagaaggtgatactccaagaaacacagccaatactccagccagaatctgatttcgctttttcatatacatctctccatttttctgctaatacggtctctgtgtgctactataagtataccattacatagctttcctttccagttgtttttcgctgccatgggattatgaaaaatattgcaattaatagtattcaagtcgagcagctgcgagacttggcgcgtgattctggtcagcgtaagctgacatattctttacagaatcactgtgcatcctcgcggagcgtttatctcagtcgaagattggactcccactgagacgaacttgctgttactcaccacctgaaagaggtgggagtcttctcgactg

SEQ ID NO: 185 - DNA, 41167 bp, Unknown
  gut microbiota DNA sequence
tgcgctgaaaggcatttgctcccagcgcatcatttcaaactatatagccaaaaatttctctttttcagtgacttctgcttacattttccaatgcattctaaactgttctatttcacagtcaccacacatacacgcctcttcttcccggaacggatcgtgatccttgccttgcctttcttctttgcatatattttgccttttgcatttacagatacaactttactattggaacttttaaatgttactttttcctgagaagttaccggagctaccgttgtacgaagagtatagcttcttccttttttcagcgtcagccgtgcattgctgatctttaaagccgttgtttttacaattcctttttgtacatatactcgtatctttttggtatacccgctggcaagcctgatagtaataatcgtatttcctcttgcttttccagttacaactcccttttgtgatacacgggcaatctttttatttccggttgaccaggatatcacagagtctcctttggcaagacctgtcactttcactgtatatttctgtttcacacgcagacgcaggctggaaacattcagctttatggatggagttagagctggcactataacagtcacatatgcaccgcagctacagtaagctgtgcgaacaccttcttccagcgcagttgcttccttagtcagctgatattctccataatgatgccctgttgctggaatcacagtgtcagctaaccttatctcatttgtacctgcttcatcactgaaatatttcccacaagcattgcaagtccaatattcagtatttcctgcttctgtgcaggtagcagctttgctgtctgtcttattcaactgatgcccggtggcaggaagcactgtggctgcaagcgtcgtttcctttgtgcctgcttcatcactgaaatatttttcacaaacactgcaataccagtattccgcttttcctgcttctgtacaggtggctttctttccttctgtatgcagcatattgttatgctcacagtatatctgaaaccgaatagttatatttcctatatattctccgattccatggactgtcacttctgctgtaccaatatcctgattatctttataaatcactctgtaatcagtatccttaaccaaaactttaccattacaaacaactttcacctctggccggatagcatttcctgtatatgcatatgcatctgattccattgagaccgctgcctgtgaaaggaatatttttcctattatatccgtcagataactgttatccgaaatcagtggataaataaatgcctggggtgtatatttagtgggagatgaaaatgtatccttttcagttcgttcttcccgaagtgtattatgattgaatcctttactgttccatcctgccagaagataggtcgtacgaatgccgcttaactggtcatcccaggtagcatctaccagataccaggtatcattatccatctttacatagttccacatatgtgcttccccggaacttgcagaactgttccttgcaaaaccgccaatgcatgcacagtcaatacccagttttctgcaaaggatcagcattgcttttgcatatccttcacatactacatgtccatccccgataaacattggtcctgcagaatgtactttcaagttgttccgtgcatcatacactgccttttcacacacatagtcatgaatcgcctttactttttcgtataggcttttaccgttggtctctgccgcgatctgggcagctgcagcatctgcattgttcagaaaattattcatattttctgtaatgttggtgttatacccatccacaagagaaggcttcatagtaaactttgaaataacgccagtatactttccattctgttttttagaactgatactataagaatatccacttccacgcatccagaatacttctggataatcataggtgaacgcatccagtgctgcctgcatattgacacgcacctgaagtatggcttcgtcatatgcctcatcctgaaccagctggtgatcttggaccttcgcctcaaaggtaactggtttgctggcctgatactcataagaaactccattaaatgtgctgtaattcacaaacaaattggaaacatatgtgttatagacttccaacgccatcccatctagctgattgccataagagccatcatattcttccagtgaaaatacatgaatcccgtctgtatctcctggttctccgttcacgatcaatggagaatccagttcctcttccacatactccagaatagtttcttcctgaggatcctgtgtatctgtgtctgcatggtctgtaaacagattttcttctgtctcaggattaataccagcggtaaattctgtttcctgtccttcttcccctgcagtcacttcttccggctgttccgattcttcatcctgaacatctgttatctcttgggctgcagcatctgtgtcggcaacatcttccacatcataaaacgcttccccatacactccagaaggtgatactccaagaagcacagccaatactccagccagaatctgatttcgttttttcatatacatctctccatttttctgctaatacgatctctgtttgctactgcaagtataccattgcatggctttcctttccagttgtttttcataatggttcatttctgatatttagaagaaaacctctgaagtttccagaaatttctaatttacctctgccaacttccattatccttttttaaaccgcattaacacccaactcacagatgcttaaaattttcaagtaaaaaaggcaagtcctagctgacctgcctctctataataatttctcagttatttcattgtgcacaagttttcatcaatccatttctggacatctttttcatttaccttaaccagacgggcaatcattttagcatccataccctcttctgccatggttagagctgtttcctttgctttttttaactcaccactttccattccttcactatagatcttctccatttcatggcacataagttccacccctttctgtgtctcttttaattcatgtaccctttttgcaagaaccgggctgtgcatttcatctgcactcttgcagtgcagatcatgcataagtctcccgagttctgtatcatcctgttttccggaattcacatatatgatatgtgcttcatcttgaaagctttcgttgacctcttcaattttcttgctgatatgataaatcggaagcccatatccaagaacatcatcccgggtaataaagatcacatagctttccggtaattcatcgaaatcctgacctggatttaaagtattcatgtccatcaatccgctgtggtaacgtgctctcttaggtgatgcaccttcattatcctgctggatttctacgtcaaactgcttgccttcggaatctctggcaacacagtccattactgcggaacgtccctgcatattcttgtagtctttttgaattatctggtcaatcacacgcagatcctgcttacccatgataacctgcaggacatattccagacattctctttctttaaatacatttcgcataaatatatccactcataagcgtaagatttttaataacgcctttgtatctttcgtaacgtgattccagttcgctgtctggcatgattatttcttcatttgccacgtctgctgtcacctccgtttagactctctgatgagtggtgtaaaaatatacttttttcagttttatattagcattaaagaggttcctttacaagtttttatctggactttatttatctgtctaacctgattaatctggcagcacacgctgtattgcgtaatccttccacattggttataattatttcatccaaaactattgagaacacggagaatctatttcatggacaagcaaaaaacactccccaaaaacttaagacgcattcttcctttcctggtttttcttctttttataagcggcgtatgtgtcattgtttacaaagcccagttccggtatgatctgcacaaaccggttcaatatatcatgatgactacccacaagaccaacgatgaagtcatccttaccaaagattcgccttctcttactgaggaattttcctgttccgtccctgagctgaagtcattttcaatggaatgcactgcctatcgtgccagttcagatgccaggatttccattaccttatctgatgttaaaagcggacagaccctttacagagacagccataaaatcactggattgatcaaggcttccaattccagatatctgaaatgttccttagatgaagaatttacagattctgaatccaggcttctccggctggagctcacattaaaaaatgcaaaagataccaccctgcattttacagcgaaccagaggcagatccttgtatcttcttttaatgacaaccctgcaaatcacagcaacgtgatttattccctcagctacagcgacaacagctttatgtctctgttttatgctgttttgtgtgctgctctgctgctttttgctgcactggcttattatctgattatgattcgccgtcagaagatccagcagttctttgtaccgcttgcacttttacttggtcttatttttcaatgccttgttactgtccacggcgtgccggacgagtccacgcacctggacactgcatataaatattccaatcagattctttttgtacaatctactgatacacctggcaccatttacaaaagggaatgcgatgcaagattaagtgaaatgttggcaaatggtctggaaagcaactcctattatcagctgctttttcataccttagaacggccttctgatacacagctggtacaggtttcctatatagacggcaccaatctggttcccgggattatatacctgcctgctgcctttggcatcagtttgggacggattcttggactttcagcaatgcttactttccagcttggccgtatctttaacctgctggtgtttatcctgctgatccggctggctatcggtgtaacgccatactggaaaaaccttttcggtgctcttggattgcttcctatcaccttgcagcaggctgcctctgcttcttatgacgctattatcaatggactggtcttcttgttcattgccctgtgtttccattgccaaaacactcaggttctccataagaagcaattgatcccaacagggatacttgcggttttcgtggctgtgatcaaaggcggcgtatatctgccgttgctgtttcttttgattctgtgttttcatcaccggtcagccaaaatgcatcacaccaaaaagacgaaactactgataggatctgcgcttgcctttgtcctgctatcagcacttgcccttgtaaaattcttgcctgtatttcatgactttctgacttctgcagctgctgttgaccaggaaaattcattatataccattccttacgtacttcagcacccgctgcacaccgtttatctgctgtggaatacactgatgaaatgcggagatgatcttgttcgtggacttcttggaggcatgctttcctggttggatttccagatgaactggatctttatcattctcctgctgatctgcctgcttctgcttataaatgtaaaagatgacaacaaaaagctgccccgtagagcacagcttgtgatttcaggaagctgtctgctatccacactgctgatcatgctttccatgctggtaggatatacaaagatgaaatggaattatatccaggggcttcaggggcggtatttcctgccgcttgcacctgcatttttcccattgctgactacaaatatagtgtctgtaaatgtaaagcaggcatcccgtacctggatggtttttgttggcacagaaatcttactggttctgcagatggcagccatgatcctgtaacgtattcaagaatgcctcggcattcttgctgcaaggtgcgcgtcatgcaattgcatgacgcacttctactgcgcacctctgcaatcctgccgaaggctacatcagctgaaattcatattaattattgcaacaaaaagcacagtagttaaagtccatattctcggacaagaacttctgtgctttttaaattgagggctttcaccctcaaaaccttattagtactgattcatatacctgatcatacatcagatgttcagaagatcgcttaattccttcaatgcaccctctgtctcatgtgcaagaaccttcttagccagaacctttccaagctgtacgccttcctggtcaaagctgtttaaattccatacaaagccctggaacataaccttgttctcaaagtgagcaagaagagcccccattgcctcaggtgtaagctgctctccaatgataatgctggaaggacggccgcccttgaagttcttattctggttctcatcttctttgccgcaggcaaaagcaacgatctgtgcagcaacgtttgcacaaagcttctgctggctggtgcttccctggattacaacatctgtacccatctggttgttcttaaagccaatgaactgcagcgggataatgtcagttccctgatgaagcagctgatagaaggaatgctggccgtttgtaccaggctcaccgaaaataaccggtcctgtcacataatctacaggctcgccaaatctgttgacagactttccatttgactccatatccagctgctgaaggtgtgccgggaaacggctcaatccctgtgaatatggtaatacagctgtgcttggataaccaagtacatttctctcatatacaccgatcagtgcatccagcattgccgggttctggaaaatatcctcattctttgcaagggcatcctcttctcctgcgcctttcaggaactgtgcaaatacatccggaccaaaggccagggataatactgcaccgcctactgcagatgtggaagagtaacgtccaccgatatagtcatccataaagaatgctgccagataatcatcactctttgcaagaggtgaagtctcacttgtaactgcgatcatatgcttggaagcatccagtcctgcattcttcagggcatcttttacaaaagattcattggtaagtgtctcaagggttgttcctgatttggaaaccagaataaagatagaatgagcaacatcaatagatgccagaactgctgctgcatcatccggatctacattgctgatgaacttcgcttccatcttgaatttattatttctctttgcccagttctcaagagcaagatacatggctctcggtccaaggtcacttccgccgataccgatctgaacaactgtagtgaatttctcacctgctgcgtttgtgatctcacctgcatgaactttattggcaaaatctgcgatcttctcctgctgctctacatagaaagcacgtttatcaacaccatcagcctctaccttgtctccaagctggccacgtgtcatatgatgaagaacaagacgtttctcgcctgtattgatcacctctccattgtaaagagcctgaaacttctctgtaagctgtgcttccttagccagcttcttcagtgcttccagcacctggtcatccactgcctttgcagcataatgataagtcagtcctgcagtcatgggaacgctgtatttcttcacacgctctgcgccgctctcacccttcatcacatctgcaacatcaaccttcgcagtctgtgaaagctctttaaacgaatcaagtgtatccaggtttttccaggtaatcatgattgattcctccttaatcgtaatctgttcttgtattttctctttaatcaaagccattataatattaaggatgattaaattcaaccccgttcttttcggaattattttttcagaaaatgaaacatccttatagcagcttcaggccagcaatcctccaagtgtatgcccgatcattccctctgcaggagaaaggccgaaattatccagaatggtagcacctgacactgcaaaggtaccctgaactggcagctgcccgcctttcaagccaggtgaataaatcagcagcggagtctgctctctggtatggtctgtgcctgtataggtcggatcatttccgtgatctgcagtgatcatcagaaggtcgtcttcacgaatcaaaggcagcaactgtgtcagcttttcatcgaacttctccagttccctgccatacccttccggattccttctgtgtccccacaaagcatcaaagtccacaagatttacgaaggtcaggccatggaaatctctttttgcgatctctatggtctgttccattccctgcacactgctgtcagaatggtatttttcagtaatgccctgattgttgaaaatatctgcgatcttgcctacactgatcacatcatatcctgcatcctttaatatatccaatgctgtcttcccaaagggacttactgcataatcgtgacggtttggtgtccgcttaaactctccctttttgcgtcccacgtaaggtcttgcgatcacacggcctaccttccattcatccttcatggtgatctcacgggcgatctcacagcatctgtataattcatccagaccaaaggtctcttcatgccctgcgatctgcagcacggaatctgcagaagtataaacgatcatatctcctgtacggatctgatgctctcccagatcatccaggatcttagtgccgctctctgaacggtttcctacaatcttatgaccggttctttcttctaattcatggatcagttccggtggaaaaccatgctctgtaaatgttttaaatggtgtggtgatatgaagccccatcatctcccagtgaccggtcatggtatccttccccaggctagcttcatttaagcgggcataatatcctaaaggatgatcagaaggtgccacatgtgagagtgggcacaaattcccaagccccagcttttccatagccggaagcttcagttcttttactgtttggtcaatgtgtccaagagtatctgcacctgcatctccatactctgcagcatccttcatagctccaattccaagagaatcaattacgaccagaaaaatacgtttatattttctcatttggctacctctttcttttaattagcctatcgctctttctttcgtctgctcagtctttcacagctcattttacaccatctttcactttccgtccacaattctccccagacggttgtatatggtataagcatcttcaatgtggggaataggatcgttgtcgctatatgctcctgctgtcaccagaatgtactctctgtctttaatcctggcaaagcttgcaaggcagtggccagccacatccgtatacccagtcttcccgcccagtatctctcctccggttacagacggatcaggcatgttcttaagcatactgctgtaataggtgatcccgtccgggtgaaggttggttccctgggaagtatgtctgactgcctgggcaatcttgcgaaataccggattatgcactgcataacgcataagaactgcaatgtcccgggctgtactgtaatgctcaggatcatggagtcctgtacagtcacaaaaatgggttccatccatcccaagcttttttgctttctcattcattttttccacaaattttgcttcggaaccggaaatatcctgtgccagtgccagacagcactctgctccggatggcagcataacaccatataacagatccagagctgttaccttctcaccaagctgaaagcctgcctgagtggcatcatgcttgtacaactgatcaatgtcatcccctgaaagggttatctgcttctgcaatcctggtagtgcctctatagctacaatcgctgtcataacctttgtcatggaggccgggtacatccgttcctctcctgatacctgactgatcaccttaccgcttctttcatccataagaactgcacaggtactccagatcccggacaaatctaggtcatcgatcacaggagaagaaaatttccctgctatgtctgctgcaaaagaactaacacctctattccatcccagggcacatccaaaggctgtcaatgccagaatctgcaccaacagacaaatcagcagccgttttctataatttctccgtctgcgtttccttcgccctgctgccatcctttctcctccttaatacaggaaagcctccccggtgcccatactggctccggcggaggctttatcttactgtcttaatctattaagctaatttcattgggttgatcttcacaccaggtcccattgtaggagcgattgtaacgcttcttaaatactgacctttcagtgtgcttggtcttgcctttaaaatagctccaatcagcgtctggaagttgtcgcttaactgctcctcggtaaaggaagctttaccaaccggaacatggatgatatttgttttgtcaagacggtactcgatcttaccggctttgatatcatgaaccgcttttgtaacatccatggttacagtaccagctttcgggtttggcattaaacctttcggtccaagtacacgacccagacgtcctacaacgcccatcatgtcaggtgttgcaacaacaacgtcgaaatccagccatccttcgttctggatcttcggaataagctcctcagctcctacgaactcagcgcctgctgcctttgcttcctcagctttagcgtctcttgcgaatacaagaacacgaacctttttacctgttccgtgtggcagaacaactgcaccacggatctgctgatctgcatgacgtccatcgcagcctgtacggatatgaacttcgatggtctcgtcaaactttgcaactgcagcttttttcactaagctgattgcttctgcggtatcatataatgttgagcggtcaactgctttcgcagcttccacatatttctttcctcgtttcatttctataacctcctgtggtatttgcggggaaaagccctcccactatctacttataatcaatcaactacttcgattcccatacttcttgcagtaccagcaatcatgctcatagctgcttcgatggatgctgcattcaggtctttcatcttcagctctgcaatctcctgaacctgagcctttgtaacctttgcaacttttgttttgttcggtacgccggaaccagatttgatgtttgcagctttcttaagaagaactgcagccggcggagttttggttatgaagctgaaacttctgtctgcgtaaacagtgataacaaccggaatgatcatatcaccctgatcagctgttcttgcgttaaactcttttgtaaactgaacgatatttacaccgtgctgtccaagagctggacctacaggtggtgctggagttgctttaccagcgggaatctgtaattttatatagcctgttactttttttgccattttcggcacctcctatgtggtattggcgggggtatatccctcccacgatatcgtgttacctgattaataatttacattttcttgatctctgcgaaactgatctctaccggtgtttcgcgaccgaacagttcaacattgatagtcacaacctgttttggcagattaatagctgatacaacacctgtggtatctttccaggctccgcctgttaccacaaccatgtctccttcttcaaaatccacctgaacgctctcctcatggatgccaaggggctgcatttctgcttctgtcagaggcaccggcttggatcccggccctacaaatcccgtaactcccctggtgttgcggacaacataccaggtatcatcattcatgatcatgttgaggagcacataacctggaaacatttttttctggacagatttggcaacgccattcttcatctccactacatcctgcagcggaacacgaacctccaggatctggtcttccagatgtctgttctcaattgttttttcaatgttggcctttaccttgttctcataccctgaataggtatgaaccacataccattttgcttctgacatacaatccacctttgtccttatttaattaaaagatttatgcattccagaatgcctgcatccatcacgctgatgatcacgcccagcagaattgtcacgatcagaacgacgattgtctgtttgataagagtaggacggtctgtccaaatgatctttttgaactcggcctgaactccctgaaagaaacctttcttctggcttttatcagcagatttttcttttccttgcatagcctaacctcacaatctcgtgactactttgtttccttgtgcattgtgtgtctctggcagaatttacaatatttcttggtttccattctctcaggatggtttttcttttccttagtcatattgtagttccgctgcttgcactccgtacatgctaatgtaatcctaacgcgcacaacttccacctccagtgttttcatttgcacggtcttcttttgccttcaaaaagcatatccgtcaccaatttcgggcataaaaaaaagacctaacttccatgtcgcttgtcaagtgtaccacaaaacatacctgtccgtcaagtcttttcctgtaatttcagattagcttttctatagtttttctatagtctttttctataaatccttttctataaatttgtactgccctttaaaatatgttttccggaatcaattccagtaattctcaatttcttttttcagggtttccatgcctttacatccaagaatgtacagataaatttcaaaaatctcttcatccggcacaaagatctcctgagtcttcagactccgcagcgtagcctggtgatatggggcaagaaagctttccaatcgtggaaaatccttatttttgtacagatttacgatcacatccttatgggttgtataatatttttccaggcggatcttctctgcacagaactgtacatactcccagcaccaggtagcataatcggttttaagatccttcatatcctccatagtctgccagttttcaccggtaaggagcatcctgtcaccggtatgtgaaatgcttccatcagccacacagtttctcaccagttttttcaggtcttccacagtaccatacctggataaccaggcatccagaaactcttctccctttccggatgcagcatattctgctgccttgtgacttcccatataaagatcctgcaggatcagagtggaaagctcctttcttgcataagatttccctgcatattccatagcctttcgatagttctcaaaggcttgttctatctgaccttgcttctttcttgcatcgcctgcaagcttatacacctgggccagcttatctttgtggatctgataatccttaaccttttctgcgatccattccagttccccgggttcttccgtgtacaggatctctgtgcgaagctttgccagttccccagggtatccaagccgttcccatgcctttgtcagtgccgggccatacagttcccggttcttttttcttctgccattctcccgcacctgtacaaaagcagtcatctcatcggtgagaagctccatttcttttactgtcctggcagtgctgacccgggtcagatataccaggcttttcatccgttccgaacgtggcagaagccggaaccagagctctgccagattccgtgctgcttctttttccctattggcaagaagtgcctggcaggtatctccgacctgttgttcatatagtgcaagaaactgatccagttccttatgtacgatcatatttgaagtcttctcccttgcctgtgcaaatacaacaagagcatcagcacatcttccccgcatccacagaagctcccctctgtatttcaggaaataaccatcctctggaaatttacgcaaggcctcttcgataaaacgttctgcctctgtgccatcctgagtttctctggcctcttccatataaaatctgccaagaaatctggtgatctgaagatgatccggatatttctcatgaagggaaagagctgtctcttttgcagaaggtttcttgccgccggcatagtctgcaatggcatgtctgaatcgttccagatccttttcctgctctattcctgtcacatttctgaaaaatccctctgattcttcttgcccactgtccttagttccggaaagaatgcgaagcttgctatgcataatcgcccgttgtaatctgccctttcggatccccggcagatagtcttcccttaactcctgataactgattccttcaactgttgcagatctttgcgcatcctcttctgccggaaattgaaaatccgtccattcatccccgtaaacctgcgtcagatattcactggccttccctgggatcattgcctgcactccctggaaatcacaggttctcccaggaaataatatctctttttccataaaaagaaagcgttctcccacatgtactgcaaatttgctgcagtcttcctctcgaaaggactgcatacgcttttccagttttccaaggacatgccttttccctgtaagtctgccagaaagataatatctgtaatatctggatggtgaaatcccccaggacagtccatgtacctcctgtgaatctgtaagatccaggtaaagccccagatccctcctgtatttctcaaaggcttcctcagacaccggatccagtatcctgatatggatccgctcccctgcaggtcctgaccccagaatctgctgtttttccaaggcacagccaaaatcctcaccatatcctgccatgggctcagggtaaagtatcctgtccttaggcagttctttcccggctatctccccaagccggttccagtctgcccttggcatataaacctttatttctgtctctccaccggcaaatccggctcttcctactgcagcaagtgttgactcttctgccagtacataccgaagctcattctcttgacatatgtgatccagctcctgaaaaagctttaacagatgctcttgtttctctgtcatttttatcattccccttatgtaaaagtcccgtaactgtaaaagcaatgaacagttgcaatgtctctaaaataataacatacttttacaaattatagaataatattttacatttttctttctgccagtggtttactttgcagtttcaccggcatatgatataatgacatcatgaaattgattcagtgaggacagattatgaaaagagtaattacatatgggaccttcgacctgctgcattacggccacatcaatttgctgcgacgggccaagcaatacggcgattacctgattgtgggactttccacagatgagttcaactggaatgaaaagcaaaagaaatgctatttttcatatgaaaaaagaaagcagcttctggaagctatccgttatgtagaccttgtgatcccggaagagaactgggagcagaaaatatctaatgttaaggaatatcatatcgatacttttgtaatgggggatgactgggaaggaaaatttgattttctgaaagattactgcgatgtagtatatctgcctcgcacccctgagatttccaccactcagatcaaaaaagacctgacagagaaaaagacaccaaaataaccggacagagccatccgtagtgatgactgctgtccggtcaacaatacctatttggtaactgtttttacccacagttaccttatttttttctgtatttccataggccgtgcaaagcataagaaataaaaaagcaggtgcttttcacaggtccatacccaacataacggtacacatggtaagtcatcctggcggatttcagcttatttctggattttcctccttcagagaggcgatatttcagatagggcctgtcgattcctactgcaggtccatatttcttcagaatcttcagccaggtaatatagtcctcatggctgtcatcatgctccatgggaaattccaaagcagcctctttctttaccacaacagacgaacagttaatactgttatgacttaacaaatcccgataagtgacagtttcttttaccggaatgtatcgaccggtatctgcaccggaagagtccatcaaagtgcgtccggtagaacataacacccgacctgtactcttcagctgctttagctgtgccgaaagcttaccttcttcccaccagtcatctgcatcgagaaaagcgatgtatctgcctctggcttctcttacaccacgatttctggaacctgccgctcctaaattggatgaattacgaaaataccgaaaattctccctgccttcatattctttcaggatcccggctgtaccgtcccatgatccgtcatcgattaccaacaattccagggatacatcctgaatgaagacagactctatagcctgacggatgtatttctctccattgtatacaggcatgaccacagatacttcaggcattctcattcttttcccctctcatctgttgaatccttaagggcattcttctgcttgtcatccacaccttcggatacttccttctgaaaaaagatcttcacagtcatgaataaaagcttaatatccagtacaaaagaataattctcaatataaaacagatccagctttagcttatcgtagggggttgtattgtacttcccgtaaacctgggcataaccggtaagtcctgccttaactttcaggcggtaataaaactccggtatctccttttcatattcctgcatgatctctgtacgctccggccttggtcccaccaaagacatatcccctttaaatacattaaacagctggggaagttcatccagatggagattcctcagtacatgcccaaccggtgtgatcctggaatcgtgcttagaagcaagacgtgcaccatttttctcagagtccacccgcatgctgcggaatttgtagatcataaattctttcccatcgcaggtaagcctgctttgtgtataaaacaccgggccgtgatcatacaatttcactatcagtgcaatgatcagcataatcggcgaaaggatgagcaagccaagaccagacaccagaatatccaacattcttttggcagctctctgctccacggacaatcccatattccttgacataagaagcggtgtatcaaacaaatggatcctgtctgtaccgatcagaataatatcagaaatcttagggctcatataacatctgatagaatgggcaaagcaatatttcagataacggttgcgcactgcagatggcagatcccagataatcacaccttcatactctttcatcatctgatgaatccgttcttctccttcacgaatatgaaccttaccgctgatatcatatttgtcacgtctggaattcatcttatggatcagatcatcacctggatccctgttaccgtagatcaccagaagcttcctagcccgatacagcctggaataaatatatctggatccccagatccatataatgatcagaagcagctgaaccaccgtcatactgatcattggcttaacttccaaaaaccagcggttgatcagtgtgatctgaaaatatactaccacattcgtacatatggttgccaatgttagtgaataaaatacatcgatcctcttcagatagccaaccttcaggccaccgtacagtcgtgaaaacatggtattgatcagtgcataaattgcgatcagtacccagttacctcttcgccagaatggctcgtcgatccggatcctgtaaaaatcataccacacatatgcaaacactgctgcctgtgccaaaatgatcagacttgcaaggcagaacacgataaaccgtttataatcttctcttttactcacgatatccctcttctgtttcatttgctttcattgatgtcttttgtcctgacatctgttattctttgtattatagcgaatatatatcctttcgtccagtctaatttcctgtatcctgtgctgttgcggtcttgtgataacaaccgataaccgttataataggaactatatgatgttggggcaaaagccaacggaacagggggcaatttatgaacacacctaaagtcagtattattctgccggtttataatgtagcagaatttcttcctgcatgtctggacagcctgcttgaccagaccctggatcaggtagaaatcgtagcagtcaatgatggaagcacagatacaagtgcatttatcctacaagcctaccaggaaaaatatccttccagactttttgtttacacaactacaaaccatggggtaagccatgcccgcaattacggtttttccaaatcccgtggcgaatatgtgtggtttgtagacagcgatgacttcatccagccttccgcatgtgaacagctgtacaccaaggcagttcaggatgacaatgaccttgtgctattttcatactataacatagatatgagttccggtaaaaagactccatttcccatgcgtcatcacaaccagaatttttcattttccgaaaagccatatgaaatgtccattctttccccctacccatggatcaaattgatccggagagagctttttgaaggcctggcatttccggaaggaatccgttttgaagatcttccgatggcataccttctggctgccaaagcacgtaatgtgggaataatagatgaatgcctttacaattacaggaaaaatgttggttttctcggcagcctgacccccgccactgccgatattaaaaaagcagttatttacctgaaagactgcatgaattccctgggctttcttgaaacctacagaaccgagatcgatttcatcaccatccggcacttttttttccgtttctggaagcttctcaccaactatgaaaccgaaaaaaaggatctgaagcttgatcttatcaaccagctttttgattatatagatgcctttctgccagattggcagaataatcattatgtaaaatacgcacttccggatcacttgttccagttgctttatctttacggttcccgcaaggaaatgctccattttgtgaacacctgtgacggaatgtccccaaaccagcaaaaggcatggctgaaagattacaaggcaggtcataataacgcttatattttcagtgaagatagactgattgatcaggaacagcctgcaaaagaatcctatctggcttccaataccagggttttgcctgaacctggctatattttcctggaatccatggaggggcaggatatccatccgcttttccttaccctgctttccggcagctttgcgaaaggaacccgggtctttctttcccttaccgccaaagcacgtcctgtatggcagagactgagccaatcctatcagctggatacctcctgtgttaccttgatttcccctgactctgaagattatgggattgcccttgcgcaatgcggcaggctgatcacagaccaacctcttccctggtatttccataagggtacaaaacagaggcatatccttctttgtacggaaagcctgattcctgttaccagttccaactgcctgacttccagacatgatctggccagatggcagcataccatgtttacctgtgatcttattgttttcccaaacaaagatatactggaaaattatatggagcacaccatgatagcgggaatctgccacacagatacttacttttccacagataatgctgctctttccacatatttattgaaagaactgtggacacccgtggatccttctcttcccatatttacggaggctgatatctttcgtcagaatgaaggactggcagcagatacaaaactgctgttctgctgtcctttgtttgcaggaaaagaccgaaaacagacctttcactatgtaagaagcttcactgatgctttatatcagctggacaatgacttaacggacaagcagattctgtatctggctcctgctcccggataccaggtggattgcagcagtttcaaacatatacgccttttgccgatccagtattccattacagatcttattcggtcctgtgatgtattgatcaccgattaccgcagcattctgatggcagactgtaattcgccaacatccgttcttcgttttttacctgaagatgatccatatccattgtcgtcttccctgcaaaaagccttgcaatttgtcccggcttgtaccaatgcacctgcgctgatccgccagcttcaggccactttgtcagtatcggatgctttcgcttctgatatgttacaggcagcaaaaatgcctgaatcccgagaattgtccagtcatcccggatccggtgatttatcacagaatgatacggctgtcccatccataaaggagcatatcctgtggtttaccggccgcaaaatatcctctgaacaaatggatcaattgagctgctttatatcccagcatccggatgcccagatttggctttcctataatgtacttcaggatcctaaggcagaagcatatctgaatatccattttccggacatctggtatcttccccttcgaatggatccagccagaagccttttctggaaaatatccagcttctttattacccggctggggctggcctctatttaccctaccggcaggatgctccgcctgggaaaacaggcatacacccgttatttcggtcctgtttcctttgaccaagtatttatccaggccacagacaatctgcagaccattgccttttgtgcagctgctgccccaaatgtgaactgtaacttgaaggcgccgggggcagatgcctccttttccaaacgctgccagactgtctttgcccatcggctggcaggaaaagaaccgggaacagggtaactttacaacacatcttaaatgtgctaccctttttagatcgtaactgttctacattcctacagttacttgtcaagatgtacttccattccctttggcggtgacattttaattcaagaatgcctcggcattcttgctgcgaggtgcgcgtcatgcaattgcatgacatatttctcctgcgcacctctgcaatcctgccggaggctatatcagctgggggattgactcccaccactgataccagcttgtttctcatcacctatagaggtgggagtcatctcccagctaatataaaaatccacgaaaggaccgcaaaatgcggcaggcaaataatatgaaaatagcagttgcaggtacaggctatgtaggtcttgtgacaggagttgccctggccaacgcaggccatcatgtaacctgtgtagatgttgacgagcataaaatccaactgatgaagcaggggatatcccctatctacgaaccagatctagagcctttgatgcagaaaaataaagaacggctttcctatactacggattatgccagtgcctatcaggatgcccaggccatttttgtaggtgttggaaccccagaaaaaaaggatggctctgcgaacctgaaatatgtatatacagtgatcgaccagattgcccagaccctggatactgattgtgtagttgtgatcaaatccacagttcctatcggtaccaacgacaaaatcgaaaagcggctgacccagcagatcactgccagaagaagcaagctggggctgtctcccatccgtgtggaaatcgcctcaaacccggaatttctttcccagggcactgctgtaaaagacactctccatgcttcccgtattgtcatcggagtggaatctgactgggcacgtgatcgcatgaaggaagtttatcaggaatttcatcagccttttgtatttacagaccgtagaagtgcagaaatggtaaaatacgcatccaacgattttcttgcactaaagatttcatatatcaatgaaattgcaaacctttgcgaacttctggatgccaatattgaagatgtggcaaagggtatgggcctggatccacgcattggcaacagattcctaaaggcagggatcggctatggcggctcttgttttccaaaggataccaaagctcttcactgggtttccaattattatgaaaaagaactgaaaacggttaaagccgctattgaagtaaatgacatccagaaaatgaagcttcttaaaaagagccacaaatactatgattcccttgaaggactgaaggtagccgttctggggctgacttttaaaccggacacagatgatctgcgggaagcgccttccctgatcaacatccccatcatgctggatgacggagccaggatatttgcctgggatcccatcggtattccaaattttaagaaatactatccggatgagatcacctactgttcttccattgaggagaccttaaaggatgcggatatctgctttatttttactgaatgggctcagatccgggactttgatatcctccgctacaaagagcttatgacccaccctatcatcctggacggacgtaactgctacccttcccataactttaaaaacaccggcattatctacgattctgtagggcgccgtacagtacaataaaaaggactgtttttgatatacaatattggtaactgttcattcaagaatgcctcggcattcttgctgcgaggtgcgcgtcatgcaattgcatgacatacttctcctgcgcacctctgcaatcctgccggaggctatatcagctgggggattgactcccagctgatatactcacaattgccaatatttttcaattactgttcctgtatggagataatagacaattatgaaattaagtgtaatcatccctgttcataacgctgcaccttatttgccggcatgtctggacagtgtactttctcaggatcttacagatctgcaggtgatctgtgtggatgacgattccactgaccagtcagcccagatcatcactaattacacacacaaggattcccgtgtgatgctgatccgccaccctatgaccatgtatgcaggctcctgtcgtaatacaggtctggttgctgctaccggtgaatatgtgcatttccttgattctgatgacattgtggaaaaaggtgggtatcgccgttattatcagcttgccaaagaaatggatgcagatatggtcaaaggaaaaagccgctgttttgataacgccaccggccagatttcctctaccgccatccttcgtttttccggtcttccggaagatctttatggcagggcagtcagtttttcacagaatcccagtgccttcagccatgtaagtgttgttccctggaacgggatttacaaaagacagttccttctggagcatcatctctggtttaatgactttatctgtgtaaatgaccgctccttctttaacgaagtatcccttgcggcagacaaggtggtatttaccaaggaccggcttgtaaaatacaggattaacaacagccagtccctggtaggaaacagagcacgtaatttccagtgccagttccgctcttttgctttgatccggaaacaatgccaaaagtacaatattaccggtgctgctcttgcagaaatcctgaaccgggagctgacagacctttttatctggtaccgtaaatacaggaatgtcccggaagtacaggaaagcattatctcctccactacagaatttgcccgcagcctggatattctgcctctgaaggactatcctcctgtttttaaatggtattatgattatctgctgctgacccaggatcatattcttactattgcactccatttaagcagttcagctgagcagcttaccaagtgtatggaaagcatcttgcttcaggacatgcccaaattccgggtatacggtattgccccttccggcacagatacttctgtataccagtcttttatggacaaagacactcgcttctgtggggttcttccttcttccggagatattcccaaagagaatgtttattttctggaacttaaacccacagttctgaaggatgccgataccttcaaaaagctgatccgccactccatggaaacagctaaaaacatggcacctgtaattcttaccctttaaataattatttacaatcattcagaaaggatctttattatggcatttaatccactaaaaatgatgcaattcaaaaacgcctgggatggatttacccaacgtcatcccaaatttccgcagtttatggctgctgtacagcagcatgggatccaggcaggttctattatcgaggttcagatcaatactcctgatggcaaaaattttaccactaaccttaaggtatctgaagaagacatccaggccctccgcagtcttaaggatatgtaatcaatttttctcaaattttatatattttttgcacaaaaatatggaaatccacatcaataatatgtataatatacttaagaatatcgtttttcttatattcataaaagcatccaagaaatgaaagtgagggctcactatgaagcaaaacagcatgttagcgatgatcctggccggaggacggggaagccgtctccacgagcttaccaacaaagtggcaaagccggcggtttcctatggtggaaagtaccgtattgtagactttcctctcagtaactgtgccaacagtggtattgatgttgtaggcgttctgacccagtatgaatccattctgttgaacagttatgtagcagcaggaggacgctggggacttgatgccaaagacagtggtgtttatgtactgcctcctcgtgaaaaagcagatgtaggacttgatgtttaccggggtaccgcagatgccatttcccagaatattgactttattgattccagatctccagaatatcttctcattctgtccggagatcatatttataaaatgaattatgcccagatgcttgccttccataaaacaagcaaggctgatgccactatcgcagtgattgaagttcctattaaagaggcaagtcgttttggtattatgaatacagatggtgaaactgaccagatcgtagaatttgaagagaagcctgcagagccgaagagtaaccttgcttccatgggtatttatatctttaactggaagctgctccgcaaaatgctgcttgcagatatgaaaaatccggattccagccacgacttcggtaaagatatcatccccaccatgttaaacgacggaaagcgcctgtttgcttaccgtttcaaaggctactggaaggatgttggtaccatcgattccctttgggaagcaaacatggatcttctcagcccgaacaatgagctggatcttaatgaccctacctggaagatctataccgaagatgtaaccaccctgcctcagtatatcggtccggaggccagtgtaaccaatgcatacatcactcagggctgtattgtagaaggggaagttaaaaattctgttctattcacaggctccaaagtacgtcccggagcaaaggtgatcgacagcgtacttatgccaggcgttgttgtagaagaaggcgcagtggtgcagcgtgcccttgttgccgacaatatccacattggaaagaatgctgtggcaggcagtgcagacagcgagcacatcgagcttgttgcacaacgtgtaaagggggctgaataatatgtatagcgcatttggcattgtaaactcatcacctcgcaacatccttgtagaaggacttcaggattttcgtccgatcggtgctttctctttccttggaagataccgtgtgatcgactttccgatctccaatcttagcaacagtgatattgaccggatccaggtatacatggataataataagccccgttccctgatcgaacatgttggcactggtcgtcactacaacatcaactccaaaagcggtcatctgcagcttcttttttcaggtgccagatcctggagagatgtatataatacagatattgcagcttatattgagaatatggagagcattgagaagatgcatcacccttacgtagtgatccttcccaattacatggtttattcacaggattttgacactctgatcggcagtcatatttcttcaggagcagatattaccctgctgtatcataccattgacaatgccaaggaatcctgtcttcactgcaacatcgtgaatctgaaccgtcagaagggtgtgctttccattgagcctaatcctggaacagcaaagaaccgcaatattttcatggatacctatattatgaaaaaagaccttttcatcagcctggtcaaaaaggcggctgcctactcttccatgttctctttgttagacattgtaaatgcagcatgcacaggtcagattgaaggcatggatcttgatgtacgtggtattcctcacaaaggcttctttgcacctatcacagatttccgcagctattatgatgctaatatggctctgatcaacattaaagaggcccagaaccttttcggtgaaggatggccaatttatacccgtaccaataactcctgccctacccactatatggatggtgcagacattcgcaattccatagtatccaacggctgtctgattgagggtactgtagagaattccattattggacgtggctgcgtgatcaaaaaaggagctgttatcaaaaacagtattatccttgcagacacactgatcggtcaggatgttcatcttgagaattttgtagttgacaagcatgccagactgatccgtgaaaaggagatcattgcaccagttggtaaccctggatacatcaagcgcagagacaccttataatatgctctatttttttcgataatacataaaggactggatgcactgtggatctcaggttcgtatatgacctgagatcctggatgtgctccagtccttttttattaattgctcgcaactgtaaaaatactgaacagttataagcactcttatttagttccgaaaatacgatctcccgcatctcccagtcccgggcagatataagcattctcattaagctcacgatcaagatgcccaatatatatctgcacatccggatgtgctttgtgaagcctttccattccctccggagctgcgataataaacatgcatttaatattctttccgccatgctgtttgataaagtcaacggctgccaccgcagaaccgcctgttgcaagcataggatctaccaggacgatctgtctctgctcaataggatccggaagcttgcagtaatattcatgaggctcatgagtcacaggatcacgataaagtccaatatgaccgatctttgcagatggaacaagtgttgtgatgccatttaccatcccaaggcctgcacgaagtacaggtacaactgccagcttcttgccggaaatcatcggagactgacatgtctcgataggggtctcaaccgtaacatcctccagcggaagatcacgaagtgcctcatatcccatcaggatagcaatctcttcgatcagcttacggaactcatttgttcctgtatttttattgcggataatcgaaatcttgtgttggatcagcgggtgatccataataaatacgttctccattttctctgttttacctccatggttttatccggtacagctcttctgactgctgtacattgtcttgggaatactgataaaatcttacctcacttttcatataaagtcaatcattgtaaaatattgccgtatcctttataatacacacagttgccgtaggctgggccagcggcagacgcagcatactttatgaggagggacagattgccatacatatattatggcttttctctgtacctttatgcccatatacagggcagataggaggatttatgaaattcagaattgaaggaatctacgatgccagaaagcttggtatcccccagatgcttatcctgggacttcagcacatgttcgctatgtttggcgccaccattctggtacccatcctggtgaataactacttccacggagaaggacttactgttcaggttacacttttctgtgccggcttcggtactcttttattccacgttcttacaaagatgaaggttcccgcttttcttggctcatctttcgcatttctgggaggattttccacagttgcagagcttgataccggtattttcaaaaatatgagctacggtgaaaaacttccttatgcatgtggtggtgtagttgttgcaggtcttctttaccttgtgcttgcactgattatcaagctgattggcgttaaacgtgttatgcgttaccttccaccggttgttacagggccaatcatcatctgtatcggacttagccttgctccttctgctatcaacaacgcatcccagaactggatccttgcattgatcgcacttgccaccattatcttctttaatatctggggtgttggaatgttccgtattatccctattctgatgggtatcattgtttcttacatcgctgccctgatcatgaatgcatgcggaatgaccaatgcagacggaagttctattctcagctttgcaggtgttgcatctgctcctattgtaggtgtacccaaattctttctttgcaaatttaatctgacctcaatccttgctatggcaccgatcgccattgcttccatgatggagcatgtaggtgatatttccgctatttctgctactgtaaaccgcaactacatcgaggatccaggacttcaccgtacactccttggagacggtcttgcaactgccctggcaggctttgtaggcggtcctgctaatactacttacggagagaataccagtgttcttgcgctcagccgtgtgtatgatccaaaagtcatccgtctggcagccatatacgcagtgatcctcagttttattccaaaggtttcagagctcattggctcccttccgtcagctatcatcggtggcatcagcttcatcctttacggaatgatctcagcagtgggtattcgtaatgtggtagagaataaggtggacctgaccaaatcacgtaacctggtgatcacagcagtgatccttgtctgcggccttggcttctctaatggtcttacctttactgttgcaggtgcacacatcaccctgacaggacttgctctcgcagcgatcgctggtattgcattaaacgctatccttcctggcaatgattatcagtttgaatcttccaaaaaagaagtaatggaagacgactgatcctgaatcaggttataaaatatttcattattaagatccccggaagcagctttctggtcaatgatgtatacaaccagaaaactccctccggggacttttgattccagcatctttacagcattttataataaatatgcggtaagaagttttaatgtattctcagcaccttttctgtgggaacgctcatatccatgggacgcatatactcctggtccgatcaggccatgcttcaggtcgtatccggcctttaaagctgcatctacatcagatccataatgtggatacacatcaacggcaaaatcgatctggtgagcctttgcggcatttacaaggccagtgactacctgataatcataaggtcctacactatccttagcgcagatggaaaccatagtctcctcacagccaaggccttctcccacgcagcccatatctacagaaatcatctccgtaacatcctccggaatggaagcacatccgccatgtcctacttcttcataggatgtgatcagcagatatactgttctttccggcaatacattctcctctttcaaatattttgcaaatcccaaaagaatagctgtactgaatttatcgtccaggaaccggcttttaataaatccgctgtctgtcactttggttctgggatcaaagcatacaaaatccccgggcattacacccagcttttccacatcctctttggaatgtaccagttcatccaaaatggcctccattgtgtcataagtacgctttgtatcgctgtattcaccatttacatggatagaagcatccgtcagctggaaggttgcgtcatattgacttccgttccttgtaaataccctgcagttctctgcttctgcattattcgcattcattcctcccacattagtcagcttcagccttccattgcttttgatctctgtaaccatagctcccaatgtgtccatatgagctgccagcataatgctgttattctttgtttttcctccaagacataccctgacagcgcctttattggtaagctctggggaatatcccattttttccagttcttccttcacaaagcctgctgccatgtgggtaaatccacttgggcttggtatcgccagcagtctcttcgctgtctccatgatgtaatctgtatattggttcatatctcctcatcctcatctttctttattctgtcacagaaaatggctgtccatgatattaggacagtcattcctctttcttatgatagagtataacatattttccaagctgatatggaggaaatttataaaacctatactatttttactgaataaattttgccagtttttgattaatgcgtgtttgtacatccagataatatgctgcttctgttgcatttaagttcttactctcccatgcctcaaaatctttcattgcctgtgcatattttgctacataatctgcatattcaattaccaatgttggatctgctccattggacttttcatacttatccataaagtcacaatattggttcataaattcttcatagctgtccattgcctgcttaaaatcagaatgcattccatccaccagctctgcactatcctgagaattcgaattatctgcttctgtttcttgctcagtttcaatcgtaacatctgatgcttgctcaggtgctgaagttacctgatctgttgtatcagtagcatgtgtttcgctggctttattaagttcaatggtcattacattatttcccacataagtcagagataaactatttccagctgcatcatctgctgtataatatctatcccccttctcataatcaacagaaaatcctttttctgcgcattggtcctcataagtaccaaaatcatcaatggaagtttcgccaacataaatatagcagcctgttgtatcatctctggtcaccttaccaatagtagatgcgggcattggaagtaaatttgcaatttcactcttaggccaattcagatttcccatttcgatcggtgcagataattctattcgcattgtatcctcataaagatgtaattccacctcatatccattctcatcaaatgcagtaaaatcatttcctgatgtattaatgtctatggtatagcccatatcctgacattgttcaatatattttttataatcacttcccttaaccttattcactgccagtttgaagccatcactactgttactgatgatctctcctgtttttgattttggtttaggtaattgatcacataactgtatttcctcccaatcaaatttctcttcttttaagttatttaattttgtatatcccccgattgcaaccacaagaattaatacaaaaaaccaaaaatgcttataaaagggcttcttattccgtgccccgcatgatgggcaaatctttgcctttttgggaattggtgtattacaattcctacataataccattttttgtttcttagacatattccgttcctccctttgattacttaaaattattacttttcattagtaaagcgggcattcgcaatccgcttcgctacttgctcatgaacgcagtcgcttcgcgatctgcgttcaaaatacgttttttttctatttcaaattcttcctgggtcagaatgttgtcgtccagcagactttttagttctcgcaataaatctaccctgctttttgactcactgtttcggcctgtcatatcttgaacattttttactatcgtattgccaaatgcaactcctgcccccagtccagccagccctccttcctgtttcactgcatctctcatagccctggcggtttgatattgcataaaagagtccatatcattttttgtaatcccaattccagattgttcatctatcaatttttcaaccgtttccggaagagaaatgctttcaataattacgttgttaaatagaattccggtttctttcatctgctcgtttagcttgtcctgcatatcagacgctaatttccgatagtctgccgctaattctaaaacagatacctcagccttgccaattgtatctgcaaatatttctgttaccattgaggacaaatattcaataatatcaaaggtcatcacaattcctcttgttccaaatatttctttcataaaaagtgatacatctttgatcttgaatgcaaactttccaatggctctaattcgagcaacctgaaaatccttatctcttttcaaaattggtgtttttgtgatccatttattatcaataaactgacgtgtactaacaaaatacacatctgcgatcactggtgatacaaataaataaggaaaggctttcaattttgttaataccggaaaattctctgtatttaatgaatatgtccctggtgtaagaatatctgccagcttaccaccttttaggaatacagcgcactgactttcccttacaatcaccttcgatccttgctttaattcattatttccactttcccgattaaatttcatgaccagaagcttattgctgttatcctcatattcgatcacatccagaaactgatcttttatagtatcccaaaatcccatagttcccccctattattgtaaaagcaaatcaaattcgtctctgaaagatcctgtcgctatgcgtacaatatctataatccaccctatacccagtacccctccagtacataaataaagaactccagttcctgcttttccaacataaaacctatgtactccaagccctcccaggaatatgcatagcagcaatgctgtcgttttatttttctggctgattccatatgttatttcattttctggtagtttttccgagtaaacagattcctgtatgttctccttctccgtgtatccacaatagctgcacatgtcttcctccatagcagcgccacataccgggcattttttctccatgtcaattccttctttccaattaaaatcccgttaaaccatacgcacatttgttaataaaagatactttgcgtagtttattttataatatcactcattgcattctcgtgcaattatttttcatcaatcctgtctacaatatttcaaagaggtgcaattatgaaaaatgcagaaagtattgatcgaattattcaagtaaaagatattaacattggaaaaaatatatctgtactgcgcaaggcaatgaaaatcaagcagactgacatggttgccagacttcaaatatatggcttagatatctccatctattcttataaccgtattgagaaaggtacccaaaatcctactgtgtcttttctgttggcctgctgtcagatactgaattgcgatgtaaatacattatttgatttccatcctattatttaataattttttatcatcatgtacacagttaagtagcctgtccaatctgcttaactgtgttttttctttattatcttatctgcacgctccgatatttttatactgctattttcttttcattcaagaatgcctcggcattcttgctgcgaggtgcgcgtcatgcaattgcatgactcacttctactgcgcacctctgcaatcctgccggaggctatatcagctgggggattgactcccaccactgataccagcttgtttctcaccatctatagaggtgggagtcatctcccagctgatataattcagtagatcttttgtctgcataattgcaaaccgtaccttatcataatccaacaacttatctgcctcaaaaatttctttggcatattcacatatacatcttaccttgttaagtttctgaatcattccagactccattccaaattcctttctcctttcgcatatttttatatttgtcatcaaattgtcctcatcccattcctcaccattgccccatttaattagcattttcatcgcctccttcattacctgttccgtatcatatattgcatatcgaagttgccctaactgaagctgctgatatgcttcatcaagcctttttctcaattgatctatatcgcttatataattataattttcatttcttcttgagctaacacgatttttcaataaactaatctgctccaaataagttttatcattgctttcttctggcattggcggcatgccattttcagctatccacataataaattcgttttgttgctgtaattttaaaatctcatttctatttttccgaatttttaagtacatccacttatctcgcttatcttcggtcattcgtaaaatctgtttgatacactttaaatcccatcccatttctttatatatcataagttcccataatttccttaatgccatctgatcatacatacgataattatttttcgttcttttcactttaatcactccctcatcgtcataatactgaagtgttctcctgcttacaccagctagtctgcttacttcacttacttttttcattacggcctttcctttctccgcatcaaaaacatactctatcacgttgacgtgacagcaatacattttttcggaacatgcacactttggttacataaaaggccttgtatttttcgcgaattttaaatctacattgattgtttttttcttcaaagctaattttccaaaaaatcctgtgccatccgcaggatccctgttctcactcgtcttatatttgtcttatagtgtatctctcttctacttcaagtgattttatgatattcaagaatgcctcggcattcttgctgcgaggtgcgcgtcatgcaattgcatgacatacttctcctgcgcacctctgcaatcctgccggaggctatatcagctgcaaaaaaatgattgaaaacgctttccagaaaatttttcgtactgccacaggtcttcacctgctaaacagcatgtttctggggcatatgtaatacagcgcacaaaaatggaggctgtctatttatttaccgacagccccctgcacaaattttgtatgatgtaaagatatagttactttttctcttatttgtgtaaatttattctaccagtacatttccacatactctcttgcttctttttcggatactgagaagtctttcattataccctgaatcacatctatcttactcatattaaatcttttgcataccttaatattggcggagattccttcttgcctgcccctttccacgccttcatttaccaattcttctaatgcgttgcacatattgatccgacctctctttctttctgcttttaaagcgggagtaccccatgtatcttgaagtcctatggcaatactgcaagcaggctttttgaaatatgccatattaaaataccgaaacaggccgtcattcaatatatttgttagcaaagcaagctctgttattgaattctttttcaactgttctattctcatatattctcataatcgaaaaaacaaggtcaaaatagagtcacgggaatctttctggaaatttattatatgaagtaccatccatttaccagctgtttttataactgaaccgaaatgtaaaatagaaatgaaagcacacagaaaaaaaccagaaatatgggtgctaccataacggtaggcggttagtccttctccagagggactgtggtctacactccgttacagtcggtgctaagcgagtgccgccggcactcagcccccctctgattacatagaaacccgaaagggactccacaggaaaagagggataagccatgagtattgttgacttcatagcggtggtaagcttcggcttaacctgctttggtcttggatatgcctttggcaaagataataataaatcacaaaaataaccgccccagcctgcaaactgaacggttatttttaatcaattaagtatacggactaaccgtctatcggtagcactctttttctataatcatattagcacgcatgtgcagaaatgtcaaaaaatttttattctactttttgaagttttgacatatccaatccatgccggatcatcatcagaatatcccatttttaattctatgtacattaaattgttaatcattcttattctctcctgattccaaattttgcaacatctcaacaaactggaagctgtaaacctgattgttcctaaattaactgtggcataccattgataaacatatgccatgcctgtcatttttcgcactaagtttccatccatgcatttcaacgatttcttttgagagggcaagccctattccgctgtttccgttttgtcccgtatgaaaacgttcaaacatatgggaaaaatcctctgtgctaagttctcctccatcgttccagatggaaaggacttgatttttccacgatatttcgatttgactacacgcatattttacagaattagttatcaggttagcaacagcgtgttccagcttctccgggtctccgttgacatatccttcgtccagttctaacgatactgaaaggtttcgcctgttcacaattccttcaagcggcatcaaaatatcttgaaccagtgatgccatttctattggttcacactttaatggttccgtaccgctttccatttttgataaatacaggatatcctcaataagtttactcatacgctccgtctgagacactatcattctgcccgcttgagaataatcggtaatgactcccatttcaatctcctccgcatatccgcaaattgccataagcggggtttttaattcgtgagatgtattttcaaaaaaggtcttctgagctttgtcattttgttcaagttttttcccgagaaaatatccaatggcagcaccgagagcggcaatgacaaaagcatccagcaaaacaccaaaactgatttcttttacgagttctggttcgccggtaacatccacataagcaagtaatctctcattactgtcttcgtaatactctgttctggctttcatataataagttgcttcgttaatttttgccctttgcatttcatcagacgggtgtttttcataccagtcaataagtttcttctctttgggtgtcagaatctgatatatgtcatccctgttttctgaatctgcccccatatatacaagtgaggcataatataaagagcccgtatcattttcagattcgtaattcaaatattcgtctgaatccaaagtaaaagcgtttttaattgcattctcagctctcagctctatttttttattaaaaactatgttcagaatcagcaggctcaaaagcatggctgccataacggcggaacctgtaagtgtggcaattttataacgtgtcttattcattacaatcctccagtttatagccatagccccagacagcactaatgcgaactttgctgcctgcggtcttcattttctgcctgactcttcttactgtctcatcgacaactctggtttctatctccgtagaatctattccccatactttgtcgagaatttcattccgggggattgccgttccaccatgttccataagacatcccagaagcgaaaattctgtcatagtcagaccaatatcatgctctttcacaatggcattatgcttctcccatgaaaaacacacatcaccaaaggaaatatctgcctttaccggtatattcatttcaactcttcggaacaacgcatttacccggacaacaagaagtgacggcgaaaatggcttaatcagatagtcatcccctccatacataaatcccttcatatggtcagactctgaatcctttgccgtcaaaataataataggaactgatgatattgtccttagctttttacatatggaaagaccgtctgaacccggcatcataatatcaagaataacaagatcacagggcttctcctgaaaagcagaaaagagtgtatcaccattcttgtatgctgttacctcatatccggcattggataaaaattctgtgagtatttctcgtatatcctgttcatcatctgccaaatagattttttttgccatatctttaatcccacatgaggggagtccctcagaaattctgtgagattccccatattatatctttcaaaatcagtatatctgtattttagttccactctgctttcgcttcaagagcgattgcctgtgcctccaaagcatcaatctcatctgaatacttcgcatagcgagaagcaaattcctcttcagagaggttatcagagccgttataaatattgtcatagattgcatcaattttattgtaaatactgttaagctgattgacttcatcttcgctcaaatttccatagtatccctcataccaacccgctttcttttcaagcgtttcaatctgtgcgttcagtgatgtaatctcgtcatcatactttacatagcgggcttcgatctcatcgtctgaaagatcatcgtccgtccacacttccgcatcaatttcttcgattctttcatatgctttctgaagctgttctgcttcctctgcggtgagcttgcctgtatcgtacagagcattatactcatcctcggaatattcatattcctcgttgtcgatccacccggcttttttatcaagctcctcaaggcgatccatgagggtatcggtttcatcctgatactgatcgtatctggcatagatatcttcatcagaaagaccatctgcatctttcattacctctttgtcaatagcgtcaagtcggtcataaatggagttaaactcttcaatctccttctgagtgagagaaccataatctacatttgtttgtgttacctctgatgtagtcactgtctcctccagtgtctccttctgggcagccatggcaggaatacctgcggatgtagtcattgctgctgcaagtgctattaccattcctcttttgaataatctgttcatcattttagttcctcctgattttttatttaccggttgttcggtatggctaaagtatagctcaggcaaatgtaaaaatatccttagaacagtcatgaaaatgtcaagaaagtgtgacagcacaagatttcctataaaccatatttactctcgcctcttaagggttacaatcttttttcaaatacccacaatttttctaaatctgcaattccgatttaccttcaccttattttaccatagtgctttctaaagtgctattctaatatatacaaaagtgtaaaagagcgatctcttctctcacactcacacatataccatgtttttcaatataatctcttctgcactaacttttatattattcattaacctaacccacttcatctgatcctgtacctttaattcttcagttacacccttttttctgccatctgtttcataagcatttccacctgttctctggcttcctgatctgtctggttcagatgttcattcagttttccagtcaataacagatactgataccttgctgatctgtgttcttttaagaactgctttcgtaacattccatattttccatatgtcggttctgcttcgttcaaaaccagatccggcaaatagtaatctccatgcaacgtataactcattccgtttttctcatcataaatctgttttttcataacattaaatctccaatcctctatattttgttttgttctctttatgctgttgattttccatttgcctcttttgagtagcccattccagctgtttcagaacgcttccctttggcatttgctccattcgccgtttttcttcccgtgtcctttgttctttaatatcctgctgcaccacatcctctacagtttctgatccccaaatacgcaccactctgtcatatctgtccgaagtctcttgtaaacgttgattatcatttaataattccccattttctttacgcacatcatctaactgcgtttggatatcatcacatttctccgtagatttttgatatttgtttttccagctttctatcgttttgttaagttctacaacctttccagctaatgcagcaatctgattcttcatcttgataaacaatggcttgattttattttctctgtaaggtactgcacgttcaaatgttcctgcctccggtaaaaacgtcttaatcattccatattcttttatttccttactgacattatccataatcggcggcagcacatctcgacgctcttccagactttttagttctttttctgcgtcctctgccctttgttctgcttcttgcttctccctaattgcctgttccttatcgtcttttaaaatctggatatctgctctggattccgcaatttgtgctgtcagttcttcgttttctgcagttagatactctttctcctgctccagctcctgtacttccttttttcgttctttcttcttgaagttataaacatccaaatgttcctcatgagtacctttctgttcccattcaataccatgcttttttgcactctctgccaggacctttttttcatggttcatccactggttcaactctgtatcatgcttatttccaccttgaaatccaagactttttaatgcctgtttcaacgaaactctggtatccattccttttcctttccaatcagtcacataaggaataaaatcaatatgtatggggtagcttcatcctgatgtagataacaaccaaatacccgtaacgttggattccgtttctggaagtcctttacatattcatccagtacttttacagtcagatctccttctgctgttccgacagccacatcttctcgatttccaatctggaaaatcgcttcgtggaacaacttctcttgttttccctgccggatttatcatagtaatttgtaatctgccgatcctttcttttcccaaggttgtatctctccacagcatcatcaaataactctttatagacttccttcagattttcattctggtaacaaatatttaactgcactctacccggatcaacattttctgcgaaaaactctctcctgctatgggtcaaagaacctttccctatcataccgctaattgttcgttttatcataatgtttctcacctcttttctgagcaagtgccagatagcacataatttttatttacgccagtcatggcgatattaagaaactttcgccgaatacggcggttttgttacttttgtcaaaagtaacgcaaaagcattttcgacagccgttccgtccatcaaaagtacccttgcgccctccgggagtataagacgtccaggggacgtctgttctgcaccgaccgaagcggagcgaagacctaaataatatcataacagtatcacaggcagatatgcgaaggttttcattttcttccatacctgcctgtttttaatttattcgctattctttacagccttattttaaactttttactcaacagaaaaaccccggaaaccttacggttccggggtatcttacgtttggacaca

SEQ ID NO: 186 - DNA, 1983 bp, Unknown
  gut microbiota DNA sequence
agcgggcggtggaatttaaagtttcattttagacattagaaataatcctatcatcggtcttgacagatggcggtattttgcataaaataaacaagaaacaggtgctgatatagatacagtgcctatatatgcaatatgacgatgaagagaatagtacatgaggagtaatcccagagagggcttttgagcagagaaggatacagtttctgcaaaggtgtgaggagcctgtgcacaagtcatggaaccggtcttggagtcactgtgcaactgaagcacagcgcatttccagcgataaagggaagatgagagagcatctttataagtgagatgctaatcagggtggtaccgccgagcttttcggtccctatgatatgggattggaaggttctttttttatttaaaaaggagaatgcaaaatggcaaaagaaaagaaattagtagaagccatcacatctatggaggaagattttgcccagtggtatacagatgtggtgaaaaaagcagagctttgcggctatacaagtgtaaaaggctgcatggccatcaaaccggcaggatatgcgatctgggagaatatccagaaggagcttgaccgcaggttcaaagagacaggcgtagagaatgtatacatgccaatgtttatcccggagtctcttcttgacaaagaaaaagaccatgtagaaggttttgcacctgaggttgcatgggtaacacacggtggtctggatccgctgcaggagcgtctttgcgtgcgccctacttctgagaccctgttctgtgatttctaccagaaagagatccagtcccacagagatctgccaaaggtatataaccagtggtgttctgtagtgcgctgggaaaagacaacccgtccttttctccgttcccgtgagtttttatggcaggaaggccatacagcacacgctactgcagaagaagcagaagcaagaaccatccagatgctgaacctgtatgcagacttttgcgaagaggttctggctattccggttatcaaaggccggaaaacagataaagagaaatttgcaggagctgaagctacttataccattgagtcactgatgcatgatggaaaagcccttcagtccggtacaagccataactttggtgatggctttgcacgggcatttggcattcagtatacagataaaaacaatcagcttcagtatgtacatcagacatcctggggaatgacaacacgtatgatcggtgcgcttatcatggttcacggagataacagcggacttgtacttcccccaaggatcgcaccggttcaggctgtgatcatcccgatccagcagagaaaagaaggagtccttgaaaaagcagatgaacttctggctgcattaaaggctgccggcatccgtgcaaaagcagatgtgacagataagagtcctggattcaaatttgcagagcaggaaatgagaggaatcccggtacgtattgaatgcggaccaaaggatattgaaaacggacaggctgtagtctgccgcagagatacaagagagaaatacacagttagatttgaggagcttacacagaaagttaatgagatccttgaaactatgcagaaggatatgctggagcgtgctagagcacacagagatgcacacacatacacagcaaccacttatgatgagttcaaagataccatcgtgaataaaccaggctttgtaaaagctatgtggtgtggctgccgtgaatgtgaggataagattaaagaagatgttcaggcaacttcaagatgcatcccatttgagcaggagcatctttccgatacctgtgtatgctgcggtaaaccggcgaagaaaatggtatattggggcagagcttattaatccgtgcttcagggcacattatcaggcatgcttgttacagagaaagggttgtcaggatgatatgctcccttctaggtagacaagtgaaataataaaaacttgtcacttaggagggagcatattttat

SEQ ID NO: 187 - DNA, 544 bp, Unknown
  gut microbiota DNA sequence
gtgtatcgtaatgaagttaaaaacttcaattcgatacaccttttttgatgggcaaaatcagagagtagtttggttcttttctgattttctgtcattagtctgctgaactgacgaactgcggttaagatattgattcagattatctaattttctgttgagagcattgatttctttctcagcagatttataggttttctgtaaggtttctttcttcgaatacaaagaattgtattcgttacggagcttttcaatatctagagttttagggttcattccaaggcgttttaacatattttctgcaccgtcatggagtagaagttctgtttcgtgacttcgcaggtaagcatccggatttttggatttttgatatcggacatgatagatatgattggtctgatattgctcagcatatttcaaaatctgtcctaaatcctttaactgatgctcggtttcaacaagactgtttcgtgcagttttggcaagaaccgacttagctgcaagctgtttttccaactcggcaatgggctaagaaggtggtatgatc

SEQ ID NO: 188 - DNA, 213 bp, Unknown
  gut microbiota DNA sequence
actctcactaaactcagcttcgcttcgtcaagtgatcgtagtgtaaaagaattttcgagaatcgtatgtgtttcactgtttagttatcaatgttcatgttgtctgtcttgcgacagcttatctaatttatcacatctatttttgtttgtcaagaactttttaagttattttaaaactttttaagtggtttcaaaactgtttaagataatgata

SEQ ID NO: 189 - DNA, 3174 bp, Unknown
  gut microbiota DNA sequence
tgttatctgtcttgcgacagcttatccaatttatcacatctgttttcgtttgtcaagaactttttaagttattttaaaactttttaagtggtttcaaaactgtttaagataatgatatctgccattctgtttcaacgacttggttactttatcataagttcagtcatttgtcaacaccaattttatattttctgaaaacttgctaatttttcagttgttcagaaacatttccttgcgacagcttgtttactttaccacacccaaaagcattcgtcaagcactttttttaaaaagtttttacgttttttcaaataagtctttacaccagttttatttacgttttcaaaattctttaaattatagaatccgctcagaattgcaaccaatcattgacatattgcccaatatctcttaatataggaatatagaattatcagttatatacaataccgcttatataagtccataataggttggacgtttctaccaactaccgtaatagttgtctataagcatctatactgtcaggaggtaaacgtatatgctcaataacatatttgcattaaaaggcactttttgttacagcaaggactcacagaatctgatcatccgtgaaaatgcatatcttatctgcaacaatggtatctctgaaggcatttatgaggaacttccagcctgttttcagggaatccaggtgatcgatcataccaacagactgatcattccagggcttatagatctgcatcttcatgcccctcagtatacattcaggggaacaggtatggatctggaactgcttgattggctgaatacctctgcctttccagaggaggccagatatgcagaatctgattatgcccaaaaagcatatcagatttttaccgaagatctgaaacaaagtccaaccaccagagcctgcatttttgcaactcttcacacagatgccactatgattcttatggatctgctggaagacaccggactcaagacaatggttgggaaagtaaatatggatcggaatgccccatcatatctcatggagcagaacgccagcacttctgctgctgccaccaggcaatggatagatgcagtctctggccggcattatcagaatacctttcctatcctcactccccgctttattccttcctgcagcgatgaactgctgattcttttatctgagatccagcaggaatttcatctgcctgtccaatctcatctttctgagaatcccggagagatacactgggttaaagagctgtgtccggacagtcttttttatggagatgcatatgatcatttcaacctttttggaagagatcattgtcctactgtgatggctcactgtgtatattccacagaagaagaaattgcccttatgaaaaagcagggtgtttatatagctcactgtcctcagtccaataccaatctttcctctggtattgcacctgcagcccgatatctgcgtgaagggcttcatgttggtcttggaacagatattgccggaggattttctctttccatgctgcgtgccatcgcagatgctatccaggtatccaagcttcgctggcgccttgtagatccttcacttaaggctttaacacttcctgaagctttttacatggctacaataggcggcggttcattttttggaaaaacaggcagctttgaaaaaggctacgaacttgatgcagtggtgctggatgattccagtcttccatctcctcgttctttgccaccactgacccgccttgaaagactgatttctctttccgatagcagcaatatcattcaaaaattcgtgtgcggaaactctattttttccaacactgaagatagataatacaaggcaccaaagtgccaaatgaagggggtaactctatgaacctagaaaaactttttcacctgaaggaacaccacaccgatgttaagactgagatcatggccggcatcactactttcatgaccatggcttacatcctggcagtcaacccgaatatcctttccgcatcaggaatggatcgtggtgctgtgtttacagctactgctctgtcttcctttatcgccacatgtctgatggcactgttgtccaattatccatttgtgcttgcacctggaatgggactgaatgcatactttgcctacacagttgtattaggtatgggctacagctggcagcaggctcttgcagcagtatttgtggaaggtatcattttcatcctgctttcccttaccaatgtgcgtgaagcgatctttaattccattcctatgaacctgaaacatgcagtatctgtaggaattggccttttcatcgcatttattggtatgcagaatgcaaaaatcgttgtaaacaatgactccacacttgtaagtatgttctcctttaaaagtgcagctcagaacggaaccttcaacacagagggtatcacagttcttcttgctctgatcggtgtgctgatcacaggtgtttttcttgtaaagaatgtaaaaggcggtatcctttggggtatcctgatcacatgggcacttggtattgtctgtcagttcacaggcctttatgtaccaaatgttgaagctggtttcttcagcctgcttccggatttctccaatggaatttccgttccaagcatggcaccgactttcatgaaaatggatttcaccgttgtattttcacttgattttgtagttatcatgtttgctttcctgtttgtagatatgttcgatactctgggaaccctgatcggtgttgcatccaaagcagatatgctggacaaagacggaaagcttcctcagatcaaaggtgctcttctgtctgatgcagtaggtacaacagtaggtgcaatgtgcggtacttccacagtaacaacattcgtagaaagtgcttccggcgttgccgaaggcggccgtacaggtcttacttctattgtggctgcaatcctatttggtctgtccctgcttctttccccgatcttcctggcaattccatcctttgccacagctccggctttgatcgtggttggattcttaatgttaacatccgttaccaagattgatttcaacgatatgacagaagcgatcccggcatttatcgctatcatcgcaatgccattcctgtacagtatctccgagggtatctcccttggcgttatctcctacgtagtgatcaatcttgta

SEQ ID NO: 190 - DNA, 206 bp, Unknown
  gut microbiota DNA sequence
gcttgcttttgatattttccccggaaatcaaaacgaacagctcacactaaaaccattagaaacaaaagtaattaaagattttgattgcagcgaatttatcttttgttcggatgccggcttaggaagcgtaaaaaacagatttctaaacagctttgggaatcgttcttatgtaattacttactcattgaaaaaaatgaaacaggaag

SEQ ID NO: 191 - DNA, 206 bp, Unknown
  gut microbiota DNA sequence
cttcctgtttcatttttttcaatgagtaagtaattacataagaacgattcccaaagctgtttagaaatctattttttacgcttcctaagccgacatccgaacaaaagataaattcgctgcaatcaaaatctttaactacttttgtttctaatggttttagtgtgagctgttcgttttgatttccggggaaaatatcaaaagcaagc

SEQ ID NO: 192 - DNA, 73457 bp, Unknown
  gut microbiota DNA sequence
tttttcagttgtccgcctccagctgttttgtcagatatcgtcctacgatcttcgagaaatttccgatatcacggatataggcaaaatcctttccaaaaatcttcttttccgccggaagatccttctcttcacctgcaaatacccccagaacactgacgccctggctccgaagacgccgcacctctgttgcagtatctgaaatggcatattttccctgataaggggccggattttttgcattggggcggtttatgatcacatcgtaggggcgtccgtcacttaagatgatcaggatctttttttcctcttccctctgcaaaagactgtatcccgctgcttttatggcaagcccgtcccgattattggaggaagtcacataattgaaaatatcctcatccgccgaaaccggatcatcatattcccggaacctgtgcaggatcgtatgatcccaaaatgtgcagtagctcataacccgatgagggatgtccacattgctcagggcagagctgatcatataagcctgcagtgccacatctccctgtcgactcatctgtgaaccactggcatcgatcagtatatccaccacaaaatccgtattgtctccacgaagaatcctcttgaaaagatttgcctcaccgcttctgcctatacgccacagcctggaaggaacgatagttccccggtctgataggacttcctggttttcgcttcggatcaccagtgcttttttcaggagttcagtcaatatggcaatatttcgttttgcaattctgtgcttgtcatgatagatccatatgttcttattacgcagacgctttgcatactggtactgataattatcacgaaccggatttttcaggattccttctgtaaaatacaggctgcagtctccgtgtattccccggcacataagatggttcattcttttttcttccgcaggtgtgagataggtttttccaaaattcagttccacataggtatgagctttctgaagagcttcctctgaaatcaccgtgatcttgtttttcaccttacgtttttcttccatatcctgtgtcagcgaggaatcttcaatatctgtcatccggtctgtgagcttttccacgtaattttccagagcttcctcatacatctcttcattaaggtagtcttcccagccaaattccgtcagttcttccagcgtcaccgccattacccgttcaagggaaccgtttttcttctcaaagtccggatcgatgaccgcattatagaggctgtcgatgatccgaatcagttccatggtgtctccgctttctgcacaggcatagatctgatcccggaatgcagacagttttttctccagaggctgtacgcttcctgtaagtacatcacggaatactgcaattttcagcctgtctaatagcttatcgtaggaaggcagggtttcatattcctgctccaggatatcttccagagctttttttctcatgcggcgaaccccggggcgctcttcacagatccgctctcccactgccgcttcgatacagagctgtgtcagccccgtcagctccgtctcagaggcatccagatagattttttttacaagataaagaccaagaagatttttgtcaaaatatctggcaaaagctccctgtttgatcccatcgtaaagagcgatctcttttgagcggagaaacagcgatacatccggcttcacatccagggtatagtcgccgcttaccgtccagaggagattacggatccggttttccagttccatcttgtaatcttctatagaaagttcttctgtcagatctttatgcataaacatcgtcctttgtccactcttccgggatccttgtacggactacatcgtccacgatctccttttcaaaaatatcgaaggttttgttcaccactcccatctgcactgctgccaggggagaaagtcctgcacgaacaatcttcatggcagccagaagtcctcgaagatccagcgcttttgtggagatctcactgtttacggatttcttctgaagatccataaatacaccgataaactgttccactgccttttcctttgcctccgggaacattttgcggaaaataaatcccagggtttcttctgtctgcgctggcatatcgatcaccaggaaacgagaaaccagagcttcgttcagctcctttgttcctgcatatccgtagttcatggttccgataaaacgtgccgcaggatgaaggtcgatccggtcatagcccggaacatcaatggagcggcgatagtccagagttgcatgaaggacagagaccgcatcgttctttgccatattgatctcatccagaataccgaagccaccatactcggcacactgatagatgctgccctttcggaggcagacttcattgtttacaaaggtatccgttccgatcaggtctccgctgtttgtattgacatggaaagatacattataaaccgggcggccaaaagcatatgccagattttctgccaggatattttttcccgtggcctttgggcctgcaagaagaagattttctccttccaaaagtcctgcaatggccatttccaggatttcttttccgtagaacggtatagacggtctggtaactctggctgcagccccctcatcaacgttataattttttcgaaattcctcgatgccgtggatcaggctttcggaaacgttctgttcttttaaaaattctaattctatcatatatacttactcctgaatctgattgaataccgcagatatcctcatccgcagttattatatgatcctatgacggataaccgcttacagattttttctccaccaggtaaaaaacgggacagatcttacatctgtcccgtcatttgatctcaaagatgccgctgcacccagggaacatctcttatttcctgtattttatttaaccgatcatacctcaaagatcagatcaccgtaggatggcatcggccacatatctttatctacgatcatctcaagctcgtctacaggttttcttaaagcctgcattgccggtaccacgctctctctgaagaatacagcacggtcacgtccctcttcatgggattccgactcagcgatcagtccggaaagcttatccatagctgtcttggtctcagcaagaagtgcggaggttttttccagaagacttgtctgtacactgacatcaagcgctgcgctcactgccttcacagaattgatggactctgcaagaaccgttgtataacggatcactgccgggatgatctgcttggtagctacatccaccatggtcttggcctcaatgttgatagcctttgcatagccttcatactggatctctgctctggactcaagctctgctcttgtaaatacattaaaggattcaaaaagcttcacagccttatctgtagtcagcgcaggaatggcatctaccatggacggaaggatcggaagtccacgtctctttgcctctgcctcccactccggtgcatatccgtttccgttgaatacaatacgctgatgctggatcgcatactccttgatcaggtcatgtactgcagtatcaaaatcgtctgctgcttccagacggtcgcatgcatcgcggaatacttctgctgcaatcgtgttcagaactacgttgcactcggaaatggaatcacgggaaccaaccatacggaactcaaatttgtttcctgtgaacgcaaatggtgatgttctgtttcggtctgtagcatccttcatgaaatccggaagtgtcttaacaccggtatccaggatctcgccggtcttactgtgtgtggcggtacctgtgctgatcagctgctccagcacatcctgaagctgctcaccgaggaatacggagataactgcaggcggtgcctcgtttcctccgagacgttcatcgtttccaacgtctgctgcagactctctcagaagatctgcgtgctcatcaacggctttcaggatacaggtgagaacaagaaggaactggatattctcatgaggagtttttcccggctcaagaaggttgatcccgtcatccgttgtcagggaccagttgttgtgtttaccggaaccgttaactcctgcaaatggtttctcatgaagcaggcagcgcataccatggcggcttgcaacttttttgaggatacgcatcatgatctggttgtgatctgctgcaatatttaccggtgcgtagatcggtgccagctcatgctgtgcaggtgcaacctcattgtgctgtgtctttgctgttacgcccagcttccagcactcctcgttgacttccttcatgtatgcggagattctctgacggatggttccgaaataatggtcatccatctcctgtcccttcggcggcatagcaccgaaaagagttcttcctgtatagatcaggtcttttctctggagccatttctccttatcaaccaggaaatattcctgctcagctccaacggaaggagttacttttttggaagttgtatttccgaaaagtcgaagaagtcgaagtgcctgtgtattaaccgcttccatagaacggagaagcggtgttttctgatcaagcgcctctcctgtgtaggagcagaatgctgtagggatacataagatcccgccggctgcgtcatgacgtacaaaggcaggtgatgtacaatcccatgttgtatagcctctggcctcgaatgttgcgcgaagtcctccggatgggaatgaggatgcatccggctcacccttgatcagctccttgccggaaaagcttaagagtaccttgccgtcctctcttggcgctgtgacaaatgcgtcatgcttctcggcagtaacgcctgtcagtggctgaaaccagtgacaataatgagtagcacctttctcaatagcccattccttcatctcatgtgcaaccacatcagcgatctccatggacagctccttaccctcttctattgtctttttcagttcgcggtataccttcttcggcaaacggtcctgcataacagaatcgttaaatacatcgcagccaaagatttcctttacgttgatataatctcccatttcttcctccttttcgttcctgtatatccagtctttcttatgaggaaagacattttcacctctgtatgatcaccttgtcttcggatactcggatcattcttcgctcttctgggtaatctccttgatctcctgcattttctggttcagccggctttttttctgtttcttactgctggtaagataaaggttcatggcctcatgaagattatcgatctccacatgggtctgatctccaccgaactctccatccagcgtccacggaacagcctcctctgattctatcacaacatgcgcagacttaaaagaatagatcagatctgtattatcctctgcagtaagaagcgcagtcatgatctcctgaagctccagcggattcttcggattggtgatcagtgtcacctcaaacagtccgtcattcatatccacgttttttccggtaagattcttaaatccgcctacagatctggaattgctgatcataccgtagataaaatcattctccacagtcagctcatcggaggttaccttcagatgataggatttcacctcaaaaagctgcttcatcccttccagcacataggcaacatgtcccaggatatttttcagatcctggtctgtctcataggaaacattggtaaacagtccaaacgcagccacataggcaaatgtctggttattaaatttaccgatgtcacagtgatagatctgctcctccatgatcatggaggcagctgcagtcatactcttcggcataaacagactgttggcaaaatcattggtgcttcctgcagggatatacccgatcggtgtctggctgcccatttccacgattccggtaaccacctcatccagtgtaccgtcacctccactgcaggcaatcagatctacctgatctgcatattccttcacctgttcataagcatccttcggtccctgcgtggcacggatgatcacttcgtacccacctttattaaagatatccacaatgtccagcagatgcatcttgattcttccttttcctgctttggggttgaaaacaaaaagcattctttttttcattatacaatcctcatttcccgaaatgattcgttatgtctattcttttactatgataaaaaaaacgatgtaaaatgtcaatcttaacttttcacatctggtcttaccacaggcagccggaattttataacaaaaaaagtccgaaaacccaataaaattgaatcttcagaccttttgttaaatagcgagagggggattcgaaccctcgacaccacgggtatgaaccgtgtgctctagccaactgagctatctcgccatatctttttgtaacatgggacctatagggctcgaacctatgaccctctgcttgtaaggcagatgctctcccagctgagctaagatcccataacagttgttcgtcttaggaactcttccgttccgcaactcgctttgctattatataatggtttgtgacttgtgtcaacagtttttttcactttttttaattttttaaaaaatatatgcttttttgtatttttacagtggcagggaggtctgaaatcccctgccactgcatgcagctcacgtaaccctggtattatctaaagtactcaacaccagattcgaaaatcttgatatcctgctctccgtagatattgacagccacgcctgcgtcacgacgctcactgtgtgccatctttccgagaacacgtccatccgggcttgtgataccctcgatgttcatataagagccgtttacgttaaactcaccctcatatccggtctcatctaccggtacatactctgttgcgatctgtccattttccttgagtttcttcagccactcatcgtttgcgacaaaacgtccctcaccatgagaagccggattgcagtatacaccgccaagctgtgctttctgaagccatggagacttgttgctgacaaccttggtgtaaaccatcttggatacgtggcgtccgatggtgttgtaggtcagtgtcggagaatcctctttctgtccgcagatctcaccgtacggtaccagtcccagtttgatcagtgcctggaatccgttgcagataccaagagcaagaccgtcacgctcattgaggagcttcataactgcctccttgatcttctcgttctggaacgcggtagcaaagaatttcgcggatccgtccggctcatctccggctgagaagccgcccgggaacatgatcatctgtgcctgatcgatggctttctcaaagagctctacagaatcatggatatcttctgctgtaaggttcttgaatacctttacgtctacctcggcgcctgctctctcaaatgcacgggtactgtcatactcgcagtttgttccagggaataccggaataaatacacgcggttttgcaaccttatgtttgcatacatagatgctgtctgctttgtaaagggaaccgtcatctgccttgacgtcctcggttcctgctgctgttttaaatacattctccagagttccttcccatgtggaaagcgcctctttcagagtgatctctgtatcaccgtaggtgaacttcgcattatccgtaacctcaccgatcacagtataggtaatggcaagctcaccgacttttccatccggaacctcacagatgatatcgccgaatgccggagcaaagaaatctcttggatcaaggttatgctcgatctttacacccatgccgttaccaaaggccatcttgctgactgcggcagcgattccatgacggtcaagtgcatatgcggagatcacacggcctgcctggatatcctgatgtaatttatcatactgctccataagagcctgataatccggaagatcataggaatccttcggtgcacggagccataccagcttgcttcctgcttttttgagctccggtgtgatcacatcttttacctttgcaacatccactgcgaaggacaccagcgtcggaggaacatcaatatcattgaaggttccggacatactgtccttaccgccgatggaaggaaggccgaatccgatctgtgccgcataagcgccaagcagtgcggagaacggctggctccatctcttaggatcttctgtcatacgacggaagtattcctggaaggtgaaacggatcttcttatagtcaccaccggttgcaacgatcttggcaacagactcggttactgcgtaggcagctccatgatacggactccatgaggaaaggtatggatcaaagccgtagctcatcatggtaacagtctctgtttttccgttctgtaccggaacctttgcaaccatggactgtgtctctgtcagctgatatttgccaccgtgaggcataaatacactgcctgcgccgatggagccgtcaaacatctccacaagacccttctgtgagcatacattcaggtcagcaagagtatccatccattttttctttacatctgttacatccggacgttcctcgaaaagatttccgtcctttgacgggatctcaacctcaacggaggtctcctgatgtgcaccgttggtatccaggaatgcacgggagatatttacgatctcttttcctctccagttaaggacaaggcgtggctcctccgttacaactgcaactggaattgcctcgagattctcttcatttgcaaatttcaggaaagtatccacatctttcgggtcaactacaacagccatacgctcctgagactcagagatggcgatctcagtgccgtcaagacctgcgtattttttcggaaccttgtcgagatcgatctgaagtcccggtgccagctcgccgatggcaacggaaacaccgcctgcgccaaagtcgttacatttcttgatgatatggctgacttcctctctgcggaacatcctctggatcttacgctcggtaggcgcgttacctttctgcacttcagcaccgcagacctcaatggaagcctctgtgtggaccttggaggaaccggttgcaccgccgataccatcacgaccggtacgtccgccaagaaggatgatgatatctccagggtcggaattttcacggatgaccgcacgtctcggagccgcacccataaccgcaccgatctccatacgttttgcaacgtagtccggatgatagatttcttttacagcaccggttgcaagaccgatctggtttccgtaggaactgtagccgtgggctgcgctgcggacaagcttcttctgcggaagtttacccttcagagtttcctttacggatacggtaggatctgctgcacctgtcacacgcattgcctgatatacataggtacgtccggaaagcggatcacggatggctccaccaaggcaggttgccgcaccaccaaaaggctcgatctccgtcggatggttgtgtgtctcgttcttgaagttgatcagccactcttcttctttcccgtccacgtccaccggtaccacgatactgcaggcattgatctcatcagactcttcctggtctgcaagcttgccttctgctttcagtttcttcattgccataagtgcaagatccatcaggcagacaaacttatcatcacgacccttgtacatatccttatgggcatccagatattctttgtatgttttttcaataggagtcttataatcaccttcgtcaaacttcacgctggtaagctctgtggagaaagtagtatgacggcaatgatcagaccaataagtatccagaacacggatctctgtcatggaaggatcgcgtttctcttcatttctgaaataattctggatatgctggaagtccttaaatgtcatggcgaggttcagagaagagtacagctccttcagatcagcctcagccatatccttgaatccgtcaaaaatcttcacatcctcaggatccgggaatactgttaccagtgtttccggcttctcaagacctgtctcacgggaatccacagggttgatgcagtgatgtttgatcgcctcaaactctgcatctgtaacgtttccttcgattacataagtagttgctgaacggatgatcggtgctgcattctcatccaggaactgtacacactgcactgcagaatcggctctctggtcaaactgtccgggaaggaattctacggaaaatacacgtgcgccctctgccacgtcaaatttttcaagatacagatcatctaccggcggctctgcaaatacggtcttgcaggctttctcaaatacttcatcggagatattctccacgtcataacggatcagctcacggactgctgtcacagtgctgataccaagataatgtttgatctcatgtttcagttcctttgcttttactgcaaaggcaggtttcttttctacatacacacgtcttacgttgctcatagaaggctcctttctctatatccgataataaggatggtaaacgtgcagaaagcatttcagtctttcttttctgctgaaaatatagtatcataggaaatatcattagtaaaattaatatatcttatatcatttataagcggaggatttttcacatatggatatcaatcttgaactttacaaagtgttttattacgtggccacgacgctgagcttttcggaggcttccagacagctttttatctcacagtctgcagtaagccaggccgtcaaaaaccttgaaaaaaagctgggccatactctgtttgtgcgcagcaccaaacgggtcatcctgactccggagggagagcttctcctccagcatgtaaagccggccctttccatgctcaacgagggagaagctgtcctttccggagaaggaaatcttaccggtcagctgcggatcggtgccagcgatactctgtgccgctattttctcatcccctatctccgccgtttccacaaggatcatccggaggtacggatcaagatcatcaacagtacctccatcggatgtgcggagcttctggaaaacggccaggctgagctgatcgtcaccaactacccgaattcccggctttcagcccacaccaagcttcagactgtgctggaattccgggatatcttcgtggcaaatccggactatttcaccatgggcaaatcgcctctttccatggaaaatcttctggattatcccatcctgatgctcgctccaaagagtaccaccagcgaatatcttcatcaggtgtttgcagcccagggactgaagctgctgcctgaggttgaactgaacagcaacgatctgctgatcgatcttgcagagatcggacttggtattgcctgtatcccggattatatgctccgcaaccgtccgggtctggaacctgtccatctgaaaacacctctgcccgcaagaagtgccgtgatcgctcatcatgaagcactgcagctttcccaggctgcccagtgctttcttaaatatttttcccagatctgatacgatcaagttcctgccgcttattgcttttcgcgattgaagcaggatacttccctgattcagtaaaaaagccaccggaatctgccataaggttattacgatccttgtgtactcaattccggtggtcttttctgttattgatatcggtcagatattattcttattacttacgcttcagccttcggcatcacgtctgctgccgcagtgatatactcattctcgatcttactgaacagaccgctgtctgcaagctctgcaagcttcacgtcaatcggcatcttgcccaggaccggaactttcagttctgcagcgatctcatcgatatggctctcgccaaagaccttgatctcttttccgcagtccggacatttcacatagctatagttctccacgattccaaggaccggaaccttcatcatatcagccatgttataggccttcttgacgatcatgcggaccagatcctgcggagaagtaacgatcacgacaccttcgatcggcagggactggaatactgtcagcggaacatctccggttcctggcggcatatctacaaagagataatccaattcaccccagatcacatcactccagaactgttttaccatatttgcaaggaccggacctctccagatcaccggtgtctcctcatccgggagaagaaggtttacagacataacctcgattccgtttgcagttggcatcggatagatcccattgtcactgccctgtgcattgcccttgatgccatacatcttcgggatggacggaccggtgatatcagcatccataatgcccactttatatcccttggaagccatcaggtttgccagggagcctgttacgaaggatttacccacgcctccctttccgctgacaactccgatcacatgttttacgtcagaaaaaacgtttggttctgccatgaggctctggggctgtttctgtccgcagccttcacagcttgatttgttgcaggatgtattgctacactcttttgccataatagattcctctcattctttgtatttacacagacagaactggctctctgtccgtgtatttttctcattcacgatctctcatgaactccttaccttacttcataaatctgtcgatcgctttttccagttccttgatagcatccctgtctccatgctccactgcatccacgatgcagtgttctatatgatcctgcaggatgatcttacctgtattattgatcgcagattttacggctgacagctggatcagcacttcgctgcagtcacgtccttcctccaccatacgcttaatggattccatatgcccgatggccctggaaagtctgttgagtacggccttggtctgtgcgtggctgtgatgatgaggatgtgtgccatcgtgagtatgcacatgttcctgttccccatgggtatgttcaagaacggttccatcctcgagaacgtgcacatgtgtttctttcatgtgtatttcctccttcagatctccgtgaaagaacagcgctgccggatcatagatgtctgaatgtcaaaaatgatggttccgtcttccagtactgtcttctcgtaggagacatccttcccctgaaatttctgtttcacatacgcttccggatctgcaatctccacttcttccacaaatacatcacgcatctgatttctcggacatttgttaaaaatttcccagattacttcgtactctttcatctgtgcctgttcctttcttagtcatcctatccattataataattttatgtttttttgtcaaaaataattgcactcacgcaaatattgtcgtatgatacatattaaaaatattactgctctgtccgtgggcagtaaacatatattaatgtgataaatcaaaggagataaatttcatgcagcttttaaaagacagaattctgacagacggcgtagtaaaagaaggaaatattttaaaagtggacagcttcctgaatcatcagatggatattgacctgatcaacgaggtcggcaaagaattcaagaaacgttttgaccactgtccaatcaccaagatccttaccatcgaggcttccggtatcggtattgcctgtattgcggcacagtatttccatgtaccggttgtatttgccaagaaagcacagagtgtgaaccttgacggcgagatgtacaccaccaaggtagagtctttcacccacaagaaagtttacgatgtgatcctttccaagaaatttctcggaccggaagatcacgtactcctgatcgatgattttcttgccaatggctgtgcacttctcggtctgatcgacatcgttaagaaatccggcgcaactcttgaaggagccggaatcgttatcgaaaaaggcttccagtccggcggacagaccatccgtgacatgggtatccatctggaatcccttgctatcattgattccattgctgatggcaaacttactttccgtgaataagatttatcataaaaaatactcctggaaacttatatacattgtttccgggagtatttttatttttatcacagccagatcatgatgtcatttctgatctatgcatctgcacccttttccgacttttctgaaggtgtcggagttactgtttcctccggtgtcggtgttccggaaatttccgtttcttccttttccgatgaagccgatgcagcttccggtgtattttcatctatatccggttcttccgtcaccgtagcttccgatgtcactgtcgacgttggtgtggcagttgcctccggcatgatctcttcctcttcataatatccgtcatccacaagcatctgataattatctgcatcgatcagctggatatcactggtcacagttcccacgatcttggtcccgttgtcatactgctcataatcggagatctccggcttctcccctttcagaagagcatccaccatcgtcacacagtcatttgccagtacacggttatcaaacagcagatcatcctcaatctttccctggatcacagcggtcactgcttctgcctcacagccacctcctgtgatcataggccagccatcctctccagacacatgtcctgcatcctccagggcatccacagccccaagtgcaaggtcgtcagcacctgtgcagataatatccggcgcaccctctgtataattctgagaaaggatctccgccatatcattctttgcggtatttcttccggaacgcatcactgcagtatcatcaaaggtcagctttcctgaagtacataccagtgttccgtcgtcgaaatattcctgaagcttctccatcacgccattataaaagaacagtgcgtcacgatcatccggagagcccataaggaactcaatggtcagagttttcttttcttcccgggctttctctagatccattttttttatgatggaatctcccaccatttttccggcttttcttgtattaaatgtaacataatagttgaccttatctgtatccatgatcagctgatcgtaagaaatcacagggatagatttctcatacacctgctccagcacatcgttcaggctgtaagcatctgaaggtgcgatgacaagtgcagaaagctcttcatcgtccagaatggactggatctgtgatacctgcgtatcactgtcttcatctgcccaaaatatctctgcatcatatccatcatcttccagtgtattctgaagagtttctccatcagcagaccaacggggatcatctgctgatgaaggcagaaacacacctactttcttatctgctgccgcagtttcttttgcttcttctttttcttcctcctctgcatcattgctgtttttggcttttccttccgggtcttcagactccacactttcattggctgcctctgtcgcctctttgttttttccacagccggaaaaggctgccgtaaagacaaaagctcccacaagcaggattgctgtttttttcttcatgatcaaatctctcctataagcctttatagtcctttgccagtgatttcagatagtctctgtaggcggctgcagatttcttgggtttcaggatacgtacactgccgcccatcccggtcagccagccgtagaattttccattttccggaagctctgcagttaccgtcagatctccgctatctttcatcttatattctgcatctgtgccgaaaaagtcacgcacctccgcctgtacagctccggtacagagaagttttatttctttttttatggttccggctgaagcctcaagaagcttccggtaccctgtcacagaggtctcatgaatatctttagtttcatgaatctccttagcttccgcagtcagcccaggttcttcagacggctgttcctctccggcactctcaccggcaagataatacccacccggccgttctcttgtataacggatatccattccaaaagaacgtaatacctccacatcatcataaatgctctttcgctctgcacggattccctgtttctcaagattctcaaggatcttctgcatagatattacccgatgctcccctgtttcccgcagcattttttcaaggtacaggatcttcgccttctgattgtttgattttgccatactgccctcttatccttcgttttttacaaagcgatggaaaatataggagtttgcctcctgttcctcgctgtcgtccagtttctcaagttcgatctttttaccgtatttcttttccagtgcacggctgatcagaagatctgcaagctgcgggttcttgggaagaagcggtccgtgaagatacgtaccgatcacatttttgtatacaaccccttcctcaccggattgtccgtcatttccgtatcctgacagaacctttcccagggatctgttgtttccgatggtggtacgccctccatgattttcaaaacctacgatgggcatatcaaaaagatcgctctgcatcacaatgtttccaataaggcggccttttccctgctcagtgctcatatctacaagcttcagaccctcgatcattccctgatccgtcttataataatttccaaggagctgataccctccacagattgcgatcacaactccattgtcttccacatacgccttgaaatccttctggatttccttcagcttttcacataccagcatctgttctctgtcggagccaccgccaagaagtacgatatccagtttggaaaaatcgattctgtcatccagttcataagctatggtttctgcctcgattcctctccagagacagcgcttcatcagacactggatatttcctctgtcaccgtaaaggttcagaagatccggatataaatgccctatcgttatcttcatttctcaccctccagtttcttcaggatatttctggtgccaaacagcgccgtataatttacaagtacataaagattgccgcatccatccccgattcgtttgcggatggctgtctccacatcattttccagcatggacgggatatccacatatttcagacggaggcgcatatcctgacaccggataccactgactgtgatggaattgatattgtcccctccgaaaagatcaaaatccacatcccagagccaggagatatcttttccatcctgtgcattatcattgatcacaatgatgatatcctttggtgatccgtcctgcatcacagctgaaatgttctggttaaaaccagccggattcttggcaagattcagaacaacactggtgcccttgatccgaaactgttcattgcgtccgttctccggattaaacttccggagcatctcattaaaatgctccgccttaaagcctgcggtacgaattcccgcataggcagccagaatattatacacattatagaatcccttataattggccacgatccgtttatcctccactgtaaaggcaatctgatcatccaccttcacatctgtggcatcaaagtcgatctccggacgtttaaagccgcatttcggacatctgtagtctcccagctgactgtaatgatagaagctgtagatcagcctttctccacagcacttacagaaccggccctcacggatctcgtttgttttgttctcgatcaccggtttgctgatcccgtaggttacaaaaggatttccgcagtccatggcaagatatgcagacaatgcatcatcaccattgacaatgaccttcatatccggaacctttttcatcatttcttccaggatgttcatagtgatatcgatctcgccataccggtccagctgatcacggaacagattggtcataaccatataatccggtctgatccttgtgaacacatgtcttgtggatgcctcatccacctcgatacaggcataatccgcatccagttttccgctgaattttgcccccaatacaaaggctgccacaactccgttgagcatgttggaaccggtatgattgcagatgaccttttttccctctgcctcaaggcctgcgcacagcatgttattggttgtggtctttccgttggttccgcatactacaaatattttttctcttacctgagaagaaagctcttccaggatatccggacagatcttcatcgcgaccttaccggcccaggtcacaccctgccggcccataagcttacagacatgtcctgtgatctttgctgccatcacagcaatggttgttcttattttcataatcttctgattcctttgtttttatttctcttaccacagatcttccgctgtcaggaaatcggtacagattccttctgctccctgcgaaatgtatcttctggcctggtcacggtcattaaccgtataaacatacagactgatcccgtttttttcaaagatcttctccgtttcttctgaccaatactcccagtatactgttgctgccggaattcccttttctttacagaaggatgcaatatactccagctcttccacagaatactcctgccacagtgaatatacataggaaggaaaagaatagagcatggccgttccgggaaacattgcttcattgtagatttccgggatgatccgatccaacgtctcaccggcacctgcattcctggcgatttccacataatcactgtaatcctccagtgttctctgataattgcgaagagaatactgtttggaatcgatcagcacatatgcatccggataatctttcagaagaaggaaaaaatcctccagtgtcatgggggtgtatttcccatatattttactttgtctgaattccttttctgtaaggactttttttccgttgccatcccactgtcccatggaatcgttccagttatgcctgcagacccatactccatcggatgtcctggaaagatccaattcaaaaagacgaactccctgttcatacatgaacagaaatccctctctggaattcaggtaatcctttccgtccatacctcccagagcatgtgcaatggtcctgtagtccttccagctaaatcctcctgatgtattccgggcagtttctgtttccgggaaactacctcccagaaaaaaaagcgatacaaacagtatttccaatgtcagtataaaacgtcgcatcatctcaggcaaccaaaaaatgcacaagacgtaaaggaaaacatttcctcgctgctttcctttttatcttctgcaaatttatcatatccgggaacctgtcccaaaccattcctatattgtttctgtccggtaataccaaaagtcccaccgaccatgtttatcatcctttcgcatacatgtagtcgtatttcatacattaccgattgtacgctaaaaaaggataataatcaagttaatcctcttcttcctcgtcatattcctgctgaagcctcagatattcatcatatttctcgtgtgcattccgattataggatcgggagatcggtattacatgctctccgatatggaagctgttattttcagctcctgtgacccgttccatatttactataaagctctgatgacaccgcaaaaatgtaccgtcgtcaagctgtttgtgaagtcttctcgcatccgcctgcatatcatcacaaatggcaatggtcatcatcgtcatatttatgtatccccttttactccatcattgttactttttgttctatatattataccatgatttgttattcaaattatgatatcttaatgtaatttatggtcgaaaacccaccatttatgcattttttcgagttttttggaatattaaaaaaggacatctgcatttctgcaaatgtcctttaaatcggtcagaagtaaattatacaagctcgataagaacttccattgctgcatcgcctttacgctgtccgatcttaacgattcttgtgtaaccaccgttacgatctgcgtatttcggagcgatctcgctgaacatcttgtcaaccatgtcaacttcttttgtatttttctttctgccagcgcccttagcaggaacctctgttacaggatagaaaactttcatcatctcacgacgtgcatgaagtctggaaggagcatctttcttgatctctttctgaacttcatcgtaaactgttttctttttgccgtctacgacttcttttacacgttttccgtcagcatctttacgagcaaccttagctgttactgtaactgtctcgaaattgtctttctcacgtacagccatagcgataagtccctcagcgatcttacggatctctttagccttagcttctgttgtcacgatctttccgtgatgaagaaggtttgtaacctgatttctgagaagtgcttttctctggttagatgttctgcttaattttctatattttgccattttattatcctccatctgtgggacaccaggacatgcttgttcggtcttactgtcctgctgctgacaccccactcattactctgtttccggattattcctctgtaggctggagctgaagtcccagctctttgagttttgcaagtacttcctctaaggatttgcggcccagattacgaaccttcatcatatcgtcagaagtcttgttgcataattcttcaaccgtattgataccggctctcttaagacagttgtaagaacgaacagagagctcaagctcatcaatgctcatttccagaaccttttccttctcattgtcttctttctcgatcataacctctgcggtcttagcattctcggaaagatcaatgaacaggtttaaatgctcgctgagaaccttcgctgcaaggctgactgcctcatccggatcaagtgttccattggtatatacatccagtgtaagcttgtcgaagtcagttacctgaccaactcgtgtattctctacgatcatgttgactctgtctaccggtgtgtagatcgcatccactgcgatcataccgatcggcatgtcatcggttttgcctttgtctgcactgatatagccacgtcccttggtaatggtaagctccatggccagtctgcagtcttttccaccgttcagggttgcgatcacctgatccgggttcatgatctcaatatcctgatctgcctggatatcagctgctgtaacaacacctttgccctcacactcaatgtatgcggtcttcggctcattgtcactgctgtgattcttaatggcaagagatttcagattcatgatgatttcggtcacatcttccttcacgcccggaatggagctgaattcatgaagtacaccatcgatcttcacctggcttactgcagctcccggaagggaggacagcataattcttcttaaagaattgccaagggtagtaccataacctctttccagaggctctacaacgaatcttccaaacttcttatcttcggatatttcggtaatttcgatttttggtttattgaaatcaaacactataaggttccctccttctgggttaatcaacattcgagggtattaccaatttttataactgtagacacagtaaacagttactaattatttagaatacagctcgacgataagcatctcgtttacaggaacatcgatctgctctcttgtaggaagctctttaactacacccttcaggttctcctgatcaacgtcgatccactccggaacaagtctgccgccagtgatctcaaggattcctttatatctctcagagcctttgctcttctctctgatctcaattgtgtctcctgctttacacaggtaggacggaatgtttacacattttccgttaacaagtacgtgcttgtgatctacgatctgacgagcctctcttcttgttctggcaaatcccatacggaaaacgatgttgtcaagtctgctctcaagcataaccataaggttctcacctgtctggccctgcattctgtcggctttcttgtagtagttacggaaaggtttctcaagaactccgtagataaattttgctttctgtttctcttttaactgaagaccatactcagacaccttgcggtttgcacgttttaactgtcttgtggacttcttatcaattcctaagtaaatcggatccaggccaagggatctgcatcttttcagaacaggtactctatttactgccatttcaactacctcctaattagactcttctgcgttttggtggacggcatccgttgtgaggaaccggagttacgtcacgaatgctggttacttcaagtccgcatgcctgaagcgcacggattgcagcttcacggcctgagcccgggccttttaccataacgtctactgtttttaatccatgaattaaagcagcctttgttgcagtctctgctgccatctgtgctgcataaggggtagatttccttgaacctttaaatccaagaccaccggcacttgcccatgaaagagcgtttccttcgttatctgtcagtgtgacgattgtattgttgaaggaagactgaatgtgtgcctgtccgtgttcaacgtttttcttgacacgacgttttgtcgttttctttgtaacttttgccattttaaaactaacctacactttccttttattgaaattaattagttatatctataaattatttcttcttgtttgcaacagttctcttcggtcccttgcgagttctcgcatttgtcttagtcttctgaccacgaaccgggagtcctttacgatgacggatacctctgtagcatccaatctcctgcagtctcttgatgttaagggcgatttcccttctcagatcaccttctactgtcattgtctcatcaataacagcactcagtctcttaacctcgtcatcagtcagatctctgacacgtgtgtcaggattaacctctgctttagcaagaattttgtctgcgcttggtctaccaattccataaatgtaggtaagaccgatttcaatacgtttctctcttggtaagtctacaccagctatacgagccatgtactgtttcctccattttctgtttctgaaagtttcgcatatcgtatgtcacttgctctcgcaaggtgaaatgggacatatcgacctgcctctttcttttctagtttcctaattggggtgcctcggtaaaacacccagctgtaattggcgaatcacagcctttccgaaattgcggatcttaaccgctgttgcctctcggtattaggcaatacatgcttattatctgttcagtagaacaaccctgccgggtgtttcatactgcagccgcacgtttcacaaacattccaaagaagttccgatatggaaatcaaccctgacgctgtttgtgcttcgggttctcacagatgattctgatggatccctttctcttaatgaccttgcacttctcgcagatcggctttacagatgatcttactttcactggaaatcctccttccgtaaattagtctcatatctgcagtttcacaggcgcactcatacacagtatttgcgcgcttgaaatatatactaacacctgttttcctgaaatgcaagaaaaaatttaaaaaatttttgattttttttacaggctgtattataatgggtggcaaagtccggcagacatatggaatctgcctattttaatgaaaggaatctttacatatgcatacggaaatgaaatatcgttttctgatacattacaccttatcttttatcggtggatacctggggctttatgccattgtgtcaagagcagatcttttcggcaatgcccagacagccaatcttattggtgttgtgcgggatctcataggcaggaatttttcggatatgcttctgcgtgtgggtgcgcttctcatatatatggctgctgttatccttacggtctggatcccagagcatttttccgcagatcttcgttttatcagtatcgggatcgatatctttgcgattctgctcctgggattctttccttccggaatgtctccggttgtggctctttaccccgtgttctttgcaatgcctttccagtggtgtaccttcaaggctcccggcggatataacagctccacgatcttttccaccaacaaccttcgccagttcaccacagctgtcactcagttccttatgaaaaaggacagcgcacagtgcgataaagcaaaattctacggaatgacgctgctttcttttcatacaggtgcagctttgtctctgatcctgtatatgacttgcggtctctcaggcgtatggctctgtctggttcctgccttctatgctgtatggctgatcagtgcagaccggaataccgcagctgatacaccggcagttacccgaagcacagcttctgacggcagcagcttcaggaatctttcctataagaaaaaagaggcctgactttattttagctttgataaaataagaggaaatgtgatctgtttttacactgtcacatttccttttttgtttacgcgtaagcccctctggcgcttacagcttatatgcgttcgaaatccagtatcaggattttgaatagccgcaaattgatttcatctatatttctcatactatcctcataacatatcaatatgctctgtaacttgtttaaacatttcacggtgtttacattgcgcttaccgggaaaatcttttataattattccagaaatcataaatcctgctatatatttttgaccgaacatgaatggagaattgaaatgcccaaaagtatttacgaagatatctataaagatctgaaaatgaaaatagaggacaacacctttgcctatcaggagcttctgccttccgaaaacactctgatccagacttacggctgctcccgcaataccctgcgacgtgcggtcagtcttcttgtcagtgacggctatgtacagaccatacagggaaaaggtgtccgcaatatctaccgtccaaacgagaagactgctttcaccatcggagagatcgaaaccttcaaggaatctgctgcaaggaacggtcagaatgcccatacggaggtggctctttttacagagctttgtatcagcaaaaatcagtcagcttacacaggatttcccgctggtgcagaagtatattatattcagcgtatccattatcttgaagatatcccgctgatcatcaaccataattattttctgaaggaatccgttctcggccttactgccgagattgccagtcattctatctatgaatatctggaacaggtgcttcatatgaccattgtcaacagcaaacgtatcatgactgtggaaaaggttacagaaattgatgaaaaatatcttcatctgaatgtaaaggattataactgcgtggctgtggtgtccagccagacttataacagtgacggtgtgatgtttgagtatacccagtcacggcacagaccggatcattttcgattttatgataatgccctgcgtcgatgagcccagctcataactgcttcgcagctatacggttatgagcaggtgacaaatgtggctcacaaatatccgcctagatctgtatagatacctggatctgtatagatgctgcagtttcctattttccaaaattatgttatactgaaacgatcaacggagagaggaaattttatttttatgaaaaaacgagaatcttttaacagccgctgggggttcattctggcctgcatcgggtctgcggttggaatgggaaatatctggatgtttcccaccagagtttccctgtatggcgggggatcgttcctgatcccgtattttatttttgtggcactgatcggctttaccggggtgatcggtgagatgagctttggccgcgggacacgttccgggcccattgacgccttcggcatggcctgcgaaaccagaggcaaacgaaggctgggcgaaacactgggctggataccggtgatcggtgcactggccatggctatcggttataccgttgttatgggatggatcttccgatatatgctcggagcctttacaggctccaccctggcaccggcagatattgaatcctttggcgccaaattcggaggcatggcctctgcctggggaaataatctctggcagctggctgctcttgtgatctgcatgtttatcctgatgtacggcgttggaagcggcatcgaaaaggccaataaagtgatgatgcctatcttctttatactgtttgtgatccttggcatctatgttgcctttcagccgggagctgctgccggataccgctatatcttccgcgtggagccggaagttctggcaaagccttccacctggatcttcgcacttggacaggcatttttctccctgtctgttgcaggcaacggtacactgatctacggatcttatcttccggacagcgaagatatccctgcatctgctgcaagggtagcactttttgatactctggctgctatgctggcagcacttgttatcattccggccatggctaccacaggtgccaagcttgaccagggcggtcccggacttctgttcatctacctgccgcacctgatcaaaaccatgcctggcggacggattattgccatcatctttttcgtagctgtgttccttgcaggcatgacctcgcttatgaacctttatgaagctcctattgccacagttcaggaaaaaacaggtcttggcaggattccttcctgcatggtgatcgccgtgatcggcgttgtggtttcgcttcttatccagggcattgtttctgactggatggatgtgctttccatctatatctgtcctctcggcgcaggacttgcaggaatcatgttcttctggatcttcggccggagctatgtggaaagccaggtcaacaaaggccgcgagaaaccattcacgaaatatttttatccggtgtgtaaatatctttatattccggtgtgctttctggtgctgatccttggtgttgtgctgggcgggatcggatgataaggtgagaacataagtaaaataaaaattatctgcataaacaaatcccccgaaaaatgattttttaatcatttccgagggatttttatgttttatcttataatattcgtaaagccaggattttcgacttgctgcatatcctgaatacactcacttcacagtttgtcaacaagtttaagttttacactgattttcaattattctgcattcttagagtgtatccggtttctccacttcgtaatcagaccaggaagcaattgtattgctgcctgagaaacgtaaaaaaatgtgagtgataaactccacttcaaattctttttctgcagaaaaggcaaaaaaagacccggcagcttaacgccaccaggtcgtcttttacaatatttcttatttatctctccagatgattcttcctttggaaagatcatacggagaaagttcgatcgttactttatctcccgggagaatacggataaaattcatacggagcttgccactgatatgtgcaagtaccacatgtttgttttccagttccactttaaacatcgcattaggcagtttctccagaacagtgccttctacttcgatcacatctgcttttgacattttttacctcctatgtcatgacaacaattgctgcttacagattcgtaagcgtcagaatctctggttccccatcggtgatgaggatcgtgttttcataatgggcggaaagtgaaccatccatggttaccactgtccactcatcgtccagccatgccacgtccgcacgaccaaggttgatcatgggctcgacggccagggtcattcccggaaggagcttgatgcccctgcgcttctgcgggaagtttggaatctgcggatcctcatgaagatgagttccgattccatgtcctacaaggtcacgtacaataccataacggtatttcgctgcgtgggctccgatggctttggaaatatcatttaaatgatttccggcttttgccattttcagtccttcaaaaaagcactctcttgtaaccttaatgagctgctgtgcttctttggatacttcacctaccgcataggtacgtgctgcgtcagaatggtagcccttataaatcaggccggcgtcgatcttaaccagatccccgtcctggatgatcttctcctcggatggaattccatgcacaacctcatcattcaggctgatgcagaaagaagccggaaaacctccgtagttcagaaagttcggaatacagcccatagaccggatcatttcttctccgatcttatcaatctctttggtgctgacacccggtttgatgtaagggatcaaaccgtcatgcaccttctcaagaagatggcctgcttctctcataagttcgatttcatgctgtgtcttaattgttacggacattcttattctcctaagatgtcaacgatctcctggaatacctcattcagatccctggttccgtctaccgtcttcaaaacaccctgtgtggtgtaatagtcaatcaatggctgtgtctgctcatgataaacattcagacgcttctgaactgtttccggcttgtcatcatcacggagtacaagcttgtcaccacaggtatcgcagaccccctctgtcttcggtgctgcaaatacaacgtgataagttgcaccacatttcacacatgcacggcgtccgcccatacgtttcacgatgttatcatccggcacatccacatcgatcgcatagtcaattttgcttccaagtttgttcagagcctctgtcagacattctgcctgcggaattgttctcgggaaaccatccagaacatacccttcccttgcgtcatcctgctggattctgtcaacaacaaggtcgcaggtcagttcatccggaacaagaagtccctgatccatgtaagtttttgctttgtttccaagctcggtaccgtttttgatgttagcacggaaaatatctcctgtggagatgtgcggaatcccatatttcgccgcaattttcttagcctgagtacctttacctgcccccggtgcacccaacataataattctcataacataccctccattttcctgttttctgcctgatcttcagacagtcctgtttacaaatcaaggctgcgacactttcgcaccgcaaccttcattttcaattagttcaggaagcctttgtaattacgtacaagcagctgagattccacctgcttaacggtctccaggataacacctacgatgatgatgatagatgtaccgccgaaggaaacatccgcaccgaacacaccgttgaagaagaacggtataacggccacgataacaagacctactgcacctataaatataatataattcaggattttagtcaaataatctgaagtcggttttcccggacggatgcctgggataaaaccgccctgctttttgatattatcggctacttccaacggattaaaggtaattgatgtatagaagtatgcgaagaatacgcaaagtaccacatacacgatcagaccccagctgtactggatctgacttggattacaccagttattggaggaaagtcctcttaagatctcacttccgatgcccgttccgtttcctttgccagcgaactgagcaatgatcgacgggaaagacatgatagaggaagcaaaaataaccgggataacgccggcagtatttaccttgagcgggatgtttgtggactgaccgcccatcattttacgtccaaccatctttctggaatactgaaccggaattcttctctctgctccgttgaggataagtacgagcactacaacaaacagaataatcacagcaatgatgcaggctgcaagcattccttttgcaattgttttgcccttgacgaagttctcataaagaagggacatatcactcgggatcctggacacgatattgatagtcaggacgatggaaataccatttccaatgctcttctctgtaatacgctcgcccagccacataagcattgcggaacccgctgttaaacttgcaacaactacgattcctttaaggaagctcatgttcgggatcataccctgacgtccaaatccgattgccatggcaacagactcaaacagagcaagaccaaccgttacataacgtgtgattgctgtaagcttttttcttccttcttctccgtcacgctgcatctcttccagtgccggaatggcaatggtaagaagctgaatgataatggaagaagtaatgtaaggtgtgatgttcaatgcgaaaattgacatctgagtaaaggaaccgccggtgaacgcatcaaagaaattgaatgcgtcaccggtattagattcaaaccactgcttaaagaagtcactgtcgactcccggtacaggaagctgggatccgattctgatcacgaatatcatccagatcagatagagaagctttcttctcatttcctttactttgaaaacactcttaagagtctcaaacattagatcacctctactgtaccaccagcagcttcaatttttgtttttgcagtctcgctgacagcgtttactttaacattaagtttttttgtaagctcgccgtttccaaggatcttaacaccatcaccgatcttggagattgcaccgcttgcaagtaagctgtcaactgtaacctctgcgccatcctcaaaacgattgagaacgtctacattgattgcgataatttctttagagtttctgttagtgaaacctctcttaggaagacgtctgtataaaggcatctgacctccctcgaatcccggtttcttatgtccggaacgagcaagctgtcctttatgtcctttaccagcagttttgccgtttcctgaaccatgtccacggcctcttctgaagttatcgctatgcttggaaccctctgcgggtcttaagtttgataattccattctggcacctccttaatcttctacttttaccaggtgctgcacctgctgaatcattcctctggttgcagcgttgtctggcatctcaactgttttatgcatctttgtaagacccatagcttttacagtttttttgtgtttcggtactgcaccgattggagattttaccagtgtaaccttgattgtatctgccatttccatatcctccttaacccagaatctcatctacagattttccgcggagctttgcaacctcttccggagtctttaactggctcaggcctgcgattgttgccagaactacgttctgtttatttctggaacccatacattttgtacggatgtttttgatacctgcaagctcgattacggcacgtgccgggccaccggcgataactccagtaccttccggagctctcttcagaagcatctcagcgcttccgaattttccgatgaagtcatgtgtaatggaattgttctcgtctcttgcaacagtaacaagcttcttcatagcgtcctctttacctttgcggatcgcctccggaatttctgctgcttttcctaaacctgcaccaacgtgtccattgccgtcacctacaacaactaaagctgtgaaacggaagttacgaccacctttaacaaccttggtaacacgcttgattgatactactttatcttctaactctaactgactagcatcaataagattacgtttcatgtgttcttttcctcctcttagaatttcagtccagcttctcttgctgcatctgccagtgctttaacttttccgtggtagatatatccacctctgtcgaaaacaacgctctcgataccagcctcaacagcttttttaccgatcactgttccaacttttgctgcagcctgtacatcatcagtgttctcaagctctgcttttacgtccttctggagagtagaagcggatactaaagttttaccaactgtgtcatcaataatctgtgcatagatgtgcttgttggaacgaaatactgccagacgaggagtagttgcagttccgtttaaatgatgacgtaatcttctatgcttcttttcgcgaatttcgcttctggatgctttgttaatcatattctcactctccttaattatttcttaccggtcttaccgactttacgtctgataacttcgtcaacgtacttgattcccttgcccttgtatggctcaggtcttctcttgtctctgatctcagctgcgtactggccaactttttctttgctgataccagatacgatgatcttgtttccgtcaactgtggactcaagaccttctggatcttccatctctaccgggtgagaatatccgaggttaagtacaagtttcttgccctgcttagcagctctgtaaccaacaccgttaacctcaagctcttttttgtatccttcgcttacaccaacaaccatgttgtggataaggcttcttgttaagccgtgaagggctttgattctctttaagtcgttcggtcttgttacaactacatgaccgtcttcaactttgatctctaactctgtcgggagtgctctctcaagtgttcccttaggtccttttactgttacaacgtttccatctgcgactgtaacctcaacgccagctggaattgcaaccggaagtcttccgattcgtgacataaatttgtcctccttacttagattgtcggagagggcccatgccctctctgttttcagtttaaaagctatatgactgcttcgttaagcggctttggcctaccaaacgaatgcaagtacctcgccaccaacctgaagcttacgagcctctttgtcagtgataacgcctttgtttgtggaaaggattgcgataccaagtccaccaagaaccttcggaagctcatccttgcctgcgtatacacgaagacctggtttggagattctcttaagtcctgtgatgatcttctggtttttgtcctcaccatatttcagtgtgatgtgaagagttttaacaactccatcctcaaccagatcatattttgcgatgtatccctcatctacaaggatgtttgcgatagcaattttcatcttggatgccggtacgtctacagtgtcatgttttgcagtatttgcgttacggattcttgtaagcatatctgcgatcggatcgctcattgtcatgtaagtttcctcctctttcttcagactttacatgtcgtgtgaatattatttaaatgattaaaaagttgctttcgcctcgacctaccaggaagctttcttaacacccgggatctgacctttgtatgccagctcacggaagcagattctgcaaattccgtattttctcaggtatgcatgtggacggccacagattctgcagcgagtatactctcttgtggagaatttagctttacgctgctgtttaattttcattgctgtcttagccatgaatcttttcctcctatttagcaaatggcatgttgaataatgtcagtaattcgcgtgcctcttcatctgttttagcagttgtaacgaagataacgtccattcctcttactttatcaaccttatcgtactcaacctctgggaagatcagctgctctttgataccaagagcatagtttcctctgccgtcgaatgcgttcgggttaacaccacggaagtcacgtacacgtggaagagcaaggttgataagacgatcagcgaactcatacatcttctcgcctctcagagtaactttacatccgatcggcataccctctctgattttgaagttagcgacagattttttagcttttgtagcgattgctttctgtcctgtaacaagttccatatctgcaattgcagcgtcaagaagtttagcgttctcttttgcctcgccaacacccatgttaacaacgattttctcgagttttggcacttccattacgtttttgtatccgaatttcttggtcatggcatccatgatctcgttcttgtaaagatcttttaatctactcacctttatatgcctcctctcttaattaatcgattgtctttcctgttgctttggcaacacgaacttttttgtctccatccatcttgaatccaactcttgtagcttttccgtctacaacgagcattacgttggagatatgaagcggagcttcttttgtcacgattccaccgttctgattagctgcggacggtttagcgtgctttgtaaccatgtttacgttctcaacaactactgtgttgtcttttacgttaactgcaaggacctttccgtccttacctttatcttttccagcgattacctttacagtatcaccttttttaattttcatagctgacattcggcaccctcctataatacttccggagctaaggaaacgatcttcatgaatttcttctcacgaagctctctggcaactggtccaaagatacgtgttcctctcggagttaagtcatccttgataattacggcagcattttcatcgaaacggatgtaagatccgtctttacgacgagcgccttttttagttctaacaactacagctttaacaacgtcaccttttttaacaacgccgcctggtgttgcatctttaaccgtagcaacgattgtgtcaccgatgtttgcatatcttcttgtagagccgcccataacacgaatacaaaggatttcttttgcaccagtgttgtcggcaactttcagtctagtttcctgctgaatcatactggtttcctccttatttagctttctctacgatctcaaccagtctccatctcttgtccttggacagcggtctggtctccattaccttaacggtatctccgatgttgcactcattgttctcgtcatgagcttttaatttatatgttctcttcacgatttttttgtaaagaggatgttttacatggtcttcaattgcaactacgatggtcttatccattttgtcgctgataaccttacccacgcgggtttttctcagatttctttccacgattatgtcctcctgtcctatttggaagcgtttgcctgctcagtgattactgtctggattctggcaatatttttacgaacctctttgattcgtcctgtattgtctaactggtttgttgcattctgaaatctcagattgaaaagctcttttttagcagctactaattcttcattcagttctgcaactgactttgcttttaaatcttccacgaacttattaattttcactgttatcaccgccttctaagtctgcacgagaaacgattttacatttacatggtaacttgtgcattgcaagacgtaatgcttcacgggcaacctcttcggacacgcctgcaatctcaaacataacacgacctggttttactactgctacccagtactccagagcgccttttccggaacccattcgagtctcagctggtttagctgttaccggtttatccgggaaaatcttaatccaaactttaccgccacgtttgatgtaacgggtcatagcaacacgggctgcctcgatctgattagatctgatccaacatggctcagtagcaacaagaccgaaatcaccatagttgataacattgcctctaagggcttttcctctcatggagccacggaattgtttacgacgttttactctttttggcattaacattatttatcgctcccttccttagttccttttgtcggaagaatctcaccattgtagatccatgccttaacaccaactttaccgtatgtggtgtctgcttccgcaaagccatagtcgatatctgcacgaagtgtctgaagcgggattgttccctcgctgtagaactctgtacgagccatatcagctccgccgagacgtccggatacggaagtcttgattcccttagcgccagccttcattgttctctgcattgtggacttcatagcacgtctgaaggaaatacggttctcaagctgaagagcaatgttctcagcaaccagctgtgcatctttgtccggtctcttaacttctttgatgtcaacgataagcttcttgtctgtgtatttctgaagctcagctttaactttctcgatctctgcgccgcccttaccgattacgataccaggttttgctgtgtagatgatgatcttaactctgtcagatgctctctcgatctcgattttggaaacacctgcgctgtataatttctttttaaggaatgttctgatgttgtagtcttctaccaggtagtcagcaaacttgtcttctgcataccatctggaatcccaatccttgataactccgactctaaggccatgcggattaactttctgtcccatgcttttcctccttacctttcatcaagcacaactgtgatatggctagttctcttctcgattctgtaagctctaccctgtgctctcggctgaattctcttcattgtaggtcccttatctgcatagcatgctgcaacataaaggttgtctgcgttcattccgttgttgttctcagcgtttgctactgctgactcaagcagttttttgatcacgctggaagcgtatctcggattgtatgtcaggataccaagtgctgtctgtacatctttgccacggatcgcatctaatacgtagcaggctttctgaacagaaattcttgcataagataactttgcagacggccttgtctctctattattctcatttctggctctctttatctggcttctatgtccttttgccatcttaaagtgcctcctttcttaaattcgatatctaagttatctgccagctgtcttaaattgacagcgggcagttataaatctgatgactagcgtactccggacttcttctcgtcttttccgtgtcctctgtaagttcttgttgcaacgaactcaccaagtttgtgtcctaccatatcctctgtgatatataccggcacatgttttcttccgtcatgaacagcgattgtgtgtcctacgaaagacgggaagattgtggaacggcgagaccaagttttgattacggatttatcatttgcagcgttaagagcgtctacttttttaagtaagctctggtctgcaaaaggtccttttttcagtgaacgagacatgctttctcctccttattatttcgataatgcttttccatcgcgtcttcttacgatgtacttgttggactgtttgtttttctttctggtcttcaggccgagagcaggtttgccccacggtgtacaaggacctgggcgtccgataccggtcttaccttcaccaccaccatgtggatgatcattcgggttcattacggaaccacgaactgtaggtctgatacccatgttacgtttacgtccggctttaccgatgttaataaggttgtgatctccgtttccgattacaccaacagttgcgcggcatacgatcggaaccattctcatctcaccggaaggaagacgaagtgttgcgtactttccttctttagccatgagctgtgcgccgtttcctgcagaacgaaccatctgtccgccttttccaggatgaagctcaatgttgtgaaccatagtaccaaccgggataagctccagtgggaggcagtttccaacacgaacctcagcttccggaccattgtaaaccttctggcctactttaagtccctctggagcgaggatgtaagctttctcgccatctgcgtagcagatcagagcgatgttagctgttctgttcggatcgtactcgattgttttaactgttgcagggattccatcttttcttctcttgaagtcgatgattctgtattttcttctgcttccgccaccctgatgtcttacagtgatcttaccctgattgttacgtccagcgttcttcttaagggaagtaacgagggatttctctggttttgcagctgtaatctcagagaagtcggaaccagtcatatgtcttcttgacggtgtatatgggttatagcttttgattcccatgatgtttctcctttcgaatttgttctcgtgctttcgtgcacatattcgcgataatcagaatgacgctgtgtcactcataccgctcttggcttgatcttctaattaaagtccttcgaagatttcgatatctttgctctcttctgtaagagctacgatagcttttttagtcttagcagtttttccaactaccattccacggcgttttttctttccatcactgttgatggtgtttacgctcttaacttttgttccctcgaacatcttctcaacagcctctttgatctgagtcttgttagcttccggatgtacaaggaatgtatatttcttctcacccatgtctgccatggatttctctgtgataaccggacggatgattacgtcatagtactgaatacttgccattatgcgtatacctcctcgatagatgcaacggcatcctttgtaacaactacggtgttgtgtttcataacatcgtatgtgttgattgtagccggtgttgcagtttccacgtcagcgatgtttcttgcagaaagaactacgttctgatcgttgtcagctgtgattacaagagctttctctgctttcaggtttgtaagaaccttctgcatctcttttgtcttaacctcagcaagtgcaaggctgtcaacaacaacaagtttattatcctgaaccttggatgtcagagcggatttaagagctgctcttctttcctttttgttcatttttacttcataatctctcggaaccggagcgaatacaacaccgccgcctgtccactgtggtgcacggatggaaccctgtcttgcatgacctgttcctttctgtctccacggttttcttccgccgcctcttacctcagaacgagttttcgctttctgagttccctgacggttatttgcaagctgacgaacaactgcaagatgaacgagatgctcgttgatctcaacgccgaatactgcgtcattcagctccattgtgccaacttcattgccttccatattataaacagttacattagccattctgatgctcctcctttcctattataaggactttactgtctctttgattgtaaccaaagatttcttaggtcctggaacagcacccttaactaacagtaagttattttctgtatctacacgtacgatctcaagattctgaacagttacctgaacatgtcccatgtgacctggcatatgttttcctttgaaaaccttgctcggatcggagcaagcgccgttggaacctgcatgacgatgatatttagaaccgtgagccataggtcctctggactggccatgtctcttgatagcgccctggaagcctttacctttggaaactgcagtagcatcgatatgatctcctgctgcaaagatatcagccttgatctcctgtccaacctcatactcgccggcattgtcaaatctgaactcttttacaaatctctttacagctacaccagctttgtcaaagtggcctttctccggtttgttgaccagtttctctctgatctcgccgaagccaacctgaactgatgtgtatccatcgttctcctcagttttaacctgagttacaacgcaaggacctgcctgtaaaacagttaccggaattaacattccatcttcattgaagatctgagtcattccgactttagtagctaaaatagctttcttcatttctttcttcctccttatagcggattaccattcggtaatcatatagttaatgtcaaatgacattattagcgatttttcatcttgatatcgatgtgaacaccagccggcatttccagtctggaaagtgcatctactgttttctgagttggtgtcaggatatcgataagtctcttatgggttctctgctcaaactgctctctggaatctttgtatttgtgaacagctcttaagattgtaacaacctctttcttagtaggaagcggaaccggtccacttaccattgctccgttcttctttactgtctcgatgatctttgctgcagatgcatcaacgagctgatgatcatatgcctttaatgtgattctcattacctgatttgccataaaaaaagtctcctcctattcgtacttatatagcagtacgacaagcggcgactgtacacatctccgtgtgtgtcatggtatatttgcacacacgtcccatcccaagatggttattgaactttgtacagtgacttgtcgtcagtttcctaacttgacattcgctccacggaaaacctgccagtgtggcagcaacctcgcgcttcatagctatcaatgtcacagcaaggattagtatatacgatgattcttcagaatgcaagcctttttttaaatttttttgattttttttaaaaaagaagaaaatggctcatttctgaaccattttcttcttatataataggtacttattttattcttccatatcgtccacatcaccactgatgatatccgagtaatcaaacagtgtaaccttcgtgatgtcatccttaacgatatccggtgcatcaccggccttctttacgcggcttgcaagctgcgctgcggaataagacggcatcgcaaggcttccaatggtaaccggctcctcttcctcttccggaacctcttcgacctttccggccggatgcggctttctgttttcttcaaccgtacgttctgccatttccagtctggaaagcatatctgcttcttctgaagtggctgctgcaatctctttcttaagttccgcatgagcttcacttgcggcagtctgtgcagtctgctgtatggcagccttctttttattctccgaatagcctgtaacatcctcttcgtcaatctcatctacgaaaccgcccgtacggaccttacgcttatctgcttttttatttttgtgttttcgtgccttttcttcctgaatgatctctttttcttcttccttcattcttctggcacgtgctttttcttcctgcttcagttctttcctggacttcacataacccggttccggatcgttcacatcttcctcaatatcatccggctctttcttccagagctctgcgatcacatacaggatgatcaggaacaatacgaccagaccaaggatgatcaggccttcaatactttctgtagccaccataagatatcccacatagccaatggtaactacaacttttggaacataatctccaaccttaatggtaaaagtctttcctccggaaacggactgatctgttactgttccggttcccttggaggcatcgagattggtgatcgtatatttatatgtctcggaatctttctgtacaaggatcggagtacctgcgctgatcgcagaactcttctccgggatcgcatatgtaacagatccgactgggaggttcgttgccttatcggatttatccacgatcactgttctcaccccgaagaacggcggaagaacaagtcccagtacacagatcagtgtgcatatcacaacaaaatgtacgataaatttcaatacttttgacataggtaatcttcctctttcatatttgtaggtactttgaagcggaaagggatacagcgggaatcggtcttcctttccttctgtatccctttatattccacatccgcagaactctacccttttccgcggactgctctgtcccaactgattactggttgcttaaatactgttcaatgctctccatcgctgcattctcatcatcaccgttggcagacagtgtaatctcttctccagcgtcaagtcccagggtcatcattcccataatgctctttgcattgactctttttttgccaatctcaacataaatttcactgttaaactggcttgccacctgaacaagctgtgctacaggtcttgcctccagtccagtggataagttgatagtgattggttttttaatcataatagctcctccttgttctcccgcagctcatctgcgatctcactcagcttgcgaagccggtgattcacacctgatttgcccacctgcggattcaacatcatacctaattctttcagtgtagcatccggatactgcagtctcagcctggctatctgtgccagtccatcgctcaagctctcaaagccaatagttctgctgatcagctgtatatcttccacctgtctcactgccgcatttaccgttttattgatattcgcagcctcacagttcaccttacggtttaccgtgttacgcatttccttaagtatccggatgttctccagatccatcagtgctacattcgcctccatgactgccagcatgtcaacgatctgtgcgccctccttcacatagaccacatatgatttcttgcgcaccacaattttagcttctacgtgaaagctgcggataatcccctgtaattgttctgctttcctgctgtccggacacacgatctcaaaatgataccctttctctggatcactgatcgaaccggacgacaaaaaagtaccgcgaataaatgcccgcttgcaacagttcatctgaaccacaagcgaattatccatttcaagtaaaccggtttcgttatccacagaaagctttgtcccctgcagtacttcctctgttctggcaggatccgtaacctcaacaagatataccttaccccgtttgagatgagacccttcccggataacaatcgctgtctctatattaaaggtttttcgcaataatgtaaagctttttcttgcaactgcttcattttctgtctggatccatagttttctgtttccatccgacattttttccacacggccgcagccgcagagcagtgccgccagttctgccacctgacagtgcctggccagactaagctgtcctgcaagttcttctttgacttttcctgaaaatgacatcccgaaccctcttttactgtttccctgccacccttttcatcgcggcagttattttttcagaagtctgtccttctccgcatccctgtgctccaggcggatgccgtattcatccgatttggaaagcctggaaaaaagttctctggcaatcgtaacagaacgatgtttcccccctgtacatccgataccgatcacaaggcttgttttcccttctttaatgtagttagggatcagaaaacggatcatatcctccagtttgtccgcgaaggctttcgccgtatcactggccatcacataattgaacacttcatcgtcaaggcctgtcagaggacgcaattcatccacataatagggattgggaagaaatcgcacatcaaacacaagatctgcatctgccgggattccatacttaaagccgaaggaaagcacagagatcatgatattgctgaactctctatcatccacaaagatcttttcgatttcctggcgaagctccctggtaagcagatggctggtatcaatgatataatccgcacgtttccggagaaattttgttttctcacgttccaggcggattccctcatccactctccctgctcttgccagcgggtggcttcttctagattctttatagcgttttacaaggacagaatcctctgcatccataaacaggatctcgtaatcatacccggtctgcttcatacggtccagaactacttccagttcatcaagggcacttccgcttctggcatcgatccccagagccacatttctaacattttcgctctgcatctcaggaagaagggaagcaaatttttccagaagctggattggaagattatccacgcagaaatatcccatatcctccaacattttaagtgcagctgtttttcctgctcctgacactcctgtaacgatcacaaaacgcatagtctctcttcctttccatttcttcttccgttatatataaagcgtacatacgcattcctgttccctctgtttcgtatcctgggtacctgaaagccggactacgctgagccttttaggtctgtgtgatcggatccacagacaagtacgtggtataattattttgaaaacgatgtaccagaaatggtcatcaggcttcaaaatcacccaggaacttcacctccggttccagcgtaactccatatttcttataaacgatatccctgacattatccatcagcgtgcggacatccctggcagttgcaccgcctgcattgatcacaaagccacagtgtttctcagaaacctgtgcaccacctacctgatatccagcaagaccgctgtccatgatcagcttacctgcaaaatatccctcaggtctcttaaaggtacttccagcactgggatactccaacggctgtttggtggtacgacggatcgtcagatctttcatggtctcacggatcacttccggatttccctccttcagctgcagctttgcttccagcacgatataacctgcggttttgatgatgctggtacgatatcccagttccagtttatctgccggaagggtaacgatctctccctcctcatccatcacagttacctctgtaagaacatccttcatctcgccgccataggcacctgcattcatcacaaccgcaccgcccatagttcccgggatcccgcctgcaaactcaaagcctgtaagagctgcattttttgctgctgctgccaccgatgaaagcagcgcacctgcctgtacggtgatctttgttccttctacggtaacggcagacatatttttgtagatctggataaccgcaccacggtaaccgccgtctcctactagaagattacttccatttccgaggataaaataagggatcgcactttctttacagatttttacgatacgccccacatctgtgcctttatccggcatcagaaaataatccgccggacctccgatcttaaaagttgtatgacggctcattgcttcgcctgtaaaaacacgttcttctccaagaagatcgcagaacttttttatgatttctgaattcactttttatttcctcagtctttctgttttatttctgtaaagcagacattactgttccgccttgactcatgctcatgaactggatctgtccgtgatctgcgctcaatttctcatttgctgtcagctgtgtgaaacgtttccggctaacagtatatcccgcacaacttctcccgccagcagatatcccgcagtccctgtcacaaaggaaatatttccttcggcaggcttcttcaccatagttcttctccgtctgaaaagcttttcttttgccggttgttctctggaatacagtactttgagtttacgtattccctgtttacgcagttctttttttatgatcctggccgccgggcatactgtggtcctgctgatatccgcaacctcaagtctagacgggtctatcttgtccccgatgtccaggcaggagatcacaggcacacgttcctcccttgctctgctgatcagaagcagttttgacgacagtgttcccattgtatccacaatataatcaaaggaacgcaattcaaacattcccgcagtctcctcattataaaaggtttcgtaggtatgcaccaaaatattctcatcaatatcccggattctcttcttggccgcctctaccttgctcattcccagagtagaatgaagtgccagcacctggcttccgatattcgtcaatgtgatcttttcatgatcgaccagtgtcagactccccacaccgcagcgcgcaagtgactctgccacctgtgatccggctccgccaagaccgaatactgcaattttcgccctgctgagtttttttacacctgtatttccaacgagcaattccatacgtgaaaaagcatcctgcatatccgtcctcctgacactgttttttcttttgattgagaaagacagcgcctgtccgccgctgtccatattcctttttattatactatctctgtccgtaaatgtacagatattcttgttttttaagattttcgcataaaaaatttatattttctcatactattcccatacaatcccacaaggaggttctgtccatgcttcaacagctgattctgtgctttatcggtttctgtgccgggatcatcgttgcaggaggtgtctccggactgctgatcggcctttccattgtttcccgctatgcaggtatcacgcatacagctgaccagatttttctttatgaagatctgacacttctgggaacagttgccggaaccgtcgtcaccctgtttccgatcagaattccgctgggaccttttttcctggctgtctgcggagtatttttcggaattttcctgggcggctggatccttgcactggcagaaatcgcaaaagtctttcccgtctttgccagacggctgaagctctctcaggggctttctccggtaataatttctattgctgccggaaaagccctaggctccctgttttattatgccatgagctggatgtaattcttactgtcactctaccatctcacgaaaggattttccatatgcaaaatatcaacccaaaaaaatatgaacaatatgtcaagcagcttactcccacccacagtctgccactgaatatggcaaaagcttttctcacaggcggactgatctgtcttcttggacaggttatcttaaacacagcacaggctctcggtgcagatgcttctgattccagaacttggtgttctgtccttctcattctcttaagcgtccttctcacaggctttggtatttatcccaaaatcggcaaattcggcggtgcaggaagtcttgttcccattaccggattcgccaactcagtggctgcatccgccattgagttccgggcagaaggacaggttttcggcatagggtgcaagatttttactattgcaggccctgtgatcctctacggcatcttaagcgcctggggactgggtgtgatctattatatcctaaagatcctggaggtgatatcatgagcaaaaatctcagacttggcgcagccagcattgcattttcacagcctttgtatatcgaaagctccgcatccatcgtcagtcagaaagaggcggacggtcctcttggaaatctttttgacctagtctgtgaagatcccatgtttggctgtgacacctgggaatctgcggaaagcacactgcagaaagaaactgccactcaggccataagcaaagccggactgagctccgaagatatccatctgatgttcgccggagatcttctcgctcagacatcagccacctgtttcggctccgctggacttggaattcccttttacggtctttacggcgcctgctccaccataggggaagcactttctctcggttcccttgctctgaccgccggattcggcacacgggtcttatgtgccacctccagccatttcgcaagtgcggaaaaagaatttcgttttcctctgggatacggaaaccagcggccgttttctgccacctggacagtaaccggaagcggtgcctgtatcctaagtacatctcctcccggagaaaaagctcctctgcgctccggcaaaggctgtgctgctatcactggccttactgccggccgtgtgatggattacggtctcagggattccatgaacatgggaggctgtatggctcctgcagcctgcgataccattgcacgaagcttttcggatttcgggcggacgccttcggattatgatgccgtctttaccggggatctggggatcatcgggcagaaaattcttctggatcttctggaggaacaaaatatccggctttctcccattcataaagactgcggtatcctgatctatgacgatccttctcaggacacccacgcaggaggaagcggttgcggctgttctgctgtagtccttgtctcctatatccttccgaagattgtatccggagaatggaagcggatcctttttgtaccaacaggagcgcttctttccaaagtaagctttaatgaaggtgacagtattccgggtattgcccacggagttgtcatcgagcatatggaggtatgaacatggattactttaacgcattctggttcggcggccttgtctgtgccctgatccagatccttctggacaagacaaagctgatgcctggccgtgtgatggtacttctggtatgtagcggcgccctgttaagtgccgttggcgtctaccggccgctggtggattttgcaggtgccggggcctccgtcccgctgatcggtttcggccatgtattatgggagggtatgaaaaaagccattgaagaagacggcatccttgggctttttacaggaggcttcactgcctgtgctgccggagtttcctccgccctgatcttctcttatctggctagtctcttcttccgtccaaaaatgaaaaaataatattccgggaaaggagttttttctcatgagtgataccctttatctgcagctggatcagaacattgaagtcaccaacccacatgtatatcttcaggatatcgctgcactttccatgagtgaccccaaaatcctcaatcgtctgcgggtcatgcctgtgatcgttctggatgcgaaaaagcccggacgctatgtgatgtctgtctcggatcttctgaaaaagatccagaagctggaaccctccattgatatttctcccatcggggaaacggattttatcatcacctaccgcatcagctctgccacagggaaaattttccggtatgtaaaaatcctttttgtatgcctggtttcctttttcggcgccgctttttccattatgacctttaataatgacgtagatatgggcagcctttttagccagttttacactcttgttacgggaaaaagttcctccggctttaccatcctggagatttcctactccatcggaatcggcctcggcgtactgatcttctttaatcatttcgggcatctgaagctaagcgatgatcccacacctatgcaggtgcagatgcggacctatgaggatgacgtaaaccggacactgatcgaacaggctgcgcgaacagaaaatccagaaactgaatcatagccagagcacactctcatatccgtaaattccgccgcctgtcgcacaaaaaaagctccctgcagatttctctgcaaagagctttttttatataatatgggtttacttttttctgaaatgatatttacagaagtcctccgatggataagaacagaggagcaaataccagtgatacaatagtcataagcttgatcaggatgttaatggaaggccctgatgtatctttgaacggatcgccgactgtatcgccgacaacggctgctttgtgcgcctcgctgccttttccgccatgatgacctgtctcgatgtatttttttgcattatcccatgcaccacctgcgttggacatgaagattgccatcagtacacctgttacaagagcaccggaaagaagtcctccaagagcctcaacgccaagaacaacacctacgataaccggaacaacgaccgccatgattccaggaagcatcatctcgtgaagagctgctgttgtggagatcgcaacgcatgatttgtaatccggtttctcagtacccttcatgatacccggtttctcacggaactggcgtcttacttcctcgatcatcttataagcagccttggaaacggattccattgtgaatgctgagaagaggaatgtaagcataccaccgataaagataccgatcgtaacacgaggagcaaggatattgatcgcatccagatttactgcattcgcataagatacaaacagagcaagcgctgtaagagctgcggaaccgatcgcgaagcctttacccatagctgctgttgtgttacctacagaatcaagcttatctgtgatctcacgaactgactcatccagacctgacatctctgcaataccaccggcattgtcagcgatgggtccatacgcgtcaacggcaactgtgattcctgttgtggaaagcataccaactgctgcaagagcgattccgtataatccatccacaccgtatgctacaaaaatgccaacacagatcagcaggatcgggaatgctgtagatttcatacctactgcgataccactgatgatagttgtagctgcacctgtctcagactgctcgccgattccctgaaccggtttgtaatctgcagatgtgtaatactccgtaatgtttccgatgatgacaccgacaacaagacctgcgatcacagcaatggctgctttcatgtctccgaagagagtcttgctgaggatcagggacacgatgataacaagtgctgcagatacatagcttcctcttgtgagggctttctgcggattggaattatcatcaccttttacaaagaatgttgcaatgatggatgcgatcagtccacagcctgcaatagccagcggatagagaacaccggaaactgctccggctaccgcaccaagtgtaagggcagataccagagatcctacataggactcaaaaaggtctgcacccataccggcaacatcacctacgttatcacctacgttatccgcgataacagccgggttacgagggtcatcctccgggattcctgcctcaaccttacctacaaggtcagctcctacgtcagctgcctttgtatagattccaccaccaacacgtgcaaacagtgcgatggaagaagcaccaaggctgaatccggaaagtacgtcaacgttctttgtgatgatatacacaacgctgacacccagtgcgccaagacctgcaacacacatacccataacagcaccgccggagaatgcaatggaaagagccttgttcattcctccctcttttgctgcatttgctgttcttacattagcctttgttgcaacagtcataccgcagtatcctgcgattgttgaaaacagagcacctactacgaagcagattgctgttacccagcttccaactccgattccgatcagtacaaaaagtacggctacaaaaataaccaggatcttgtactctgctgttaagaaggcgcgggcaccttctgcgatcgcacctgcgatctccttcattctgtctgttcctgcatcctgtttgctgacctttgctgcaaggtatgctgcgaacagaagtgccagtactgctgccaccggcaccaaatacatgtagttttccactctttttacctccgttcatgtattgttaatactttatcacattattttgcatatttcaaatagaattttcacttagttttttgtaagtattatgatataataaaaatttatataaatgagataaaaaaattttatattattacttgtattttttcagtttcagacagcttatataataggtagtttttttatatctctatttggacaaaatttccatttttctttccagaagatttttttccaataattgtttttctgcattttcaaatccaattcgttctatagtctcagcaaaacgttctccctttaatccctggtccttaaaaagcaggattgccttctcaataacatccagtgcctcttcctctgacgtaaagatccgattcagggcctttccatgagaaattttcttcccccagcgtccgccgatatagatcttgaatccgtaggtaccatccgggatggaatggaacggacattttcccacacaccttccgcagtgtctgcaaagttcctcatcaatatgcagtttcccgtcaacgactttcgccactttgtttggacatgcagcttcaatggcacattttttacagcccttgcaggcctcgctgtcaaagtgcgggatcctctgtccgatgatccccacatcgttcagatttggtttcacacagttattcgggcatccgcctactgcgatcttaaatttatgcggcagtgcaacctgacggtagcctttatagaatctccggaaaatctcttctgaaattgcataggaatccagaagtccatactgacaggtggttcccttgcaggatactaccggtcggacctttgctcctgttcctcctgtctccagaccttccttcgcaataaattcctgaaactcctcgatcttttcgtaggggattccctggatctccacggagagcctggtcgtgtaggtaagatttccgttgccgaatttctctgctgcttccgccatacatctgtgctgtgccgctgtcacctttccgtttacagtgatcacccgtgcagaaaattcatcggttccccggttatttaaaaacccctgccctttcagtcttttctcttcctctttgcttacagttaatgctgacatatttcctcctcctggtctcaccggcattccgatactttcccacggtatcgttgccctgtattttgcaatgttgaaatcgttttcacgtacttcctactataccacttgaagatgtatttgagaaatgatattattttataaaaatgataggttttacctatataccaatttacaataaaaggagattccatatgaccatccgccatctcactgtttttgcggccgttgcggaacagggctccatgagtgctgctgccaaacatctttatctttcccagccaacagtcagtcaggccatccgtgagctggaagctcattataacggccttctctttgaacgtcttggaaaaaagctttatctcacagaacggggaaagattcttcttccccatgcccgtgaaatgatccgccagtttcagcagctggaagagctgatgcagaaccagggacagtcttccaccctgaagcttggctccaccctcactgtgggaacctgcctgaccccatccattatcctggatctgcagaaaaaaatcccggaccttgacgtttactcctttgtcaccaacacgcaaaatatcgaacagaagcttctgcgttctgagctggacgctgctgtggtagaaggtgagatccattccccggatctgatcgttcttcccatcatcgacgactgtctggtccttgccgccggaaaaaagcatccgttttaccgcagaggacgcatccatgaccaggagctgaacaaccagaaatttgcagtccgggaatatggaagcggtaccagacagctttttgaagattacacccttcgccatgatctgaagatccggactgcctgggaagccaacagtccgcaggcactgctgaacgcagtgctgtataaccagatgctctctgttatgtccatccgtcttatgcatcatgagatccgtcaccgttcagtccgggtcttctgcaacgaagcaggggaatggaaccggaaattcaagctggtctatcacaagaataagtttcttacccctgccatctttgagctggaaaagatccttcacacctatcagcagctggaactgccctctgtcatgggtgttctggaacaagaataagcaggggacttacctgatccagaaaaaaaacggccgcacatatcgctcttacgatatgtacagccgtttttcgtttttttctcacccgacagagtcggatctttttttgaaccggatatttagtttgattcgttgaacacgtttttatccagtgcacggttctggtgtgcaacgatggttgtgcagactgcatcaccggtaatgttaaccgctgttctggtcatatccaggatacggtcaatacccatgatcagaccaattgcctcaaccggaagtcctacagaattaaataccatggtcagggtaacaagaccaacacttggtacaccggcagttcctacggaagcaagggttgcagttccgataactgtcagataatccatcggacttaagtggataccgaaggcctgtgccgcaaatactacggcaacaccctgcatgatagaggtaccgtccatgttgatggtagctccaagaggaatggtgaatgaagaaatcttcttggaaacacccacttttttggacagggtatcaatggacatcgggatcgtggcattggatgtagctgttgagaatgcaaatgccataaccgggaaaaatttcttgatgaattttatcggattcagtcctgtgaagatcttcagcaggatctggtatacgccgaagcactggattgccagtgcaaggagaacaccgatcatatattttgccagcgggataaacgcgctgaaaccgatgtttgcaaaggttctgctgataaggcagaatacaccgatcggtgcaagtgccatgatcatcatggtcatctccatcatgatgtcattgaactggctgaaaaagttcgctactgtctctgcgcgctctcccattttcgcaaggatcacacccacgatcagggcaaatacgataacctgaagcatggttccgcttgccagggaattgatcggattgtccggaatgatattcaggatggtatccgtaagagaggtagcctccatagtctccacagaggaagcggaggactgaatagagctcatatcaagtcccacacccggattgatcagattacctaccgtcagagcaaccgaaacagccagagctgtagtcgccagataaaataccagtgttctcacacctacggttccaagcttcttggtatcaccgatggacatacttccgcagacaagggaacagaataccaacggtacaaccagcattttcatcagacggataaatccctgtccgatcacataaaggattccctccacgatcacatctttcttgaagctgctgtcaggaaccaggtaacagagaatgattcccagtatcgcacctgcgatcagcgccacaaagatcttcgtggtaaggcccattttctttttctgctgtgttttctcttttatatttttctctttcattctagtcctccgctctttcatccatatattctttcagcgatgctttccagtccggcatgtcatacacttcaataatacggaggataaaattatcaaggacggcatatggcggtctgacagaagaaagatctgactgctctgtcggcacggatctcagttcgatctcctttcctgcaaggcgaaggatctcggttgcaaactcataacggttgcatacaccgctgcaggttacgtgataagttccatattcgttggtatcgataagatacaggatcattcttgccagatccttggcgctggtcggtgatccgaactgatccgaagcaacggaaagcgcctggcctttttctgctgtctccagcacacggtttacaaaattgtttccgccttttccgtatacccagttgcttcggataatgaaatgtttgtgtgtaaactcttttacatagttctctccggctctcttggaacggccgtaaacagtcagcggattggtatcgtcaaactctgtatacggttttttgctctttccgtcgaaaacatcatctgtggaaagctggacgatctttgccccgcattttcttgccacaatgcttaagtttcttgctcccagtgcattgacacggtatgcatgttccggattcttctcacactcatcggtatctgtgataccggtgcagttgatgatcacatccggacggttaatggaaccgaagttgatcacttcatctgtgtctgtgatatccagctcatcaagatctgtgttcagagtctcgatctgcattggatccagaacatcattcagtgcccgtccgatctgtccgttggcacctgcgatccatacttttaacatctttctacctccctggtataatgtgtgtgatacataaataaagagacatcgatttagatcaaaaccaatgcccctttaacctatatactgaaatatattttatcaatatcacaaaaagctgtcaagaaaaaagcccctgtttccataaggttcctgctgctgatattactgcccaccggcagtatttcctcaagatgtttttgtgaacagaatttacagaaatcctgaggatcgggagttccataactcccgattttgtattgtaaattctgtcccatgaattataatctaaacaggagatcatctaaaaacacatacaaaggagaaacttatgaaaaagctaaaagaattaacatctctgctatttctgttctgctgtctttgcttctgtctgattctgtttccacagacagcacgggcaggctctcttacgccaaccgcacaggacaatctcaatgtcaggttacgccgtacctctgatcttattcctgtttccggcggatacatgagggtcttccaccagaaaaattctgtcggcgttgaatattacgataatgatctgaagatcagaagcaagcgcaagatcaacatggagcttccactgtggggtggcttttatgccggatctgacggatattatctggtagaaggccagacaaacaacaaagaaaacgattccgctgaggtcatccgcgttatccgctacgatacaaactggaaccggaacggtgcagcagcaattaccagtaacccggagctttttggcggtgaggtccgcacgccctttgactatggctgtgtggaaatgacagaaagcaacggcaagctctatgttgttaccggtcacgaaggatatgtggattcctctgtcggtcagggacatcagggcttccttatggccgagatcgaccaggcaaccatgaaaggaaagatcgtttcctgcgatctgtggcattcctttgcacagtatatcaaatcacatggttcttatctctacgtactggagcagagtgagggttcacgatgtacaaagctttccagatatgacagcaatacacttgactgcaccaccatagaacttttgccatacggaggctcacgtacttctgtgtgggcactggcctgctacgcaagcgttgacggcatggctgtttcctctgacagtgtattatgcgtcggcacttccatcgatcagtccaaatatgataaggtatctgaaaacacgcctcataatctttatctgtccgtcacaccaatatctgacttttccgaaaaagcaaccgctaccaggaagcttaccaactttacaggcggaggaaaaagctttgcgggcgtaaagatcaccaaaataaatgacaaccgttttatgatttcctgggaagaatacgtctccgacgataacaagaaaaactcttccgctaacgatccgctctcttccagcacccttcattatctttttgtggacggaaagggaaagagtctcagcaaagagtttacaacagctgctccgatttctgactgtcagcctgtggtaaaggattccagggtcgtttattatgcttcaaactccaacaccttgaacttttattccattaattccgacaacggaaaagctgacaaaaaaacttaccatatcgcaggtgacaacgcaacctggaatttcaaaaacggtatccttacgatctccggctacggaccactttctatttccacagaggaaaacaaccgatacccggtctcttcaacaaacagctggttttccttctccagcgattcctcctggaaagctatcaaaaaccagatcagaaaggtaataataaagcccgggatcacaagtatttctgaaagggcctttgtttatcttcctgagctgaaagaggtggacatccagaaaggggtcacaaagatcggaaaagaagctttcgcctactgtgacaagctatccaggatcaacatacctgataccgttaaaagcattggaacggatgctgtgtggtgcggctattactggtctgacagttctcatgcatatttttgcaagatccatgctccgtacggctcttacgcagttacatatgccaagaaaaacaatatcagctacgcatgcaatatttccggtgcagctgtaacagggatcaaaaaaacatatacttatacaggctctgacataaagcccgttccaaccgtaactcttggaaaagcaaagctctctggcatcaatgattatcatgtgacataccagaacaataaaaaagcaggaaccgctactctgaagatcatcggcgataaccatttctacggaaccatcaccttaaatttccagattactcctgctgccacaccaaagccacagactgcaaaaacattccgggatgcttataatgtctacacagtcaacgccaccgggacttccgtagcactgaagggaccgcgttcacgcaatactgtcactgcaaagattccggccactgtcaaagctaacggaaaaacctacaaagtcacagccattgcagccaatgccttcaaaaactgtaaaaacctgaaacaggtaacgatttcaggaaatatcacaagcataggtgccggagccttccagggatgcacaagtcttcgtactgtaaaaatcggttcccgagtttctgcgatcggcacgaaagctttctgtgactgtaaggcccttacctctgtcaccatacagacaggacgtcttacttccaaaagctcaggtaaatatatcttcacaagagcaggtcagaataattacaaaaaactgactgtaaaggttccggcaagcagactttcctcttacaaaaagctgcttcagagccagggtctgtccacacaggccagggttatcaaatagtcaggatcgtaccttgcatttccacgccccttatgctatactcagtttcgctgcaaaagcccgcaaaaaccaaggtcgtacagggcttacaaggcggtcaccgcctataaatgtgccgagtgttcgtgaccttccactcgtaaaacaaaactaaaggagaataaaaaacatgaaaaacaaaggtactcattttctggtacagggagctgccattgcagctgtatatgttgtcctgacactggtattcgcgccacttagcttcggtgaagttcagatccggttttccgaggcgctgaccgtgcttccgttcttcacaccggctgccatcccgggactgtttgtgggatgtatcattgccaatcttcttggcggtgcgattccggttgacatcattttcggaagcattgccacacttatcggtgcattctttacctacaagcttcgcaatacaggcaaatggacagccccgatcccgccgatcgtttccaacattgtgatcgttcctcttgtgcttcgttacggatatggcattaaccttcctatcccgtttatgatgctcacagtaggagccggcgaatttatctcagccggtgtgatcggtatgatccttcttggagcactttccaaatacaaaaatgtactttttcataaaaaagcagcagtctgactaaatctgctgcccacaaaaaggagccatgagaaaacagcagcatttctcatggctctcttttattttttctctgcggattcctgcagactgcgcaggatcctcttttccattctggatacctgtacctgggatacgccaagttcatgagcgatctccatctgggtcatgttctgaaaataccgcatatagatcagcctccgctcctttgcctccagagttcccagtatctcttccagaaaaatcctgtccagtactttttcctgccggttttctttttccggaagcttgtccatcagagaaatctccgttccctcaccctgatagatcgttttgtgaagagattccacctctgcaccggattccatggtcattaccagttcttctatggaaattcccatttcctctgccatttctcccgtcgtaggttcccgctccagccggcgtgtcagtgcttctctcacctgatagatcctgtaatggttttccttcagagaacggcttaccttcagtatcccgtcgtccctgagataacgtttgatctctccgatgatcatgggaacggcataggtggaaaatttcacatcataggacatgtcaaacttatccacagctttcagaagtccgatgctgccgatctggaacagatcctccatctccacccctcgtcccagaaaacgctttgccacactgtatatcagtcctgtattttcctcaaacaaaagatctcttgccgctttatccccctggtgtgcacgcccgatgaggacaagagtacgatccatagttacctcctgatgatctttttcatgtgcactgtagttccacggccaacctccgattccacctgaagctcatccataaacgcctccatgaatgtaaaccccataccggagcggtctttatcagcctttgtggtaaacagaggctccatggcttttttgatatccgggatcccggctccgtgatctgtcacatctacctgaagctcctgcccccggagacgacattctacccggatcttatgtatctccccttcatacccgtgtatgatgcagttggtcactgcctccgatactgcggtcttcagatccgaaatttcctccagcgtaggattcagctgtgtgcagaatgaagccacagcaactcttgccagtgcttcatttaccggtctgctgtcaaaaatgatcgtcatttcatttgtgttttccatcataaacaccctcctgttcacctgccgattttttaattccacagatttcaatatattttcccactccggatagccgtaaaagctttgcaatatgactgttcacattgacaacctgcacacatttccccctcatgccaagtgcccggtacctacccatcagcagaccgatcccggaactgtccataaaaacggtctctgagaaatcaaaaatcatattttttatatagttatgtccaataatccggtctgaatctctccggatctcatcagaagccggatgatccagttccgccggaagatgtacagtcagcacggttccggatttttcaaaacctgatgtcattctatcattcccccatttttgattttttattccatttctcatgaccaaagggtaaaaaaagaggaatgcgccaacgcacattccccttatccgaggtttctcctctgtatgaattatgatattttttattctgtataacctccatcgtaagaggaatcctcatatcctccgtcactgtagctgctgtcttctccggaatctccgtcagagctctgtgtatcttctccatccgaagctgcggcatccgctccagcttcagctgttccatctgtactgctgtcagcactggacgttccgtcagaagctccgctcccgatcccgcttacaccggtctttccgctgatagtactgtaaatcccctttgcagaatctgacagtgtatccacatataccttctgtagttccagcgccgctgtatccagatcctcctgctgcatggcagtatatgcattaaacaaagcctcatagctctgactgcgtttctgctcttcctctgcctgcttggcaactgcatctgccgtatcactggactgggcagcttctccctgagctttggtaagctccacgctctggctggaaagagaatcactgtactgtatgatctgctgattggcctgcctgtaaatatcctgtttcacagccggcagtacaaggagccagaatgctgccgcccctgccgcaaatccaagtaccgtggtaaagaaaagtgatatctttgatctttctttataagacgacggccttacaacgatttctcctgaaatattatcattctcatttttttcatttccaaacaagcccttacgccgtttttccatctttgtggtaacacccgtctgctcgtcaacttcacgcaggaaacgaagtgtggtggtattggtcttgtcaatcctggctgcttttttcagggttcttctcgccttattccactcctgattcttcatctggatcagagcaagaagatgataccccttgatcagcttgggattctgggacaggatctttttcaggcggatggccgccatatcctcatggccttccctgcacatggcgagggcattgttatatttcttgatgctttcgttgattgtttccagtttgttctggtttgcctgaagcctggcaatatattctgaagccagatttcggttcttctggatattcttgctgatgacccactcactcagtgcggcaaccacctcaccggtctcaaaatatacaagaccaagaagatttcttgcacggatattccgtttgtcataagcaagactttgcttcagacagctgatcgccccggacagatcccggatgctggctttttccagcccctgattataataaagcttggaaagataatccaccttcttctggatcagtacattggctccacagtgcggacaataatccagatctgtatccgtcaggaacgctccacagtttatgcagttcatccacttctccttatcttacacgtctgttgctcttgacctcacgcagcatctcctggagtacatccatgatatctgtgatctcccggtcataaatgacaccttctacatctgccacatccagacatggttcaaatttcttcagttcctcttcgtaatcgatcataattttttcctcctgatcacagccttgatctcaccgaccagataaagggatcctacacagaacagcattccatcctcacctttttcctttactgcccgttcaaaagctgctggaacatcctctattgcttccacttccggtactccgtcttcacggaagatctccgcaagctcttctaccggaactttgcggtatccgcctacctgtgtgacgatcacatgtcgaaaacggatcctgctacagatcgtgcggatcatatccgtatagtccttgtcatccactgcggaaaacagcagagtcagaggaaattccttctggaaatgttctgctgtctctacaaacttctcaacaccgtcttcgttatgtgcgccatccacgatcacacccggaagaaccgtttccatccttccctgccagcgtgtttttgccataccagccttcagagcctccagagataccggaatctgatcttccagtacctgaatggttttcaccgcaagcgctgcattcataacctgataacgggcgataaacggtatatcaaatacggtatcgccatatgtctcgtccttaagagaaaaccggattccgtcctttgtgatcttatggatctctgtgtcttcccgtttcagctcataatatggacatcccagcttctctgcatgctcacgcatcactccggccgcatccggatcatttccatcgtagattaccggaacacccggcaccatgatccctgccttctctcctgcgatctcggaaactgtatttccaagatactgcatatgatcgaggctgatggatgtgatcacacaggctgccggatcctccacagcagtggttgcatccagacgtccgccaagaccggtctccagtgttacatagtccacgtcggcttctgcaaagatcaccattcccatcagaaggagtgtctcaaaataggtgggatgatagcttccctccgcaaccagctcatcggaaagctttttaactttttcaaaagcacgaaggaaagtatcgtcatcgatcacttcctcattgatctgaaaacgctcgttgatctccaccagatgaggagatgtaaaaagtccgcaggaatatcctgcttcccgaaggaccgatgtgataaaagcacaggtacttccctttccgttggttcctgccacatggatcacacggaatttcctctgcggatctccaagtcttcttaagcattctctggtatggtccaggctgttcttagtagtaaatctcggtatatcttcaatatacgcaactgcttcttcgtaattcataaaaaaaaccatcacttatctataatgtattcgtaaagaacttttggggagaaaagcttctcccctcctgttcgttacgataccattatataatagtggtggaagatgtccagtcctaatcgtaatattttatccgacattttttgtatcggagtatcttttctatgccatttactggttgtctgtactgttttcttcaccggaatcttctgtggattccgtttctgacgctgtatccgtttcctccattgcccctgtatcagaactgctcttttcactgtcaagcttccacttgctgtcagcgagcagcgcataaaccgcccggtcatggctctttgtcatggcctttcttgtggaactgttacttcgctgcactaccgagagccggtcaaaatcatccagttcctttccggtaatgatcagcttggtaggattcacgtaaaccgtatcgtaccattctccgttgatcttcacctggctggacggcgtaaagtttgttccctggatataataggtgtgatccgtctcagacacaacctgaatggaatccagcgtggtatcatagattcccatacgcatctttgtccgctcaaaaggattcgctccgtcatatgtatactgctttccgtagagaagatcgtactgcagggtctccagatccacctgataatttttggtatttcttcttgcctgatgatacttgaaaacatttccctcatggatacctacacggtccataacctctgctgccatctggtatgccgcaagattttctttctttttcttaagtccgaaattatcccacatcacatactctgtctggaacagatatttattctccacatcctccacggtcagtcccatggtcggcagatgatcaccatacatgaccagtaccacatcctccggataatctgccagcctgtcagtcagctctttgacaaaattatccatctcatggatctgatttacataatactcccacttattattcagctcgtcagtaggtgccccggaaactgtgatctccggattttccagtaccggttctgaaggataatctccatgtccctgtacggaaatagtatatacataatcaggcccttctgtggaatccagacacttgacgatctcatcagtgaggacactgtccttggtccagcccaacgagttcttctggttttcatccttcatatactctgccgaagtgaaggtatcaaatcccagattcggaaaaatacttcttcttccgtagaaattcgcctcattattatgtactgcatgagcagtatagcccagattcttcagaatatacggtgcgctctcacaggtagtttccttaaggatactcttgtaaggatactctcccggtccaaaataatgaaggctcattccggtaatggattcaaactcagtatttgcggttccggctcctacggaaggtaccttataatatccggaggaatactccttcatcagctttctgaaattcgggataggatcttctgacagctccagataatttaccagcgtaggatcaaaaaaggactccagctgtaaaaacagaatattcggatgactgccttctttcgtttccggaagattttcttccgacttctcgatccttttgatctcgcttttggaataatctctcggggcactgattccggtattaaagatcgtcgttgccagacagtaaggatatccgtaatcctcataagctatggcaatgtttccaaaataattggaaagaactcttttttccagagcaagctgtgtgattcctccaaatgcaagaaccccaaccaggaccagtggaatattcaccttatatttcagcttgcctctgtacttcggcgaccttatcaggatgatcagaaggattagaactgcaatccccagaagaactgcacctatggtcatctgggtatgggtcagatatttttttgcaatactgagaccatctgtcagattcttcacatccggtcctgtaaacggtgtgacacggttgagaagaagcacaccgtttacgattcccagaaacagccataagctgcccacaaagatacgccagaaaattctctttcggaagagataaacaatcagcatcgtcgtaaagataaacgctgcattataagcaaatacaagcggccttgtggtcatgtaggtccacgcctctgtgaacgagtgcctgcatatggcctcgatcacaaagtacaggactgcacagcccagagcctgaagtatcagcgaaatcttattgaaaaagttacaccacttcattaaaacactccttcgttatttcaccatctgtgttaactgcaggttcactttctctttcatctctttgtatttctcaagtttctccttctctgcctctaccttggctgcaggtgccttgttcacaaaattcggattgttcagcattccctcgcagcgtgcgatttcttttgtaagtcgctcctgctcttttgtgagacgttcgatctctttttcacggtcgatcagatcctccagcggcagataaaccacaccgtctgccacaacgatggataccgcatcctcaccgattccgttcttatcctgctgtacgtggatctcttttgcaaacgcaaggtttgtaaaggatttcttgcaggactcaaaacgtgcacagcactctgcatccttgcctacgatatagatattggtctttctgttctgcggtacgttcatctcgtttctggtgttacggattccacgtacaacctcctggaagcttgaaactgctttctcagcatctgcaaaatccatctcgtctctgtataccggccagtcggagatcatgatggactcttcctccggaagcagtgtgcagtagatctcttctgtgataaacggcatgaacggatgaagaagcttcagtccctgtgtcagcgcagtgcggagtgtccacagtgcatcgtttgctgctgccgggttttcctctgccttccacagtcttacctttgccatctcgatataccagtcacagagctcatcccacaggaaatcatagaccttctgtacggcaattccaagctcatatttatccatattctcagtaacatcacggatcactgtgttcagtctggaaaggatccatttatcctcgttgcacagtgcgttcaggtctttcggcgctgttactgtcttgccctccaggttcatcataatgaaacgggaagcattccagatcttatttgcaaagttacggctggattctacacgctcccagtagaaacgcatatcatttccaggtgcattacctgtcatcagtgtcagacgaagggcatctgcgccgtatttgtcgataacctccagcggatcgataccgtttccaagagacttactcatcttacgtccctgtgagtcacgtaccagaccgtggatcagtacatggtggaacggtgtctcaccggtctgctccagtgcggagaataccatacggataacccagaagaagatgatatcatatccggttaccagaacatctgtaggatagaaatactcaagctccggtgtcttatccggccatccaagtgtggagaacggccacagtgcggaactgaaccaggtatccaaagtgtcctcatcctgatgcatatgtgtgcatccgcatttcgggcatttctccggcatctctcttccaaccaccatctcaccgcactcatcgcagtaataagccggaatcctgtgtccccaccaaagctgacgggaaatacaccagtcacggatattctccagccagtgcaggtaagtcttgtcaaaacgtgccggaacaaactgaaggtttccgtcgtccagagttttgatagcagcttttgccatttcgtccatttttacaaaccactgtggtttgatcatcggctctaccgttgtaccgcagcggtcatgggtaccaacactgtggctgtgcggaacaacctttacaagaagtccctgctccttcaggtcctctaccatggccttacgtgcctcgtaacggtccatacctgcatattttccgccaaggctgttgatggtggcatcatcatttaagatgttgatctcctcaaggttatgacggcgtccaacctcaaagtcgttggggtcgtgtgccggtgtgatcttaacgcagcctgttccgaattccttgtcaacatactcatcggcaataaccgggatttctctgtctgtaagaggaagcttcagcatctttcctacaaggtctttatatctttcatcctccgggtttacagcaactgctgtatcgccgagaagtgtctccggacgagtggtcgcgatctcaacgaaacgtccttcctcacctacgatgggataattgatgtgccagaaaaatccgtcctggtcctcatgtacaacctctgcatcagaaatagaggtctggcatactggacaccagttgatgatcctggagcctttgtagatatagcctttctcataaagacggataaatacttcctgaacagccttggaacagccctcatccatggtaaagcgctcacgctcccagtctgcagatgctcccagctttttcagctgattgatgatctttccgccgtactcctctttccatgcccaggcatgtttcataaattcgtcacggccgatctcgttcttatcaatcccttccttacgaagcttctctgttaccttaacctctgtagcgatggctgcatggtcagttcccggctgccagagagcctcatagccctgcattcttttgaaacggatcaggatatcctgcatggtctcatccagtgcatgtcccatatgcagctgtccggttacattgggcggcggcattacaattgtaaaaggttttttgtccggattaacttttgcatggaagtatccgttatccatccattttttgtacagacgatcctcaatacccttgggatcataagtctttgcaagttctttactcatgttttcctcctgaatctttctgattatcggaaccttaaaatgctcctgttctctgcaagaaaaaacacgccctccacacaaaagccaataactaatgtgcgaagggcgatcattctcgcggtaccaccttcattatccggaaaaaacatctgttattcccgtctatctcttgtcccttaacgcggggtacgtgaaaacctacacagcagcatctgcatctgttctgcatttctgctttcagtttcccggctcctaagctaccttctgcagtcctccatctgaaaatgcctttcagcctgcgcttctcttgcgtctgtgcatttctctctgtcagcgtagatctgcatactcctcttattcaacacctttgccatgttcctactataatgaaattttctttttttgtcaagacagaggcctgcttttcctgggatttcacatatttccggatacgaagatctttctggcatttcattattttattccacgctcttcagtgactctaccatattgatctttttcagcttaaaatgcatcaccatatttacaaacatggagaacccaaaggtaatgattccactgtaaacaaagcttattggcttgatatttcttccgaacatcaccgcatctacctcaacggttgtgatcacataccggtgaaggaggattccgaacactgcgcctgccagaattcctatgaaggacagcaggatattttcccggaatacatactgggaaacctcgccatcataaaatcccaggaccttcaatgttgcaagctctctctgccgctctgtgatattgatgttgttcagattatacagtaccacaaatgccagcattccggcagaaatgatcaggacccagatcaccgctccgagggatcccagcattcgctctacctgacctgctgtgctgcttgtatagctgatacttaaagctgccggatatttcaggatcgcatttccaagagtttccagatcactctccgcatcctctttcatagtatatactgtacttgaatacttcggtttctccccgaatgttttttcatagcaggatggagtcatgtaaacgtaatgtcccatatagttctctgtgacagcagtgatctttactttatacttcttgttgtctttctccaggatgatcttgtctcctgctttcacaccgataagagaagccgttttttcacagatcaccgctccatcatcggtaagctcatactgctcgtgggactttctgtcacgcaatgttacatcctctttaaaattttccgtattttccggaacatacacatagatactgacacttcccttttcttttggagccgtcatcttggtgagctgcacacgggtatagtgatcgatctcgctgtttccgtccaggaatttcagaagatccttttcctggctgtctgtggcatcctcatcattgatcaccatggcatcatagtgctggatctggtcatattggagaatcgcaatatccataatggaatcataaagtccgaatcctacaagcatcagtcccatgcttcctgcaattccgaaaatggtcataaaaagacgctttttataacggaaaagatttcgcatggacgatttccaggaaaagctcagatgcttccagataaagctgatccgttcaataaggatccgttttccttctttcggtgcaggcggacgcatcagagatgctggtgtttctgccagggtttttgcgcaggaaaacagtgtagcgcccatagtacagatcaccgctgccccggaagcgatcagtgcatattgtaactcataatccaactgcatgtgatcgccaatattccagtacatgattccatacgcctggataatgataaacggaagaaccttttctccgaaaagtactcctgcgatacttccgcctactgtagccagaaatgcgtagctgagatacttggatgcaatggatgcttttccgtatcccagcgctttcatggttccgatctgggttcgctgttcctccaccattcgtgtcatcgtggtaagactgatcagagccgctacaaggaagaatatcatcgggaaaacctttccgatgtttttcagtcgctctgcgttatcaccaaaatccgaatattccggaaggtcattgcgatctgtgatgatccattccggtgtttcaatatcatccacctctttctgggcatcctcgatcttctgctgggcttccgcaattttgtcatcggcttcttttttgccgtcctgatattctttctttccatcggaaagcttctttttggcgtcctccaggtcttttttggcgtcttttaatttctgttcattttcccggatctctttttcaccatccaggagcttctgttcatttgcatccaattctgcctgactactggtaagcttttctgtattggcctggatctctgcctgaccggcatttaactgggcctgtttttcttccagctgctgccgccctgcgctgagctgggctctggccgaatccagttgactctggccatcatccagagttgcctggtttgccgcaatttcttcttttgccgctgaaagctctgctttctttgtttccagctcttttttccctttatccagttcttcctggccttcgttcagctgtgcctctgtcccggaaagtgtttcttcctgttctttgatctggctgaagccctcattgatctgatccaggctgctctccagttcagctcttgtccgggccagctctgatttttttgcagtaagctctgaccgtgccccgtcgatctgtgcctgaccggcatttatctgttcttccattgcactgatctgactatttaatgtctggatctgcgtggaaagctccgccagctcttcctcagtttttcctgcttccgcaccggcgtcatactgcgcttgcagctccgccgcctgactgcttaatgcctctttctgactggtcagttcatccagctgtgcctgctgcccggaaagggcttcttcaccggaactgatctgggattctccctcggaaacctgtacaagtcctgcctcacactgttctttctgactggtgagagcagcctttgtttctttgatcgtattctttcccgtttccagctgttctcttccactgtcaatctcagcctgcttgctttccagtgttttctccgcttcccggagctgagcctcaccgtcacttacctgctgttttgcggcagtcagctgttcatatccggcagtcagctctgactgcttcccatttatctgtgcttcggagtcggcaagctgggatctggcagcatttaactgggacagaccgtcttccaactgctgttttgcgctgttaagctgagaccatccatcttcgatctgctttcttccgtcagcaagctgctgttttccgtcggtcagttctttttttgcatcgctgagctgctgttttccatcttcgtactctttttttccatcctcatacttcttctgcccatcatccagctttttcttcgcgtttccaagtttttcctctgattccttctttccgtcctcaagctcttttctggcatcatccagtttttcattggcttctgcgacgatctcctcgtagcgcaggctgcactgttctttttcaatgccttccacacgcttctgtattttcctgataagattgtcgtaagcatcggtatagctgatcacatccccggattcatgaaccataacatagatctgggtaaaagcttcctgctcaaaatcctcaggaagaatgtacccgaaaccgctgacctcaccggatccaagagtcgtatttcctctgttaaacgaaatataaagagggctgcttccgattcccacaactgtataggttgtttttttcagaagctcactgtctccatcctcactgacagatatggtatccccgattttatacccccgattctttgcaaatggcttgtccagaaaaatctcgccgcttttttccggtatccttccttcatctgctgtgagcagattaaaattgctgctgatggattccagatgaagaaccttcctggcatcgtcctctccactcataacatccgtagagtaaccgccctcagccagttccacaccgtcaatgtctgataccgcttttacatcacactcagtcagtcccagtgttccctggatcttcagatccatcagctttgccgcttcataataggcatctccggaatatctcatatccggagaagacgcctggatcccggaaaaaaatgcaacgcccagtgccacgatcagaaagatcgagataaaacgtgctttgcttttccggatctccatccagaaatctttgtgtaatgctttcattccgtcacctaccattcaatctcttccactggtgtgggatgtgcattttcggtcatcctggaaaccttgccgtttttgatcttgatcacacggtcggccataggtgtcaatgcagagttgtgagtaatgacaataaccgtcatgccacgttccctgcaggtatcctgaaggagcttcaggattgccttgccggtctgataatccaacgctcctgtaggttcatcacagagcagaagctttggattcttcgccagcgctctggctatggaaactctctgctgctcaccgccggataactgtgccggaaaattggtcagtctctccctcagccctacttcctccagaactgtcctggcatccagaggatccttacagatctgaagagcaagctccacattttccaatgcagtcagatttggcaccagattataaaactggaatacaaatccaatatcctcccgccggtatccggtcagctgccggtctgtatattttgcaatattttttccatcgatccagacattgccggatgtggccttatccattccgcccaggatattcagcaccgttgtctttccggcaccgcttggtcctaccacaaccacaaattctcctttttttatccggaaactgatctcatccacagctatgatcttcacttcttttgagccatagattttggatacattctccagcttcacatattcttccgtatgctccatttccacccctcctctttactctctatatgatttcagggggcttttatctgcccccttttaattctctcactcacgtatcacagctgtagaaaaatgttttcggctgtgatcgaatattatcaataactatatttataagtatatcggttcttaattcaaaatgcaatttctacttatattttacaaagatttttcattcctgcgcatttgtattttacatttcttttctataatacagacagataaaggaaatcaatattatggctgactgttgctgacaacagcagaagtataattccagcaaaacaggaggaatggattatgtataaagtactgtggaatcacttaaatcaaaatttaaaaaaggcccctgcgccagctgtttttcttgcacttttgacagttggatggagtgtagccggaattcttgcaggattacttgtttgtctggaacttcagacagaactgatggtgaagctgactgtgatcttatgtgctggtggatacg

(The sequence listing continues in the following parts.)

We claim:

1. A method for evaluating efficacy of diet intervention or disease treatment in a subject having type 2 diabetes mellitus, comprising method 1) or method 2),
wherein the method 1) comprising the steps of
a) collecting a fecal sample from the subject before and during the diet intervention or disease treatment;
b) analyzing DNA extracted from the fecal sample to determine abundance of each reference CAG selected from the group consisting of CAG ID Nos.: 1-64,
Aᵢ (abundance of CAG No: i)=number of reads aligned to CAG No.: i/(size of CAG No.: i×number of total reads;
d) calculating GMM-index of each sample using the calculated abundance data,
GMM-index=log (Σᵢ₌₁¹⁵Aᵢ/Σᵢ₌₁₆⁶⁴Aᵢ); and
e) determining that the subject responds positively to the diet intervention or disease treatment if the GMM-index is increased in the sample collected during the diet intervention or disease treatment,
wherein, CAG NOs.:1-15 comprise nucleic acid sequences set forth in SEQ ID NOs.: 1-191, 192-326, 327-593, 594-835, 836-885, 886-960, 961-1097, 1098-1264, 1265-1433, 1434-1684, 1685-1833, 1834-1979, 1980-2163, 2164-2447, and 2448-2783, respectively, and CAG NOs.:16-64 comprise nucleic acid sequences set forth in SEQ ID NOs.: 2784-2961, 2962-3130, 3131-3525, 3526-3747, 3748-3863, 3864-4068, 4069-4212, 4213-4393, 4394-4532, 4533-4891, 4892-4979, 4980-5116, 5117-5320, 5321-5464, 5465-5781, 5782-6279, 6280-6646, 6647-6954, 6955-7178, 7179-7613, 7614-7758, 7759-8046, 8047-8491, 8492-8546, 8547-9971, 9972-10099, 10100-10392, 10393-10502, 10503-10694, 10695-10986, 10987-11089, 11090-11262, 11263-11466, 11467-11704, 11705-12034, 12035-12113, 12114-12341, 12342-12454, 12455-12664, 12665-12825, 12826-13042, 13403-13500, 13501-13726, 13727-13949, 13950-14014, 14015-14290, 14291-14403, 14404-14686, and 14687-14850, respectively;
wherein the method 2) comprising the steps of
a) collecting a fecal sample from the subject before and during the diet intervention or disease treatment;
b) analyzing DNA extracted from the fecal sample to determine abundance of each reference CAG selected from the group consisting of CAG ID Nos.: 1-15,
Aᵢ (abundance of CAG No.: i)=number of reads aligned to CAG No.: i/(size of CAG No.: i×number of total reads);
c) calculating ESP-index of each sample using the calculated abundance data,
ESP-Index=ln (Heip×10¹⁰×Σᵢ₌₁¹⁵Aᵢ), wherein Heip=(e^{H}−1)/14, H=−Σᵢ₌₁¹⁵ AᵢlnAᵢ, and
e) determining that the subject responds positively to the diet intervention or disease treatment if the ESP-index is increased in the sample collected during the diet intervention or disease treatment,
wherein, CAGNOs.:1-15 comprise nucleic acid sequences set forth in SEQ ID NOs.: 1-191, 192-326, 327-593, 594-835, 836-885, 886-960, 961-1097, 1098-1264, 1265-1433, 1434-1684, 1685-1833, 1834-1979, 1980-2163, 2164-2447, and 2448-2783, respectively.

2. A method for assessing the presence or the risk of development of type 2 diabetes mellitus in a subject, comprising method 3) or method 4),
wherein the method 3) comprising the steps of:
a) collecting a fecal sample from the subject;
b) analyzing DNA extracted from the fecal sample to determine abundance of each reference CAG selected from the group consisting of CAG ID Nos.: 1-64,
Aᵢ (abundance of CAG No: i)=number of reads aligned to CAG No.: i/(size of CAG No.: i×number of total reads;
c) calculating GMM-index of each sample using the calculated abundance data,
GMM-index=log (Σᵢ₌₁¹⁵Aᵢ/Σᵢ₌₁₆⁶⁴Aᵢ); and
d) determining that the subject suffers from or at a risk of developing type 2 diabetes mellitus if GMMis close to or lower than a predetermined level,
wherein, CAGNOs.:1-15 comprise nucleic acid sequences set forth in SEQ ID NOs.: 1-191, 192-326, 327-593, 594-835, 836-885, 886-960, 961-1097, 1098-1264, 1265-1433, 1434-1684, 1685-1833, 1834-1979, 1980-2163, 2164-2447, and 2448-2783, respectively, and CAG NOs.:16-64 comprise nucleic acid sequences set forth in SEQ ID NOs.: 2784-2961, 2962-3130, 3131-3525, 3526-3747, 3748-3863, 3864-4068, 4069-4212, 4213-4393, 4394-4532, 4533-4891, 4892-4979, 4980-5116, 5117-5320, 5321-5464, 5465-5781, 5782-6279, 6280-6646, 6647-6954, 6955-7178, 7179-7613, 7614-7758, 7759-8046, 8047-8491, 8492-8546, 8547-9971, 9972-10099, 10100-10392, 10393-10502, 10503-10694, 10695-10986, 10987-11089, 11090-11262, 11263-11466, 11467-11704, 11705-12034, 12035-12113, 12114-12341, 12342-12454, 12455-12664, 12665-12825, 12826-13042, 13403-13500, 13501-13726, 13727-13949, 13950-14014, 14015-14290, 14291-14403, 14404-14686, and 14687-14850, respectively;.
wherein the method 4) comprising the steps of:
a) collecting a fecal sample from the subject;
b) analyzing DNA extracted from the fecal sample to determine abundance of each reference CAG selected from the group consisting of CAG ID Nos.: 1-15,
Aᵢ (abundance of CAG No.: i)=number of reads aligned to CAG No.: i/(size of CAG No.: i×number of total reads);
c) calculating ESP-index of each sample using the calculated abundance data,
ESP-Index=ln×10¹⁰×Σᵢ₌₁¹⁵Aᵢ), wherein Heip=(e^{H}−1)/14, H=−Σᵢ₌₁¹⁵AᵢlnAᵢ and
d) determining that the subject suffers from or at a risk of developing type 2 diabetes mellitus if the ESP-index is close to or lower than a predetermined level,
wherein, CAG NOs.:1-15 comprise nucleic acid sequences set forth in SEQ ID NOs.: 1-191, 192-326, 327-593, 594-835, 836-885, 886-960, 961-1097, 1098-1264, 1265-1433, 1434-1684, 1685-1833, 1834-1979, 1980-2163, 2164-2447, and 2448-2783, respectively.

3. The method of claim 1, wherein analysis of DNA in step b) of the method 1) and comprises the steps of obtaining the DNA sequences and aligning the obtained DNA sequences with the nucleic acid sequences set forth in SEQ ID Nos.: 1-14850; and analysis of DNA in step b) of the method 2) comprises the steps of obtaining the DNA sequences and aligning the obtained DNA sequences with the nucleic acid sequences set forth in SEQ ID Nos.: 1-2783.

4. The method of claim 2, wherein analysis of DNA in step b) of the method 3) comprises the steps of obtaining the DNA sequences and aligning the obtained DNA sequences with the nucleic acid sequences set forth in SEQ ID Nos.: 1-14850; and
analysis of DNA in step b) of the method 4) comprises the steps of obtaining the DNA sequences and aligning the obtained DNA sequences with the nucleic acid sequences set forth in SEQ ID Nos.: 1-2783.

5. The method of claim 3, wherein obtaining of DNA sequences comprises the steps of obtaining raw sequence reads in the sample and processing the raw sequence reads to obtain qualified sequence reads.

6. The method of claim 4, wherein obtaining of DNA sequences comprises the steps of obtaining raw sequence reads in the sample and processing the raw sequence reads to obtain qualified sequence reads.

7. The method of claim 5, wherein the raw sequence reads are obtained by a PCR-based high-throughput sequencing technique.

8. The method of claim 5, wherein the processing of the raw sequence reads comprises removal of adapters, trimming of sequences at 3′end until reaching the first nucleotide with a quality threshold higher than 20, removal of short sequences, and removal of sequences aligned to human genome.

9. The method of claim 3, wherein the alignment of DNA sequences uses seed-and-extend strategy.

10. The method of claim 9, wherein the sequences with no mismatch in seed sequence are used to determine the abundance of each reference CAG in step b).

11. The method of claim 9, wherein the seed sequence is 4-31 bp in length, preferably, the seed is 20 bp in length.

12. The method of claim 1, wherein during the diet intervention or disease treatment, the fecal sample is collected one week, two weeks, three weeks, and/or four weeks after the diet intervention or disease treatment begins.

13. The method of claim 1, wherein in the method 1) the subject is determined to respond positively to the diet intervention or disease treatment when the GMM-index becomes close to or higher than a predetermined level during the diet intervention or disease treatment, preferably the predetermined level is −1.028883; and
in the method 2) the subject is determined to respond positively to the diet intervention or disease treatment when the ESP-index becomes close to or higher than a predetermined level during the diet intervention and disease treatment, preferably the predetermined level is 4.4.

14. The method of claim 2, wherein in the method 3) the predetermined level is approximately −1.028883; and
in the method 4) the predetermined level is approximately 4.4.

15. The method of claim 6, wherein the raw sequence reads are obtained by a PCR-based high-throughput sequencing technique.

16. The method of claim 6, wherein the processing of the raw sequence reads comprises removal of adapters, trimming of sequences at 3′end until reaching the first nucleotide with a quality threshold higher than 20, removal of short sequences, and removal of sequences aligned to human genome.

17. The method of claim 4, wherein the alignment of DNA sequences uses seed-and-extend strategy.

18. The method of claim 17, wherein the sequences with no mismatch in seed sequence are used to determine the abundance of each reference CAG in step b).

19. The method of claim 17, wherein the seed sequence is 4-31 bp in length, preferably, the seed is 20 bp in length.

20. A microbe, comprising one or more of a bacteria corresponding-CAG NO.1-15, wherein CAG NO.1-15 comprises nucleic acids set forth in SEQ ID NO.: 1-191, 192-326, 327-593, 594-835, 836-885, 886-960, 961-1097, 1098-1264, 1265-1433, 1434-1684, 1685-1833, 1834-1979, 1980-2163, 2164-2447, and 2448-2783 respectively.
